United States Patent Application Publication US 2004/0214272 A1 - sequence listing, part 26

SEQ ID NO: 107590 - DNA, 1313 bp, Zea mays
  Clone ID: MRT4577_2961C.1
aattcggcacgaggccgcttcctcctaccatggcgtcttcttcctccccgagatctcgccatgctagctctcccgccttctgctagccagctgcgagtacggagcgctcgttttcgggcttcctgcatgcgatatcaccgacgaaacgtgtctctggaagaaggcatcacaggccgggatcggagaatgaaagctgacgatatagagcaagatgagctagggttcgcgaggcactagctgggaccgtacgtaccgtgctgccattgttcatgactccggcaaggcgcatgccggcgatgatcggccggaataatggcgtcgcgttcgggtcctcgtcagcgctatctttaagccaggctgacttcctagacagccatcatctgcagcaagcgttcgagcagcaactctttgaacagatcccagccgccgcagtggatagcagcgacaacatcatccacggtcgctccgacgcgctggtggacgagtttgagagcaagtcgtgcagcgagaatcccgatggcaccgcctctggcgatgatggccagggggacgaggacccctaccagcggccaaacaagaagcagtggtaacaacgcagagtacgcgggtggaggccgccggcgggtccctcttgacggtggcgttccagatcctggtggactccgtccccaccgccaagctctcgctgggctctgtagccacggtgaacagcctcatcgcctgcaccgtggagcgcatcaaagctgccgtctgcggcgctgaaggcaacccacagtagtagccatccataagatagagaggagcgagaggaggggtggtgcagcttttggggatcggagatatttatcagtggggagtcaagaacgcacctcagactctccttgccatgtggtgctctcatactgatgcaagcagggaaaaagaaggcgtcaccactatgcaaggggggatggttcgggtattgacttctccgtcgaatcaactagagaaaggatgcgtgctgcggacaattagatgctgtttcttctggatctctttccatattttctagggtgtacttcgtcatgttcgtcgtgttgttgttgttcaggctaaaaggtgcctgtgcttgctcgtaggctcgtagctagagaacagagatttgtttacctcttttattttattttattttatttttggattgcaaagatttgtagaatctaggaccagtcatttcatcaccaatgcttggctaaaacgtgtaccgttgttgttcgtagctttcttgctatttaaaacgatgcaatttcaatcaaaaaaaaaaacaaaaaaaa

SEQ ID NO: 107591 - DNA, 414 bp, Zea mays
  unsure (1)..(414): unsure at all n locations
  Clone ID: MRT4577_29620C.1
cagtgtgctgtattacgcccttatcancgnnntcncngcccangtacctctcaccaactttgtctttttgtatgtgaaaacccagggggtcaactctacaggatccaacaggcaatctcatgtggaattttacctttatcacccttgtttctccaacaatcatcagccctattacaacagttacctttggtgcatttattggcacaaaacatcagggcacaacaactacaacaacttgtgctagcaaaccttgctgcctactcttagcaacagcagtttctttcattctaccaactacctataattgaactctgttctttatttgatacaacaatcaactaacatttcctttttttaaatgggaccacaatcccttttccttttattaatttaaccaatttacctgacttgact

SEQ ID NO: 107592 - DNA, 225 bp, Zea mays
  Clone ID: MRT4577_29621C.1
accactcttacgtgaacacgctatcgagactgccaatgctctggctcttaaaaaacgggtgttggttcgaatcatttcgggttcagctgccgctgagcccgacacgcttgctaagatgccacaacacgccgagaagctatatattggcctgacccccaccatcctcgagcgctacctcttatccgagactgatacagcccatcctgaaggaagcactcaacatcg

SEQ ID NO: 107593 - DNA, 471 bp, Zea mays
  Clone ID: MRT4577_29622C.1
gtaccgaatcgcaattggggggggcgcacgcgcctccgcctacggcggaaaatatactgagcaggccccgcgctgtcgctctctctatcgggggggtgtccgcgcaggggtggtgatttggccgcacccacttaataataagtctacgattttgattccacaaccatcccccccacagtcagcatcgagcgatgaaaacgccgacccggcggatggtaagggcccaggcccagggggagaaggaccggaccctgcctggctacgcagctgaacatctgcgggctagcatgccgacggataggggcccaatggtgtgggccaagatgtatgggaggaacacgtcgccacatgtggaagctctatatttgttttttttttttggaattgcgacaattagtggactaacatgttggtaaaggatgattagatcattagtattagaacatctggtggacgaaacagtccaatgga

SEQ ID NO: 107594 - DNA, 269 bp, Zea mays
  Clone ID: MRT4577_29623C.1
cctcacttctgcgccgccacccactacaggtaaggcagacgaggagggcaggatgtcgcaccgtaagttcgagaacccgacgcatggctccctcagcttccttcccaggaagcgcacctcgcgctacctcggcaaggtgaagtcatttcccagggatgaccccaagaagccttgccatctcactgccttccttggctacaaggctggcatgactcacattgtccgtgaggttgagaagccaggatccaaactccataagaaggaaactt

SEQ ID NO: 107595 - DNA, 198 bp, Zea mays
  Clone ID: MRT4577_29624C.1
cacaagcagagtgcacagctgtccactgggccattgtggtgtgagcttcagatggtgaagcattctccccagtgtatgtcttgtatccgatatctaacgctttaaatggctactttggtttctgtctgtaagttaagaccttggatgtggtttaattgtttgtcctcaaaaggaataaaacttttctgctgataagat

SEQ ID NO: 107596 - DNA, 280 bp, Zea mays
  Clone ID: MRT4577_29625C.1
ttcgacttatctaacttgcctgtgggggtgtccatgcaagagggggtggacataaacctgacgctggaacaaatgacctctctattacaactttgtgctgttacttgtacatggctacgtctatctcgtcttatgctatcaaagacatcctgcttaaatttgcagactaaccgtatgctgcacatctagcaaacatgctcaagtatgcacgtcttaccacatttactcagttactctccaataaataatgctattcatgatgccgattacctgcttatct

SEQ ID NO: 107597 - DNA, 405 bp, Zea mays
  Clone ID: MRT4577_29626C.1
ataacatgaaagggagcgactaatactatacaagcctaaacacaacgtaatattgacttatctgagactggatgccatgtccctaaatcctaattacacattacataatgaagctcgaagctactgatataacaattacaaggcattagtacagcctgttggatctcacaatttttaacactcggccttacagtccataaagatcacggattggtggcagtacgatattaacatccatggctgtagcacctaaaatctacagcgtgttttagaaattctagtgcgtcgaagctcattttgtaacctggagacgttttctcacgttactcaatacccgtttcaccatctgaaccagtaccgctttggtggtgcccttgagattgagggtcaaatgcttgggcttta

SEQ ID NO: 107598 - DNA, 3100 bp, Zea mays
  Clone ID: MRT4577_29627C.1
gccggccgggtcgggaaattcgcacccacctgacttccctccgccgcgctctctgcctctaattcgcaccagccccgcgctgttttctcctctcccccggcttcagcggttcagctccttcacatactgacgtacacatctcctcgccgaggttgctccgtccggtggccagaccgtggttcttggcgctcttggttggtcggggtccttggcaaccggacgtctggtgttcctgtttcgaccttgaacttcttgggggtggggttttgggggcgtcacctccctgtttgtttcttgggttgatgtggcggcggcgcttcctgtgaccggaggggccaaggaggtgggactttttcggtgaagggaaaactgcgggaatggaagggaggcagcggcggccgaggcggtggcgcggatacggctggtgcggtgccccaagtgcgacaagttcttgccagagctgcccgcctactccgtctacgtctgcggcggatgcggcgccactctccaagcaaagaagaagaattcagcccaatcttcagatgatgctgacaatggaaatgtgaaataccttgaagtactggagtgtattccacaggcatctgcaagaaaacatggagctagtactactgataagtcagaaaccagtaagattgcagatgtacatagcaaaccagtttatggcaatcatgataggattcagacagggccaagtccctcaaatctgaacacttctattagagatgatggcaaggaggcaaagtaccgacacattcgttattgcgagaatggtgaaatggggcaatcattgagagtaagagacatgtccccgaagtctccaatcaatcacatttcagacaataatcggagtgagtaccacttgaagcagaggtacagctattctactaaggaatgccctggtgaaagaaacttggatggtccaagcaaagtcaggggacttgagaaagaccgcgctgagatcttgaggatgcttgatgagttgagagaccaggtacagcaatcttgcaatgcgactaatggggcaagtggaattgccccatctactgcagcagcagattccaacagttcacatggtacttctgaccggttgagtcaattgaggcaggttgcaccacaattgcatcagaatggttcacatcactccccatccttgaatgttggaagtcctagcgtttctcgtgtttatgctccgctgcctgcacaacaagattgtgtcagatatgcagagcctatttcacatgctcgagcctctagctatcctgccagcctctatccatggagaaattttgataattatttctttggacagcatgatcccgatcctcttctctcttgccgccatgatggcttctatcaccaagctgcctgttcttgcttgcactgttgccaccaagaattcttgcctatacagggaaatcacataggcttccatgatcaaagggcaccatatcttctgaacaattatggggcttatcctgtggacagtcccttacttggtcagcaaagatacagtgcaagagttaccaatactaccttgcagcagaatcacatgagggtcaacgttagcaagaaggctgcacagacttgtgagccagtcgcaggtggtgctccattcaccatatgctgcaattgctacgaagttctacagataccaaggaaacagtccctgtcagggaacgagtataaattgcgttgtggatcatgctcacatgcaattatagtcaagcttgatggaaacaggctcaatgtatcagaatttgcactatgtacacgtttatctgatggacaggaaaatgacatgggaaccgatgggcaaactcaagacaataggtccattccagcttaccatttatctgttggaagtcctgcatctcaagaacgagatctgcactcaaatttgagcgagtcagagaacaatcatacccctctaggaactgactcagagggcacttccctgtccagggatcttcctgctgaagacagtgcagtttcccatgtaccaaatttaccacatcacagtcattctggatcatctccaactgaacattttggagtgggaagtagaagtacccattctgaacctgaaaaagttatactattaactgaaagttccaagcagacctcagttagaggtatatgtgtaacaaacaagatgcaatctccaaacaatgagtttgatgttcctgaatacacagatgatacattaaatgaccaacaagatactgaccaccctagaacaacaaaggccagtgattcctttctcactaatctgataaaaaggagcttcaaaattaataatggattgcgcaacagaagagcaagggtttatgtaaatggctttcctatctctgatcatgtggtccgaaaggctgagaagctagcaggatcaatctgccctggcaattattggtatgactaccatgctggcttctggggcgttatgggacatccctgccttggcatgataccgccttatattcctgagttcaatttccccatgcccaagaactgtgctggtggaaacaccagcatatttgttaatggaagagagcttcaccagaaggatttggatttacttgtcactagaggactctctgattcccctggtagatcttatgtagttgaaaattctggaaaggtttcagatgaagtatctggtgaagagctttatggccttggaaagcttgcaccaacagttgagaaaatggggcggggatttggcatgcgcatcccaaggttcatcaagcgacaggccaacttggtacagctagacttctaaaccttgaaggcaaatcgatggggcgtggatttggcatgcgcatcccaaggttcatcaagcgacaggccaattcgatctaccgtggttacttcaattgtgaagaaagttccattccatgtatctttctttttttattatattccgattaacatgaggcctagtttagtcaatcaagtttattgtaatttcccatgcatttgtttttactgaaaaattccctttttcatttacatgtgcaagaacaatgaagcaattacctagttgaatggcatgaattgtatcaaataaaaaaaaaaaaaa

SEQ ID NO: 107599 - DNA, 132 bp, Zea mays
  Clone ID: MRT4577_29628C.1
taaccatgtatcgtcaccagacaccacaacaagaacatgtacaagagactctttagcatccattgtgtgtataagctagggtttgtggctgccttttatttcgcttttcctcagccatcataggatggtacg

SEQ ID NO: 107600 - DNA, 471 bp, Zea mays
  Clone ID: MRT4577_29629C.1
gtcttatgattttcttttattttatgtaaatgggacgtttatgagaaaggtaatggatgaatatgtcacgattacaatgcgataatacataagattacactcgcgtacaaccttccccaattcccttaccatgagtccatgaccaaaactctcgacacagcacagaaaataaccccagatcaaaactaacattcatagctgttttagaattagacccaaaaacctaaacaactctttcctgagcggcactccaaagagatgaggctcacttgaagcattttgcatccagcaaggcctcgccctcaaaaggctcctggtcctcgatcatggcattgacccgctccttctgggcctcatcagagaggtcaaccttggtccactcgtagagctccatgtcatagacctcatccatgacaaacttggggatttctgggccacggaagagccagagccccttgaccttgaaagggg

SEQ ID NO: 107601 - DNA, 3249 bp, Zea mays
  Clone ID: MRT4577_2962C.1
atggatcctaaggggaagggaatcgtgatcaacgataaggagaaggagtccttcgtcaacgagccaagggatgacaagtccaacgactcaagctcgggccacagacgcaaagatgggaagaagaagaagacaagacgcatcaaggagatcgtctactacgacagtgatgagtctacttcttcccaaaaggatgaggacaacgactacaaacaaaagacggttaactcaaacttttcttttgattattcgcgcattccgcatagctcaaatgctcatttgctccccattccacttggcaagcctcctcactttgatggagaggactacggattttggagtcacaaaatgcgtactcacctattttctctccatccaagcatttgggagattgtggaaagtggaatgaaatttgatagctcggatagcccttcgtttataaatgaacagatccataaaaatgcacaagctactactgtgttgctagcctctttgtgcagggacgagtatcacaaagtgagcggcttggacaatgccaagcagatttgggacaccctcaagatctctcatgagggaaatgatgtcaccttactcaccaagatggaattggtggagggcgagctcggacgattcgcgatgataaggggcgaggagccgacacaaacatataaccggctcaagatcctcatcaacaaaataaggagctacggaagcacgcgatggacggatcacgacgttgtccgcctaatgctaaggtcatttaccgtccttgatcctcacttggtgaacaatattcgtgaaaatcctaggtacatcaagatgtcgcccgaagaaattcttggaaaatttgtaagcgggcggatgatgattaaggaggcgaggtacgtggacgacgcgttgaatggaccaatccatgagcctcaacccattgctctcaaggcaacaaggagcaaggaggcgctacccagcaaggtagcgcaaattgaggcggccggtcttaatgatgaagagatggccctcatcatcaaaagattcaagacggcactaaagggtcgcaagggacagccaagcaagactaagaccaagggaaagcgatcatgcttcaaatgcggtaagcttggtcattttattgctaactgtcccgacaatgatagtgaccaggatcacgggagcaagagggaaaagaagaagcattacaagaaggccaagggcgaggcacatatcagaaaggagtgggattcggattgctcctcctccgactccgacaatgaaggactcgccgccactgccttcaacaagacatccctcttccccaacgagcgtcacacatgccttatggcacgggagaagaaggtatgtaatcaagacaatgtcacttatgattcttccagtgataatgagtctagtgatgatgaaatagattactctagtttgttcaagggattggatagaactaaagtagataaaattaatgaattgattgatgccttgaatgaaaaagatagactcttagaaaaacaagaggaccttttgtatgaagagcatgacaaatttgtagaggcacaaaaatcttatgctttagaagttaaaagaaataaagtgctttctagtgaactatcttcttgtcatgaaaccattgctactttaaagagagttaatgacgacttaaatgctaaactagaagtagctagtaaatctaattcttgtgtagaacatgttgagatttgcactaggtgtaaagattttgacattgatgcttgtagtgaacacctagtttcaatttccaaacttaatgatgaattggctagtcttaatgctcaacttaagactatcaagagtaattttgataagctaaaatttgcaagggatgcctacacaattggtagacacccctcaattaaggatggacttggcttcaagagggaagccaagaacttaacaagccataaggctcccattcccgctaaggagaaagggaaggcccctatggctactagtgctaaaaagaaccatgcctttttgtatcatgataggagacaaactagaaatgcttataggagttataatgcatacaatgatttgtctcatgctatgtttgcttctagttcctcatatgtgtatgatagaaatgttggtagaagggacgttgttcataatatgcctaggagaaatgttgttaatattcctaggaaagttaatgagccttctacaatatatcatgctttgaatgcttcctttgcaatttgtagaaaggatagaaaggtttatgcatccgggggttcaagctggattatcgacagcggatgcacaaaccatatgacgggggagaagaaaatgttcacctcctacgtcaagaataaagattcccaagattcaatcatattcggtgatgggaatcaaggcaaggataagtctgaaacccaagggaccctcaagcgcttcctcaggagagctcaaaatgagtttgagctcaaagtgaagaagataaggagcgacaacgggtccgagttcaagaaccttcaagtggaggagttccttgaggaggaagggatcaagcacgagttctccgctccctacacaccacagcaaaatggtgtggtagagaggaagaacaggacgctaatcgatatggcgaggacgatgcttggagaattcaagacccccgagcgtttttggtcggaagccgtcaacacggcttgccacgccatgaacagggtctaccttcaccgcctcctcaagaagacatcgtatgagctactaaccggtaacaaacccaatatgaagaagatattccgacggccgctatacgtaccatggcgattggagaagtgcggccacaggaacaagatgaacgagatcaaccttcttcctcaacaacggtacatcccccaactcaagacgatgaacaggttgtaccaaatggatgtgaagagcgctttcctcaacgggccgatcaaggaggaggtgtacgtagagcaaccccctggcttcgaggatgatcggttccccgaccatgtgttgaagcaactcaaggatggcaccttcatctcccaaacgaagtacacgcaagacttgctgaagcggtttgggatgaaggacgccaagcccgcaaagactccaatggggaccgacggacacaccgacctcaacaaaggaggttcattctgcattttgttgcttattgtggtgctcaagttgtacaaacactccctggacctcacaagtccgttgcaaagtgctgcacatgtttag

SEQ ID NO: 107602 - DNA, 1913 bp, Zea mays
  Clone ID: MRT4577_29630C.1
atacgactctcggcaacggatatctcggctctcgcatcgatgaagaacgtagcaaaatgcgatacctggtgtgaattgcagaatcccgcgaaccatcgagtttttgaacgcaagttgcgcccgaagccttctggcggagggcacgtctgcctgggcgtcacgcgaaaagcgcttcgatgttgattatggctactccgcctccgctctcccccctgctgcgcgctactcgcccgatctcgcggtgctggtagcggtgaaaatatctgagatcgagtgaagctagcttttcatcgatatggcgcttgtactgcatgctggcagtagtaacaaaaatgcattcaaagcactaattgccgcggattacagcggcatcaaggttgagttggtaaaagactttcaaatgggggtttccaacaaaacaccagagttcctcaagatgaaccctattgggaaggttcctgtcctggagacacctgatggtcctgtctttgagagcaatgcaatagcaagatatgttactcgcttgaaggctaacaacccactttacggatcttcactgattgattatgcccatattgagcagtggatggactttgctgcgacagaggttgatgccagcattggaaagtggttgtacccacgtatggggttttatccctatgctgctgtgacagaagaatcagccattgctgctttgaagagagcattcggttccctgaacacccatcttgcatcaaacacattccttgttgggcattcagtgacacttgcggatattgtgctgacatgcaatctttatatgggctttagccgtatcttgactaagagttttacctcagagttccctcatattgagaggtacttctggaccatggttaaccagccaaacttcaaaaaggtcattggtgacgtgaagcaggcagaagctgtgccacttcttccaaagaagattgctccggccaaagagcagaagcctaaggaagccaaaaaggaggccccgaagcctaaggaagctgagaaaccagcagaggaagaggaggctccaaagcctaagccaaagaatccccttgacttgcttcctccgagcaagttgattcttgacgattggaagaggctgtgttctaacacgaaaaccaacttccgtgaggttgctattaaaggtttctgggacatgtatgacccagagggctactccctgtggttctgtgactacaagtacaatgacgagaacacagtgtcgtttgtgactatgaacaaggttggtggcttcctgcagcggatggatctgtgccgcaaatacgcctttggcaagatgcttgtggttggctctgagccccctttcaaggtcaaggggctctggctcttccgtggccccgaaatccccaagtttgtcatggatgaggtctatgacatggagctctacgagtggaccaaggttgacctctctgatgaggcccagaaggagcgggtcaatgccatgatcgaggaccaggagccttttgagggcgaggccttgctggatgcaaaatgcttcaagtgagcctcatctctttggagtgctgctcaggaaagagttgtttaggtttttgggtctaattctaaaacagctatgaatgttagttttgatctggggttattttctgtgctgtgtcgagagttttggtcatggtaagggaatcggggaaggttgtacgcgcgtgcaatcttatggattatcgcattggaatcgtgacatgtccaagaccatcctttacccttctcataaacgtcccatttacatatatttatttatttatttaccgtgtaactagtcaatccattgcgcgcatgtacttcagtgcatgatatatatatttttttgtacaacatagggttgttatttaatgtaagggtgtgtttggtttctagagact

SEQ ID NO: 107603 - DNA, 1946 bp, Zea mays
  Clone ID: MRT4577_29631C.1
ccggccggggggctaatgtgcactattcaatcagtttcttcgctagaacatccaacggctgagatcgcgtgcgcgcaatcctaggcaccagatcacaggtactgggagctccgcctccataagtagatggctccgttagggttgttttttctactctgcctctgctctcacctgtttcgctgctcgcccgatctcgcgctgccggcagcgatctgagatcgagcgaagctaagctttttcatcgagatggtgcttgtactgcatgctaacagtggtaacaaaaatgcattcaaaacactaattgccgcagaatacagcggtgtcaaggttgagttggtgaaggactttcaaatgggtgtctccaacaaaactccagagttcctcaagatgaaccctattgggaagattcctgtcctggagactcctgatggtcctgtttttgagagcaatgcaattgcaagatatgttactcgcttgaaggctgataacccactttatggatcttcactgattgattatgcccatattgagcaatggattgactttgctgcaacagagattgatgcaaacattggaaagtggttgtacccacggatggggttttatccccatgctggtgtggtagaagaatcaactattgctgccttgaagagagcattgggttctctgagcacccatcttgcatcaaacacattccttgttgggcattcagtgactctcgcggatatcgtgatgacatgcaatctctgtatgggatttagccgtatcttgactaagagttttacctcagagttccctcatgttgagaggtatttctggaccatggttaaccaaccaaacttcaaaaaggtcattggtgacgttaagcaggcagaagctgtgccacttgttccacagaaggctgctccagccaaagtgcagaagcctaaggaaaccaaaaaggaggctccgaagcccaaggtaactgagaaatcagcagaagaagaggaggcaccaaagcctaagccaaagaaccctcttgatttgcttcctcctagcaagatgattcttgatgattggaagaggctgtactctaacacgaaaaccaacttccgtgaggttgctattaaaggtttctgggatatgtacgacccagagggctactccctgtggttctgtgactacaagtacaatgatgagaacacagtgtcgtttgtgaccatgaacaaggttggtggcttcctgcagcggatggacctgtgccgcaaatacgcctttggcaagatgcttgtggtaggctctgagccccctttcaaggtcaaggggctctggctcttcaggggctcagaaattcccaagtttgtcatggacgaagtctatgacatggagctttatgagtggaccaaggttgacctctctgatgaggcacagaaggagcgggtcaatgccatgattgaggaccaggagccattcgagggcgaggccttgctggatgcaaaatgcttcaagtgaggaaaaaagtttttgggtccaattctaaaacagccatggatgatagcttttgatatggcgtgctggttatgattatgctgtggagttttggccatgttaacgggaggtcgtgctcgcgaaaccttctgcattatcgcatcggaatcgtttgtcatgtgcatcctagtgaatagatatattatgaaaatatatctcctgaaatttaatgatatttattttattttataacgatttatactttttatttaatatatatattagtcaaacttgacatgctttaattcaattcgatattgtgctagaatcgtaattttttcaggtagcacttggttataattcgagtactaccactaccatctggatagttttaacgacttctatcatcagttttgtaactgttactgttacaagagcgagataggaaaatgaaacaaaggatgtcaaaatttgtgtaa

SEQ ID NO: 107604 - DNA, 233 bp, Zea mays
  Clone ID: MRT4577_29632C.1
gctacatacaatgggcctactggctatcatagggaaaacccgttctcaatggaacaaggcattatccagaattagccacagggcacatccgatgatgggacgtgggaacgagggcgaggaaaggtagctcaacagcaagagggatgaccggaacactggggccaatgcttaccaggaaacacatgcccggcgcgtgcacctggccgaacttccacaatggaccgtggggcact

SEQ ID NO: 107605 - DNA, 513 bp, Zea mays
  Clone ID: MRT4577_29633C.1
tgcaaaccctgccgcctgttatgtgaaagcagcaagaactcagcaatagtcaagtccatttctggaaataacctggaacctgtaactgacagtggaataaggaaaaccattggcattagtagaccaccatatcctgtttatactgatgaagaggcagatggatctgatacagaagaagatccggacagcagtgggagaggagaggtgattgacactgaacctgacgatgattctgcggtcagacaggaggaccctgagctagaggagatcctgtcagattagttcagttgtgcggctgtttcccccggttaagctatgcaaatctgttagcatatgcatgtgttgtatgtggcagcaattttatggtttgggcatcaccgaactagcttagatctgcagccgctggtgtacatagattttgtggtgtgcagctgtccaccctctttctcttagctgaatgagggcatgatcatgtttgtcccctgtgcaagccagatttgcttaccttttctt

SEQ ID NO: 107606 - DNA, 694 bp, Zea mays
  Clone ID: MRT4577_29634C.1
gagaacgagcatctccagccaaagcaagtggctatgttctttgaaccagaactgaagcttcctcgtctcatcatcgacacagtaagcaacatggcggctaatctcaagtgggctcctgtactaggcctcctcgacggctatgctgccatggatgctaccaccagcgccggcaacatcgtagcggactggggacataacggcaacgaatgcacactgcgggacgcctgcaactccgggctctacgcctacgtcaacatcgtgatcctcacaaccttcggcaacgtacagagcccagttctcaacctcgccggacactgcgaccccggcatccggcagctgcaccggccagagcatcgacatccatacctgccagtggctggagcatctaggtgctcctctccatcggcggatgcagcggtagctacggcctctcctccatcgacgatatcaacagtgtgtccgactacctgtgggacaacttcctgggtggcagcggctcgtcccgccctctcggcgcctccgtgctcgacggaatcaacttcaacatcgagaacggccagtatgcgcactacgacgacctggagaacgcgctcaacgtgaaggtcaacgagcgtgctgacagcgataccgcagtgcccctacccggacgcatcgctgtcgacgacgctgcacacggaacagatcgacaacgagc

SEQ ID NO: 107607 - DNA, 657 bp, Zea mays
  Clone ID: MRT4577_29635C.1
cccccctggagtttttttttttttttttttttttttttttttttttttttttttttttttttttttttcagggaggctgattaccctttttttgggatcaaaaaaaaggtagatgttttcccgggagggttacataacctttttgggggaagaaaactgggagtccaaagtcattccttggacccaaaaaaggcaaaaaaaatttacggccccaaagtacttttgccattacgggactttcactaccacttttttttaacataatccgatttgttttgtttcccgaaaggggggggttcgttttcagttaaagtcattggcaggccggggttggggatcatccccttcacaaaaaaaatatcaaaagaaggttttttttaacgagaaattcttcagttttggagggactgattgatttttccagcatggggggaagcctttcagtctcttttttagggaagccaaaccccttgtttatgattttttttgcagctgccacatatatttttccatgctgggttgcaaaaccgttgaccttaccaacatcctttttttttttaaagaggacttctttccgtttgtcatcagcagctttgaaaacctccttcacaagaggattcaagtttggcacaagcccacccttttgattcagggggc

SEQ ID NO: 107608 - DNA, 515 bp, Zea mays
  unsure (1)..(515): unsure at all n locations
  Clone ID: MRT4577_29636C.1
gccggccgggccgggnaaatacaaaaaaaaaaaaaaaaaaaaaaaaaaaaaaaaaaaaaaaaaaaaaaaaaaaaaaaaaaaaaaaaaaaaaaaaaaaaaaaaaaaattttctccgcctcgggcacccggttccgggggcctttccccacctactctcggggttctcgccagccagtttagggtttcggccccggggggtttatccgcccccgccggccatgtcaaagaaaggagggaaggccaagccgttgaaggggcccaaggccgacaaaaaggagtacgacgagacggatcttgcatatctgcaaaaaaaaaaagatgaggaaaaagcactgaaggagcttaaggccaaggcacaaaagggcgcgattgggggctcgggtctgaaaaaaaggggaaaaaaatgaaactggccacccgtctccaatacctaaaggatgataaggcagctgtctatctgggtggcgcttcacaaagggggatggaaacaggggaacctcttgtgttcggggtcc

SEQ ID NO: 107609 - DNA, 382 bp, Zea mays
  unsure (1)..(382): unsure at all n locations
  Clone ID: MRT4577_29637C.1
acttcgacctcactgtcgagctcgagatcgacgtcgacgacgagccgtttcttgcctcttgccggagtagccattggaggaatgagtggcggcgccaaaggagagcgccgtggaagaagagaggagtcaggggaacttaggttttcaccggcctcgtgtaaacagcagggacaattttgacttttaccttagctaatcgaaggtaacagaggacgggggaataactgtccctgtctggcaagaatgtgagctcgagaataccatgctgncgatgcgcggctgcggagtaacgaagtggcgaagccgcgcgacgagattattacaatctcaaataactcatggcgctagaccacggcgccgagcatatctttctctttcccta

SEQ ID NO: 107610 - DNA, 324 bp, Zea mays
  Clone ID: MRT4577_29638C.1
acaacgcagaggtatacacaatacaacgggtacagacgcgcatataggttaaagaataacaggacagagggacattagctgcgggagtctgaaggacagacctacctatagcccagcgaattatagaagaaaaaggtacttctggctttaaacagacgaactgtacacaatttatggtggagctaaaaaggtttagacttaaatcccaatgtctagaatctgacggggcctgacttgattagtagaacctaggcgggtatgcgatcacaagatcgagatggatcgtgcaccggttgttggacagggtcaccaaaccatttaagg

SEQ ID NO: 107611 - DNA, 292 bp, Zea mays
  Clone ID: MRT4577_29639C.1
aaaaagaaatgggaaaaaggagtagagggccatcacaaaacacaagtaaacagaaacagaggaaaactggtcagggaagagggcaatgcccgagagagggggtcatttaaaacaggagtatttttccgtgacgataccacagggtggaggtggagaagatatatttgccacaaacagatgggcacaaaaaatgctatatgacaacggacaattttaatggcgaagaaccatttcggtaacagcaactagggaaccctttgccaaaggatgtaaagaaaaaggagaaaataca

SEQ ID NO: 107612 - DNA, 3597 bp, Zea mays
  Clone ID: MRT4577_2963C.1
cattgggtacctcgaggccggccggggacataagtggccccacgtgaaaaaacccttgcgccgctgagctgagtctccttcctttcctcgcctccgcctccgcctccgcctccgccttcagtttagcctccaagcaggggcgccgcgcggggtattctgtccgtcgttgagggtagagagtcacttgcaccgggggagcggagatgaagccggttgtggggatcgtggtgtcgaacaagatgcagaagtcggtggtggttgcagtggaccgcctcttccacaacaaggtatacaaccgctacgtcaagcgcacctccaagttcatggcacacgacgatgacgactcctgcaacattggcgaccgggttaggctggatccttctaggcccttgagcagacacaagcactgggttgttgctgaaattctccgcagagctaaggtgtacgttccaccagctgcaacagcgtccagtgaacgtggtagcaaatctcaacaagctggtggtgctaccaaatgatccatctgaagttactcagaacaagatgcagtcacggcttgtttttctttcgctgtatgtttgtttccttgtggaatgtggttgccatgtttagcatgggagaaaaaatagcaagcagccagcatctttgcttaattactgttgttcttctgtggtgtccttcgtttaacggtactagccattaaggatgtagttaccagattcaacaagaccaatggattcatattgtattggttcacttccgatacccgcttgcatttgcatgtatggttggcagctgtctttgcaactcccctctgacactgaattgagcgggtcggaaaacatcagagtgcataatacatgtcaaactgatccagggggagtcgtgactagctgaaaaaggtctatctttgtcgaaagatacatttgttagacctaacacatgttccccctttagaagcttatgaaggttcttcatcccaacatgtgctagacggcgatgccacagccagcccatgctagtcttagcaattaagcatgcatctagaccggcctcttccttcgaaaaatcaactaaataaagtttgtcgtctagtacacccttaaaagctaatgaaccatcacaccttctaaagatggacacatctacattggtaaataaacaattgtaacccatattacagagttgactaacggacaacaagttatacccaagcgattcaactaaaaacacattagagatggaatgctcggatgaaatagctatttttcctagtcctttaaccttgccttgattcccgtcaccgaatatgattgaatcttgggaatctttgttcttgacgtaggaggtgaacatcttcttctcccccgtcatgtggtttgtgcatccgctgtcgataatccagcttgagcccccagatgcataaacccaactcttgttgggtcctgcaaggttagtaacaatagccttagggacccaaatgcaagtcttgtctcccttgcatttggcccccacctttttagcaatcactttttcatttatgcatgagagaacaaatttagcattgcaagcatgaaagacagtggtagatccattacacactttactaggagcgtgagacacaaagtttctcctacgatgaataatatttttcttaggcatatctctatcgtgcacaaaggaagaacttgaagcaatcatggcatgtgagtcaaaaacattataactcctattataatgagaatttctagaatatttcctatcatggtacatgaaagcatggttcttttgactattactagtcataggagccttccctttttccttgttgaaaatgggagccccttgacttgttaagttcttggcttccctcttaaagccaagcccatccttaattgaggggtgtctaccaatagtgtaggcatcccttgcaaattttagtttatcaaagtcattcttgctagtcttaagttgggcattaagactagccacttcaccatttaattttgcaatagaagtaagatgctcaacacatgcatcaacattaaattccttacacctattacaaattactacatgttcaatacatgagctagatttatttgctacttctaacttagcatttaagtcatcattgacactctttagactagaaatagactcatgacaagtagataattcacatgaaagcatttcatttcttttgacttctaaagcaagagacttttgcacacttacaaatttatcatgctcttcatataaaagatcctcttgcttctctagcaatctatttttctcattcaaggcatcaattaattcattgatcttatcaattttagttctatctaaacctttgaataaactagcatagtctacttcatcatcactagactcatcatcacttgaagaagcatacgtaatagtacttctagtatttaccttcttctcctttgccatgaggcatgtgtgatgctcgttggggaagagagccgacttgttgaaggccgaggcggcgagtccttcgttgtcggagtcggacgaggagcaatccgagtcccactcctttccaaggtgtgcctcgcccttcacctttttgtaggccttcttcttttcccacttcctgctctttccttgttcttggtcactatcattatcgggacagttagcaatgaagtgaccaatcttaccacacttgaagcaggagcgctttcccttcgtcttgctcttgttgggatgctctttgcgacctttgagcgccgtcttgaagcgcttgatgatgagggccatttcatcctcatttagcctggccgcctcgacttgcgccactttgctaggtagcgcctcactgctacttgttgctttgagagcaacagtttgaggctcgtggattgggccattcaacgcctcatcaacatatcttgcctccttgatcatcattcgcccacttacaaactttccgagtatttcctcgggcgtcattttggtgtacctaggattctcatgaatagagttaacaagatgaggatcaaggatagtgaaggaccttagcataagccgaacgacgtcatggtccgtccatctcgtgcttccgtagcttcttattttgttgaccagggtcttgagcctattgtacgtttgggttggctcctcccccctgatcattgcgaaccttcctagttcgccttccaccaactccattttggtgagcatagtgacgtcgttcccctcatgcgagatcttgagggtgtcccaaatctgcttggcgttgtccaagccgctcaccttatgatattcatccctgcacaatgatgcaagaggaatggaaagcaaatgagcattggaagtttgcgaaatacgagaataatcaaaagaaaagtttgagttgaccgttttctttttctcgtcgtcgtcgtctctttgggaagaagaggactcgtcgctgtcgtagtagactatcttcttgatgcgcctcttcttcttcccatccttcttcttgtgacttgagcccgagtcagtgggcttgtcgtcttttggctcattgatgaaggactccttctccttgtcattgatcaccatcccctttcccttaggatccat

SEQ ID NO: 107613 - DNA, 137 bp, Zea mays
  Clone ID: MRT4577_29640C.1
ggggaagctccaggagatggcggtgagcgaggcgaaggctctagtggcagtgaacgacgacatccgcggcctccgggaccggctcatgtggatgcaggccttcttgcggcatgccgacccgcggcgaccgacacctc

SEQ ID NO: 107614 - DNA, 282 bp, Zea mays
  Clone ID: MRT4577_29641C.1
acacacgcatctaaaatcagtctctatatggtgctccgtctcaggggtggtatgcagatctttgtgaagacactcactggcaagacaatcacccttgaagtggagtcttcggataccattgacaatgttcaggccaagattcaggaccaggaagggatcccaacccaacaacaaggcctaaacctcgccgggcacccatctaaaagaggcgcgcaccctggcagattacaagacccagagggagaacactctaccccgggcgctcccccacaggtgtgacat

SEQ ID NO: 107615 - DNA, 161 bp, Zea mays
  Clone ID: MRT4577_29642C.1
accgctcgaaggtacctaggaatgtaaacttctgtaaaactgcataaaccccgaagatagggtctgtttaatcgacattattgtcatcttttaatagagttatcactaatgtaggactaaaaccacgttcaattacattatttatttttgcatctgtaaaa

SEQ ID NO: 107616 - DNA, 718 bp, Zea mays
  Clone ID: MRT4577_29643C.1
ccccattatcataaagctatgtcatctccccatgcttgctgttgcagacccccttgatgccgccccgcccccgtgggctgacatggccgctgcgcaaaactcccctgtcgcggagtgtaaatcgcctatccccatgtcctcccttgaacctgaccctattcacgaggcctctgctcggaagatccgtgtccgcgccaagcgttcggctgatcatgcagccaaatacaagggtgctggccaactccttgcttctcgccacagcgagcgcttgcgcgcgaaggagcctgctcactatgtcgatatgtccaccaaagcatcgcggctgaaatctctgaaggatgaactagcaaactgctccaaggaactcaaggttcaggttaagcgccgtggtctgctgcgcaaccgtactttgaatgctgctgatctaagggcgctcgctggcacggtggccctgtcggcgacagctacagctgagctggaacaggtgcttggacattatgcatgattgtcaccagctcctgtgccctgccgaggctaggctcgtgttctcctagcaagttctcctttgcatcccatttcttacactgtatttccctgttcgggctcgaatattttgttctccacatgtatgccgatgtttccacacacccccctctctggacgtcgtgatgttgtcttataactccaaccgcaatatgtcgaaaaaaaaaaaaaaaaa

SEQ ID NO: 107617 - DNA, 507 bp, Zea mays
  Clone ID: MRT4577_29644C.1
cccgggtcgcccagcgtcgctcacggtccgctcccctcctctaggtttctgggttttcgggaggagaatggcgtctgatagggtgctcgggactggaatggttcacggaccaaggcttcgtttatcacccccgcgacgtagcgaggacctattctccacatcctcctcagaggggggggtaccgagtcttaacgacgcgatgccgcgaatacaccgtcggagcggcaacacggccggccaggccctcgtgtcaccgcgcccggcggcggcccgcttgccggcggggaacgtcccgacggcggcaacggcggtgggcgaggcggatactgcggcggcgaccgcggttacggcggcggcggtgaccgcggctacgggggaggaggcgaccgtggctacggcggcggcgaccgtggttacggtggaggtggcgaccgcggctactgcggcgaccgtggctacggtggaggcggcggctatggcggtgggtacggtggaggcggcggtgga

SEQ ID NO: 107618 - DNA, 275 bp, Zea mays
  Clone ID: MRT4577_29645C.1
ctcttgtgcttctcctccttatacttcgggtgctgcatgcaaggctttacagttgttggccaaaggaaaagttaaaccaaccgaactaagagcaaaaaccaggaaaatgcatgccaagttaagagaagtattcggagaaaagagtgtttctcgttcgtcttctacttcatctattagtattggaaagaaagcatcgaaagatagcggcaatggtccctttgagaacgtgagccacccagattccccttatattcatttaagattgaaagaagaat

SEQ ID NO: 107619 - DNA, 507 bp, Zea mays
  unsure (1)..(507): unsure at all n locations
  Clone ID: MRT4577_29646C.1
catacggttctgcctccatccagatctcgcgctctccctaagcaccacccagcaccaggcgccatgcccgcccgccatctccgctgcgccaaatcgaggaatccgcctccgctatggaaggagatcgcctctgctgcgccccaattctcggttggcatcatcgtccgcgtcctggctctcggtccttcgcccacgttgtccatggaaggagggggaggatcacggtcctcggccaggctctaaatggatggagatcgaggaatccgcctccgctgcgccctggcaccctctacgaccgccgcctctccctcacctgcccgcccgcgagacaatcgccatcgnccccctgccccgcgctgctcgcgatgaccccctcccccgcgattctagggtcttcgcgacccatggcgtgtngntctgngccgaccttctcctncatntgagatccaancagngctngtgtttataatgaggtaggattggagngagaaaatgagannnttggtt

SEQ ID NO: 107620 - DNA, 322 bp, Zea mays
  Clone ID: MRT4577_29647C.1
gggaccaaacccacccttgaaccaggacctggggtaacccaacatttttggccataattccggggctaaatttttttttttttcctaaggacaaaggcaaagaacttttcttgtttccgttagggaaactttttttttcccggttgaacttaaaaccaatggaaataaccaaggttaatttttcaagctttttaacccattaaaacgcccattcccccagccggcacttctggaagttacaaaaacaccaacctttttgggaaggggttgaaaccagccaaagaaccaggcccaaaatctaaaagaaacctttggtggcttg

SEQ ID NO: 107621 - DNA, 287 bp, Zea mays
  Clone ID: MRT4577_29648C.1
aacgtcaccgacgagtgatgtcattccgcttgcttgattgatcagatattcgcagttgaccgtgtcctcggagcacagatgaagtttggtgctgcctacttgcgttcgctgtcctcgctgggaacgcacagcccctccgctgaggatttgactgccagttctggagtcagttggctgtgaagttgacaatgaaaggatggaactcctgctgtcggggggggcggtgaggacatcaccgagctcattgccgcgggcagggagaagtttgttttagtcccatgtggtgg

SEQ ID NO: 107622 - DNA, 329 bp, Zea mays
  Clone ID: MRT4577_29649C.1
caatgctggaaatcaaattctattcattttggaaaataattacatatttattcgtcgtagctatattccattgttttattaggtgctcaaaaattgtgttgaccggacacatgctattttggcctatgtgctatccattgctatgttttatcggtagggttttccatgcttagataacttcctaatttctcattttttgtaaataaataaatacttggagattcttggtcaaaggaatgttggacacctgctagccaatgtgcaggtaacaggaacctgaacaaaaaggccttgcagtcttttttttgactgcggatatctttttcatg

SEQ ID NO: 107623 - DNA, 3066 bp, Zea mays
  Clone ID: MRT4577_2964C.1
atggatcctaaagggaagggaatcgtgatcaacgacaaggagaaggagtccttcgtcaacgagccaagggatgacaagtccaacgactcgggctcgggccacagacgcaaagatgggaagaagaagaagacaagacacatcaaggagatcgactactacgacagcgatgagtctacttcctcccaaaaggacgacgaccacaacgactacgagaaaaagaaaccgatcaattcgaacttttcttttgactactctcgtattccgcatagttcaagttcacatttgctctccattccactcggcaagcccccacactttgatggagaagactacgaattttggagccacaaaatgcgtagtcacctattctctctccatcctagtatatgggagattgtagaaagtggaatgcactttgatagttcggatagtcccatgttcattaatgagcaaatacataagaatgcacaagctactactgttcttctagcttctttgtgcagggatgaatacaacaaagtgagcggcttggataacgccaagcaaatatgggacaccctcaagatctctcatgaggggaacgacgtcaccttgctcaccaagatggagttggtggagggcgagcttggacggttcgcaatgataaggggcgaggagccaactcaaacatacaaccggctcaagacccttatcaacaaaataaggagctatggaagcacgcgatggacggaccacgacgtcgtccgactgatgctaaggtcctttaccgttcttgatcctcatttggtgaataatattcgtgagaatcccaggtacaccaaaatgtcgcccgaagaagtccttggaaaattcgtaagtgggcgaatgatgatcaaggaggcaaggtacgtggacgacgccttgaatggatcgatcaacgagccgcaacctcttgctctcaaagcaacaagaagcaaggaggcgctacctaacaaggtggcacaaattgaggcggccggacttaatgatgaagagatggctctcatcatcaagagattcaagacggcgctcaaaggtcgcaagggacagccaagcaagaccaaagccaaagggaagcgctcatgcttcaaatgcggtaagattggtcattttattgctaactgtcccgataatgaaagtgaccaggaactcgagagcaagagggaaaagaagaaacattacaagaaggccaagggcgaggcacatatcggaaaggagtgggattcggattgctcctcctccgactccgacaatgaaggactcgccgccaccgccttcaacaagtcgtccctcttccccaacgagcatcacacatgcctcatggcaaaggagaagaaggtatgtactcgagaaagtaccacttactcttctagtgatgatgattctagtgatgacaatgaaatagactattctagtttatttaaaggtcttgatagaattaaaattggcaaaattaatgagttaattgatgccttgaatgaaaaggataggcttttagaaaagcaagaggatttgttatatgatgaacatgataaatttgtagaagcacaaaaatctcatgctttagaagttaaaagaaacgaaatgctttcttgtgaattatcttcttgccatgagacaatttctagcttaaggagcattaatgatgacttgaatgctaagattgctagtaaatctaactcttgcgtagagaatgttataacttgcactaggtgtaaagatattaacattgatgcttatagtgaacacctagcttgcatttctaaattaaatgaagaggtggctagtcttaatacccaacttgagactagcaaaagtgattttgataaactaaaatttgctagggatgcctacacggttggtagacacccctcaattaaggatgaacttggcttcaagagggaagccaagaacttaacaagccataaggctcccatctccgccaaggagaaagggaaggcccctatggctaaaagtactaaaaggaaccatgcttttatgtatcatgataggagacaaactagaaatgcttataggagttataatgcttatgatgactttaactctcatgccatggttgcttctagttcttcctatatgcatggtagaaatatgtctaggagaaatactatttatcatgtgcctagaaagaatattattcatgctcctaggaaagtagtgaatgaatcttctacaatttattgtgctttaaatgcttcctttgctatttgtagaaaggataggaaaatagttgctaggaagttaggggcaaaatgcaagggagacaaaacttgcatttgggtccctaaggatatttgcactaaccttgtaggacccaacatgagttgggtttatgcatccgggggttcaagctggattatcgacagcggatgcacaaaccatatgacgggggagaagaagatgttcacctcctatgtcaagaataaagattcccaagattcaattatattcggtgatgggaatcaaggcaaggataagtctgaaacccaagggaccctcaagcgcttcctcaggagagctcaaaatgagtttgagctcaaggtgaagaagataaggagcgacaacgggtccgaattcaagaaccttcaagtggaggagttccttgaggaagaaggaatcaagcacgagttctccgctccctacacaccacaacaaaatggtgtggtagaaaggaagaacaggacgctcatcgatatggcgaggacaatgctaggagagttcaagacccccgagtgcttttggacggaagccgtgaacacggcttgccacgccatcaacagggtctaccttcatcgcctcctcaagaagacgtcgtatgagctactaaccggtaacaaacccaatatgaagaagatgttccaacggccgctatacgaaccatggcgattggagaagtgcggccacaggaacaagatgaacgagatcaaccttcttcctcaacaacggtgcatcccccaactcaagacgatgaacaggttcatcaaaaggaggcgtgtgatcacgggggagcacaagatgatcacgtga

SEQ ID NO: 107624 - DNA, 356 bp, Zea mays
  Clone ID: MRT4577_29650C.1
cccacgcgtccgcccacgcgtactgtcattccgccctgatcacatcaacatacaggttcgggaccaatctgatgaagtgctggctcgtggtttcaatgatcagatttatgacatcttccagcttctgccatctaatattcacgatgcagtctcctctgctaccatgccacctgaggccattgagattacccgcaagtacatgaacaaaccagtcagactatcttgtgaagagagattagctcacccttgagggcatcaatcatatctatgagaatgtgcacaatgaatacttgaagctggacacactgtgtgacctgtatgagaccctgaccattatccatagtgtatatttgtca

SEQ ID NO: 107625 - DNA, 341 bp, Zea mays
  Clone ID: MRT4577_29651C.1
cagacacgtgcttttataataatgatatttataacaaatacagtatcattaaaacacacacatcatctacatcaacattcgaaggacaaccagataaattgccggcgtggacatatatataaaacaacagctctatatcaacgttcgtacaaaaaaatactttttttggcaaaaaaaaaaaacctgatagggaccatttaaagaatcaaaaccactccaaacccaaattgacgcgcctgacattttttttaccagcaaacttaggtttatgggcacgttgaggttgaagcccaatacttttttttctgaggaccaaacaaaaacacaccgccgcctttaaa

SEQ ID NO: 107626 - DNA, 292 bp, Zea mays
  Clone ID: MRT4577_29652C.1
ggcaaaaattaaaagggaaaaagcccccccttgggatcatttgaaggcccagcggatccaaaaaaactttggaacgggtcctggttggaaaaaaaaggaaattaacaaaacttgttggaaattccggccgaagggccaaaaatgaggggggcatttggccaaacaaaaactgtgaaaagggtaaaatcccgtgtaaaaattattccggagggcgcctccctaaaagacccttccaatctgtccccggggagggccacaggggggtggtcctccagggttggaacttgcgaac

SEQ ID NO: 107627 - DNA, 495 bp, Zea mays
  Clone ID: MRT4577_29653C.1
aacttagaacaacatcatcacttccaacgaatcgactacagcagcagccgatcgatcgagggatcgcgatcgaacgatcaactacgcctagctatagctacagagcaggcaacacgacactggtcgccaagattaacattatcctttggttggttagacgaactaactagctctatataccccggcacgggcctaactggctatacctgcaagctctgttcttgatgacgaacgacacaccatgcatgcgcccatgcacgactcatatatgcatgaatggacacatgcgcgtgtggcgcccatgtatgcggcggacggcgatcaccattcatcagcgccgccgttaccagatgggggcctattattgatcctgcggtgccctgaggcgtgtgacccagagcgagctcagcgtgcggaggcagcggaagtagtcccacacgggcagcatcgaccgttccatctgacgggtcgtcaggacctggagcactcggtgca

SEQ ID NO: 107628 - DNA, 443 bp, Zea mays
  Clone ID: MRT4577_29654C.1
gctggggggttttttttttttttttttttttttttttttttttttttttttttttttttttggaaattttattttttattcctaataagggcgaacttttttgccatcattcaaaagtttcctaacaatacatgaaaaagttgtcatgatcaagtggggggggtaaggcaaaacaataaccggggaagggggcttgcctagatgggaaaatattttaacaggtttactcaaacccatctttaattaaagggccaatatcagaatacaaatttgcaaagggaccagaaactaggggtggtttaattaaaatggcaggaacacaaggccctccagtaaaaacaatggtttaataaatacaaatatttgggcaaccttacaaggaacataccccatcaggtggaaagaaaaggggtcacagccctaacaacgggggggatatttac

SEQ ID NO: 107629 - DNA, 455 bp, Zea mays
  Clone ID: MRT4577_29655C.1
ggggaacacaaccaaaaaatccctttttattaaactttacttattaaaccaccatacccatgcaaaaaggggaacaccaccggaccggccttggggttttcccaacacaaattaaaaaaaggggtaggccaaatatcacattagggaaattgggccaatggtttggcaacccagggggggcggatagcaggggaggaaaacacaggtttcaccaaaaaggaggcctttcacggggggggcaaaccccctcgggagggtggccaggccaaccacgggggggggatccccctggaggaggggggccggcgccgtcgtgggagctaacaccaggggggaaaagaggagggccaaaacaccggcggggggctttttgggggcgcactccatggtagctaggtagctttcctctttttttctcgctaaaaaaaaagggagcctcgggccgaattcctggg

SEQ ID NO: 107630 - DNA, 230 bp, Zea mays
  Clone ID: MRT4577_29656C.1
cacgcgtccgatggactttcgctgtatctgtatgatcgccagcttttatctcaacttcagccgggtggatcacaccagggaccacgtagtggtgcacgacgggtccgactgtagctgctatcatagtgctgcataggacgcgagccagtatctgtaaggatctatgtatgtctatactacgtcctactcgctgtgactcgtacgcttctcctccgtctgtgactgtcata

SEQ ID NO: 107631 - DNA, 355 bp, Zea mays
  Clone ID: MRT4577_29657C.1
gctaaattcaattacctgagatgcaatcatgagggaacaacggaatttctttggttctccaccaagcaagcacgaccgaaaataattgatttttctaacctctatgttaccttatcttgatatataagcaataggagcaactcatccttgatttcttgaccgaagaagatgattattaattcaccgtatctaatcccgtactctgatagtgagacactcggagcagatcctagccacggaagcaatcaatgcttccacaccactttaatcttcccgcaaccacaaaatatggcctcctcgtctatttcatttttatatcagaaacaaccaaaactacttctttgacacatgcatt

SEQ ID NO: 107632 - DNA, 410 bp, Zea mays
  unsure (1)..(410): unsure at all n locations
  Clone ID: MRT4577_29658C.1
ccacctcctctgcttncgagatctctccccacctcccggcccgctagcagatcagcgcggccagagagatngagatccggaggcgctagcgccactcatcaccgccctgcgccactggccgggcacggagacggtcccggcgccgaccaaacactccacgccgttgctctaggacgagctcgcactctcgctcccgaccatccgcaacctcgacttcctcgagatgcgccggcccctcttccagccctaccaccctctccctcgtgcccgacggtcgaccccgatcaagactattctggtgcccgagggcctccactaccagctctactaccgtttacgacctcccccgcctcctcgcaccccaggccccctgaataccctccaaggactccgcctgccgctgcttcccc

SEQ ID NO: 107633 - DNA, 284 bp, Zea mays
  Clone ID: MRT4577_29659C.1
gtctcactcggggtatttttttatttttagggcaaaactagcttttacaatattatcccttttagccaggcacattcctgaagagaagaggcatcccaagctagggagtcaaggacaggagatactcccgcccgggaacaaactttctttagagggagaaggaaaacctcctgtggatcaaaaacaagaggacccgcacttcttcgatgccaaaactgtggcccgagcacacttttgggccccgggagaaagacagcatcccctggggggccttggcctccttt

SEQ ID NO: 107634 - DNA, 4989 bp, Zea mays
  Clone ID: MRT4577_2965C.1
atggccctaggctcgggccacaaacgcaaagatgggaagaagaagaagacaagacgcatcaagaagatcgtctactacgacgatagcgatgagtccacttcttcccaaaaggacaacgacgacaacgactacgagagaaggaaaccggttaattcgaacttttcttttgactactctcgcattccgcaaagtacaaatgctcatttgctctccattccacttggcaaacctcctcactttgatggagaggactacggattttggagccacaaaatgcgtagtcacctattctctctccatccgagcatatgggagattgtggaaagtggaatgaaatttgatagctcggatagtcctatgtttatcaatgaacagattcatggaaatgcacaagctactactgtgttgttagcctccttgtgcagggacgagtatcataaggtgagcggcttggacaatgccaagcagatctgggacaccctcagaatctcacatgaggggaacgacgtcaccttactcacgaaaatggagttggtggagggcgagcttggaagattcgcaatgatcaggggagaggagccaacccaaacatacaaccggctcaagacccttatcaacaagataaggagctacggaagcacacgatggacggaccacgacgtcgttcgtctaatgctaaggtcttttactgtacttgatccacatttggtgaacaatatccgtgaaaatcctaggtacaccaagatgtcgcccgaagaagttcttgggaaatttgtaagcgggcgaatgatgatcaaggaggcaagatatgtcgacgacgcgttgaacggtccaatccatgagcctcaacccattgctctcaaggcaacgaggagcaaggaggcgctacctagcaagcgcttcaagacggcgctaaagggtcgcaaggggcagccaagcaagaccaagacaaaggggaagcgctcatgcttcaaatgtggtaaggttggtcattttattgctaattgtcccgacaatgatagtgaccaggaagaagggaacaagagggagaagaagaagaagaactataagaaggcaaaaggcgaggcacatcttggcaaggagtgggactcgaattgttcgtcgtccgactccgacaacgaaggactcgccgtcactgccttcaacaagtcatccctcttccgcaacgagcatcacacttgcctcatggcaagggaaaagaagggtctagatagaaccaaggtggataaaataaatgaattgattgatgctttgaatgataagaatagattgctagaaaagcaagaggatctcttatatgatgaacatgacaagtttgtagaagctcaaaaatcccttgctttagaaataaagaggaatgaaatgctttcttgtgaattgtctacatgtcatgactctatttctagtttaaaaagcataaacgatgaattgaatgctaagttagaaatagctaataaatcaacatcttgtgtagaacatgttgtggtttgcactaggtgtaaagattttaatgttgaagcttgtagtgaacacctagtttcaatttctaaattgaatgatgaagtggctagtcttcatgcccaacttaagactagcaaaagtgaatttgataagttaaaatttgcaagggatgcctacacgattggtagacacccctcaattaaggatggacttggtttcaagagggaagtcaaggacttaacaagccataaggctcccatctccgccaaggagaaaggaaaggcccctatggctagtagtgctagaaagaatcatgcttttatgtaccatgatagaagacagtctaataagagttgtaatgcttatgatgcttttgactctcatgccatgtttgcttctagttcttcctatatgcatggtaaagatatgtctaggagatattttgttcatatgcctaggagaaatgttgttaatgttcctaggaaagttaatgaaccttctacaatatatcatactttaaatgcttcctttgctatttgtagaaaggataggaagatagttgctagaaaattaggggcaaaatgcaagggagacaaaacttgcatttgggtccctaagacaattgtgactaaccttgtaggacccaacaagagttgggtttatgcatccgggggttcaagctggattatcgacagcggatgcacaaaccatatgacgggggagaagaagatgttcacctcctacgtcaaaaacaaggattcccaagattcaataatattcggtgatgggaatcaaggcaaggtaaaagggttagatgtgtctgtctttagaagaagtgatggttcattagcttttaagggtgtattagacgacaaactttacttagttgattttgcaaaagaggaagccggtctagatgcatgcttaattgctaagactagcatgggctggctgtggcatcgccgcttagcacatgtggggatgaagaaccttcacaagcttctaaagggagaacacgtgataggtttaactaatgtgcaattcgaaaaagatagaccttgtgcagcttgtcaagcaggcaaacaggtgggaagctctcatcacaccaaaaatgtgatgaccacatcaagacctttggagatgcttcacatggacctcttcggacccgtcgcctatctaagtataggaggaagtaagtatggtcttgttatagttgatgacttttcccgcttcacttgggtattctttttgcaggataaatctgaaacccaagggaccctcaagcgcttcctaaggagagctcaaaacgagtttgagctcaaggtgaagaagataaggagcgacaatgggtccgagttcaagaaccttcaagtggaggagtaccttgaggaggaagggatcaagcacgagttctccgctccctacacaccacaacaaaatggtgtggtagagaggaagaacaggacgcttatagacatggcgaggacgatgcttggagagttcaagacccccgagcgcttttggtcggaagccgtgaacacggcttgccacgccatcaacagggtctaccttcatcgcctcctcaagaagacgtcgtatgagctactaaccggtaacaaacccaatgttttgtattttcgagtttttgggagtaaatgctacattctagtgaagaagggtaggaattcaaagtttgctcccaaagccgtagaagcgtttttgttaggttatgactcaaatacaaaggcgtatagagtcttcaacaaatcattgggtttggttgaagtctctagcgacgttgtatttgatgagactaatggctctccaagagagcaagttgttgattttgatgatgtagatgaagaagaagttccaacggccgcaatacgcaccatggcgattggagatgtgcggccacacgaacaaaatgagcgagatcaaccttcttcctcaacaatggtgcaacccccaactcaagatgatgaacaggaggcgtgtgatcaagggggagcacaagatgatcatgtaatggaggaagaagcgcaaccggcacctctaacccaagttcgagcgatgattcaaagggatcatcccgtcgaccaaattttgggtgatattagcaagggagtaactactcgatctcgattagttaacttttgtgagcattactcctttgtctcttctattgagcctttcagggtagaggaggccttgctagatccggactgggtgttggccatgcaagaggagctcaataacttcaagagaaatgaagtttggacaccggtgcctcgtcccaagcaaaatgttgtgggaaccaagtgggtatttcgcaacaaacaagacgagcacggggtggtgacaaggaacaaggctagacttgtggcaaaaggttatgcccaagtcgcagagtccattcgcattttgctagcatatgccgctcaccattctttcaggttgttccaaatggatgtgaagagcgctttcctcaacgggccaatcaaggaggaggtgtacgtggagcaaccccctggcttcgaggatgaacggtaccccgaccacgtgtgtaagctctctaaggcgctctatggacttaaacaagccccaagagcatggtacgaatgccttagagactttttaattgctaatgctttcaaggttgggaaagtcgatccaactctttttactaagacctgtgatggtgatctttttgtgtgccaaatttatgttgatgacataatatttggttctattaaccaaaagtcttgtgaagagtttagcagggtgatgactcaaaagtttgagatgtcgatgatgggcgagttaagctacttccttgggttccaagtgaggcaactcaaggatgggaccttcatctcccaaacgaagtacacgcaagacttgatcaagtggtttgggatgaaggacgccaagcccgcaaagactccaatgggaaccgacggacacaccgacctcaacaaaggaggtaagtccgttgatcaaaaggcataccggtctatgatagggtctttactttatttatgtgctagtagaccagatattatgcttagcgtatgcatgtgtgctagatttcaatctgatccaagggagtgtcacttagtggcggtgaagcgaattcttagatacttagtcgctacgccttgcttcgggatctggtatccaaaggggtctacctttgacttgattggatattcagactctgactatgctggatgtaaggtcgataggaagagtacatcggggacgtgccaattcttaggaaggtccctagtgtcatggagttctaagaaacaaacttccgttgccctatccaccgctgaggccgagtacgttgccgcaggacagtgttgcgcgcaactactttcgatgaggcaaaccctcagggactttggctacaatttgagcaaagtcccactcctatgtgataatgagagtgctatccgcatggcggataatcctgttgaacacagcgcacaaagcacatag

SEQ ID NO: 107635 - DNA, 742 bp, Zea mays
  Clone ID: MRT4577_29660C.1
ctcatataatcagttgagattacgtcgtacccaggatctcaaagtcgtttgactgtgcaatttcaaggggaagagggcatagatgcaggaggactaactagggagtggtatcaactgctctctagagttatttttgacaaaggaactcttcttttcactacagttggaaacaatgcgactttccagcctaatccaaactcagattttcaaacggagcacctttcttacttcaagtttgttggtcgagtggttgctaaagcgttatttgatggccaattgttggacgtccacttcacccgttcattttacaaacatatcttaggtgctaaagtaacatatcatgatatagaggctattgatcctgattactacagaaatttgaagtggatgctggagaatgatgtaagtgaccttccctatttaacatttagcatggatcctgatgaggaaaaacatattctctatgagaagaccgaggttaccgattatgagctaaaaccgggtggaagaaacatcagggttactgaggaaacaaaacaagaatatgttgaccttgtagctgaacatatactgaccacagcaattcgtcctcaaatcaatggtttccttgaaggcttcacagagttagttccaagggatctaatatcgctattcaatgataaagaacttgaactgctgatcagtggtcttcctgaaattgacttggatgatctgaaggccaacacggaatatataggatatt

SEQ ID NO: 107636 - DNA, 2444 bp, Zea mays
  Clone ID: MRT4577_29661C.1
ttctcacttgcggcagaggcggtgaaaaaattggctagtgttgcagcatcgcatcggaaattcttttccattgagttagctggtgttgctcagagtttaagttcttctgccgttgaggagcttgtaaccctgaagaacactcaaatgcttgggctcagtacttgctctatggctggagctgcgattttgcggatactgcaagtcctatctacactaacttcgtgtgtgatggatagtagacatgagcaagatttaggacaggaagagcagtcttttttgtgggatctgaatgctggtcttcaacctttgtggcaagagttaagtgattgtataagtgccacagaggcaaaacttgtacacaattcatcattcgcttcccatgccccatcggtggatgctttagcagttagtgcttcatcatctgtttcttcaccgcttcctccaggcactcagcgcttgttgccgttcatagaatcattctttgtcctatgtgagaagcttcaaacaaatcaaccagttgcacaatcagattacactgttattgcccctgaagtaaaagaatctgctggaagttcatcttcaccttcactgaagactggtggaacttgcaatgttacttttataaggattgctgaaaagcatcgacggctgctcaacgttttcattagacaaaacccaagcatactggagaagtcactttctatgatgttgaaagtgccaaggctgatagattttgacaacaaacgtgcttactttcggtcacgtatcagacagcagcatgatcagcaccttccagctcctctacacattagtgttcgcagggcttatgttttggatgactcatataatcagttgagattacgtcgtacccaggatctcaaaggtcgtttgactgtgcaatttcaaggggaagagggcatagatgcaggaggactaactagggagtggtatcaactgctctctagagttatttttgacaaaggaactcttcttttcactacagttggaaacaatgcgactttccagcctaatccaaactcagattttcaaacggagcacctttcttacttcaagtttgttggtcgagtggttgctaaagcgttatttgatggccaaatggtggacgtccacttcacccgttcatttacaaacatattttaggtgctaaagaacatataatgattagaggcttttgatcctgatactacagaaatttgaagtggatgctggagaatgatgtaagtgaccttccctatttaacatttagcatggatcctgatgaggaaaaacatattctctatgagaagaccgaggtattgaaaagccatcacgggtttagccgaaaccttttctgcttgcgtcagctattatcttagctgtgcagtttaacaaattttcaattcaggttaccgattatgagctaaaaccgggtggaagaaacatcagggttactgaggaaacaaaacaagaatatgttgaccttgtagctgaacatatactgaccacagcaattcgtcctcaaatcaatggtttccttgaaggcttcacagagttagttccaagggatctaatatcgctattcaatgataaagaacttgaactgctgatcagtggtcttcctgaaattgacttggatgatctgaaggccaacacggaatatataggatattcagctgcatctcctgttatccagtggttctgggaagttgttagagcattcagcaaggaggacatggcgagactactacagttcgttaccggaacatctaaggtaccattggagggtttcaaagcgctacaaggtatctctggcccccagagatttcagatttacaaggcgtatggatctcctggtcgacttccatctgctcatacctgctttaaccagttggatttaccggaatatacctcaaaggagcaattagaagaacgactgcttcttgccattcatgaagctagtgaaggttttggctttggttgattggttcctcgggaggttgtaaagcgtgcactgggtcattggttttctgcttgacatgtacagattttgaaggcaattgagatggtcagtgctatgcataacatagatcgatccattggtctttttaggagtgctcatgctgcagtagggatctaatttattattccggatagtcgatgagtatgtcgatcgggttgggtacagtagtagagctctgcgacaagagcgctgatacaactagcttccttttgccttctaattaaaaggttgaatgtaaattcgtttaatgctgataccagttctgatgatttttgtactggttcctccgattctggaggccagtgcaatttctgcaaataaataagccttctggtgaagcaatggttcttaaaaaaaaacggattcttaaagcaaaagtgtaaaaaattttctctttaaaataataaaaacaaaattatataat

SEQ ID NO: 107637 - DNA, 1861 bp, Zea mays
  Clone ID: MRT4577_29662C.1
gccggagacattgcatggcggggacgaggagatcgttgccgccgtggtgtccggggcgctgccgtcgcaccacctcgagtcgcgcctcggagactgccgccgcgcggccagtctgcggcgggaggcgctacggcggatgacggggcggggcgtcgacgggctcccgctcgacgggatggactaccaggccatcctggggcaatgctgcgagatgcccgtcgggtacgtgcagttgcctgtcggggtcgccgggccgctgctcctggatgggaaacagtaccatgttcccatggctacaaccgagggatgtctcgtggctagcgtcaaccgcggctgcagagccatcgcggcgtctgggggcgccgtcagtgtgctgctccgggatgcagtgtctcgtgcacctgacgttaagttgccgtcgataaagagggcagcggagctcaaggcgttcgtcgagacaattaccaattttgagattctgtctgctgtcttcaataggtccagcagatttgggaagcttcagggtattcagtgtgcactggcagggtactattgttcagacaagaaggctgcagctgtaaactggatagaaggtcgcggaaaatctgtttgtgaggccacagtcagggggagttgttcaaccgcggcttgcagagccgggggggggcactcagtggtgcgcttccgccggttcggaattcccgggctgctgtcttcaataggtccagcagatttgggaagcttcagggtattcagtgtgcactagcaggtaggaacctttacatgaggttcacttgtagtactggagatgccatgggaatgaatatggtgtcaaaaggtgttgaggatgtcttgggctacttgcagaatgatttccccgacatggatctcatcagcctatctggtaactattgttcagacaagaaggctgcagctgtaaactggatagaaggtcgcgggaaatctgttgtttgtgaggccacagtcaaagggggagttgtgcagagtgttcttaagacttctgtgcaaaaacttatcgagcttaatattgtaaagaatctcgctgggtcagctgtagccggagctcttggaggtttcaatgcccatgcaagcaatatcgtaactgccctgttcattgctacggggcaggatcctgcccaaaatgttgaaagctcgcagtgcataaccatgatggaggcagtgaatgatggaagtgaccttcacgtttctgtgaccatgccttctattgaggtaggcactgttgggggcggcacttgtcttgcttcacaggctgcatgtctgaacctgcttggtgtgaggggtccgaatcgtgactcacctggggcaaatgctaagcttctggctaccattgtcgctggcagtgtgcttgctggcgagctctctctcctgtcagcccttgctgcaggccaacttgtgaagagccacatgaagtacaatcgatcaagcaaagatgtgccaggtgctgcttcttgagtatattatatgcagcagctcgtcgggtactccaaggctccaagtgacatgttttatacagcagtagcccaagcgagatcgtcgctaaacaacagagatgggcagaggcccgactgtagataagcgagcaggtcctgacagcaagcgcaacctgtttgactgttccgtggacgctatgttagcgacgtacagcacctgacagattatgcagcttctgactgtaacttttgtttatgtatgtttagcgttcggttgtaaccgttcaatttttttttggtttgctttggatagcagaagatcagataaaatttgtgttcctttttgtgcagtatagtaatttgcctgttattattatgttgatatcgcg

SEQ ID NO: 107638 - DNA, 358 bp, Zea mays
  unsure (1)..(358): unsure at all n locations
  Clone ID: MRT4577_29663C.1
gncattgttccgggtacaaggacaggccgagatgcgctttagcgataagactggagcacccgtagcaacactgcatggaggtcaccgcgttcagcgaggtgctcctcagaggcgcacgaatgctggtcgtcgtcctccctcggtacaacaggaagaggcaccagcagcttcgcatccaagacgcgccgaggctctcgctgaaccgcgcgatggccttccgaggacacgtgcgtctccggcggcgacaagctcatgtgagacctgaaggccaagtgtgacagccgtgaagacaagaccaacgttctcctgtacggcggcggcacctatgggacgctatgggtgacgtccattgttggcg

SEQ ID NO: 107639 - DNA, 731 bp, Zea mays
  unsure (1)..(731): unsure at all n locations
  Clone ID: MRT4577_29664C.1
ccggccgggaacgagatcggggtggaaggcattccccactttgcctttctggataaggaaggaaatgaggaaggcaatgttgttgggagacttccaaagcagtatttccttgacaacgtggttgcgctcgcttctggtaatcccagtgtacccgatgcacgagtggtcggtcagttctcgagcgctgagtctaggaaagttcaccaagttgctgatgccaggagtcatggctagcagttgtctatgtgggggcagcagtggttctagtttaactggcaagaccatgtgacaggagagatggaaggctatactatagtgtattcaatcttctcggtatcgagcatgcgggcgctggaaagagctgttagattccacagatcacagaagaaaagggcgtgatatgctgtgcatgtgcgtgtggattccgggtccactcccatcgtcggcgcgggttcgtcagcgacactggaacggttgcatgctgtacggcaaatgcagagatgctgtatgtttttttagacacagcaggngtgtgggtggctcacgaaagaagcttttgcttgtattcgttgctcgtgtaacacatgttcacgctgcccttttcagaattcaaggtgccgtttggttcacataattgtaacgtaatgggtaacgggatacgntaaatcatggttggtttagtccaactggtatcagataccacactaaaatttgataccagtctattcaac

SEQ ID NO: 107640 - DNA, 412 bp, Zea mays
  unsure (1)..(412): unsure at all n locations
  Clone ID: MRT4577_29665C.1
ggtaccctcgggccgtccgaccccgctatacctagccccagcctagtagtgcattgagacacatatcgaaacagctctctagctagcgcgctcgtcgtctaacctggcttgcggcatggcttccaagcagatcggagtcttgacctgcttcattgccatcaccggtctcgccttccgtccctgcgcatccgccgtgcccatggacggacggctggccgaacggcggcgccacctgagacggccctgccacgggcgctttttttttttttggtgcgggtgggtaccaaggtgccgatggccaaccttcggtttngctgccgcccccgccgagcgtcaagcgaggttaaaggactgagcgggctacaggacctgctaccaaaaaaagcgccctggactcgagtgggggctcatg

SEQ ID NO: 107641 - DNA, 281 bp, Zea mays
  unsure (1)..(281): unsure at all n locations
  Clone ID: MRT4577_29666C.1
cctgggctgtgctttagcttcatacaacgtggcacctgggtatgnnntacttacgtgggtagaaatttcattcatttaagncatgactcttgttgcnnagtcggtggggacatnncctgatggggaagaggcacnggnnagacgccgcactttnngccggggatgggtgggcgacggggtgcccatagttgaccgctctttgacnngctgttggcgaggcttcttgagggcaccggcaccgccgcctgccaggtccagagctttgctgcgnnngcctgccc

SEQ ID NO: 107642 - DNA, 282 bp, Zea mays
  Clone ID: MRT4577_29667C.1
atggatagggcagaatacgagcacaacgtccatttcatttacagacttaagctgcaacatccgtactgggggtattttataaatcatgcagtgctccaaaagggatctcttaatccaatcgtgcgtcaactgaaaaggtgaatatattgagttaaccatccacaccgacgaatgctctggagtgccctgcgagagccgttaacaatagaaacactttggcctcattgcaacctctatcttatccgcgatgttgcaaacaatatctacctgataaagagctgg

SEQ ID NO: 107643 - DNA, 275 bp, Zea mays
  Clone ID: MRT4577_29668C.1
cggctcgagctagttctagatcgcgagcggctgcccttttatttcgctttgggcaaaaaaaagtggctattgcaaaagctcagacactttaacggaccaattcggcattaattaaggtaccggagattttactaggcccataatgggagccttacaattgggagccttcagaccaatgggacaacgactttttattacagggccacggttaaaagggggaacctgaggccacaactaaggcttgggtaatccagagatcttaccatgcgtgtgga

SEQ ID NO: 107644 - DNA, 566 bp, Zea mays
  Clone ID: MRT4577_29669C.1
gtctccctctccctctccttcctccagcaccagcggcagctgtcggagcacgacagctgcggtgaagagtcatccttcatagggaggaggaaaggggacgacggcaggagtttaagccaacaatctctcatcatatcgtaatagagagcacaacgacagaagccatgggcagtaatggcagagagcataggtgcggagtcccacgcccgccacctttatcactttacagggactgggaggaggaagaggtcgtcaaggtcggcagacgccagcagtcgccgctggaacagtcaacatcgatttcagccacagccggcattgccaacaagaagaggttgtcaaagcaggtgtccatgaaggagaccacccgggaggtcaagtgggagaagcggaggcgacagatacagcgacagaggagcagcatgcgcctcaacgaagctgacgacagggctggtagcaggactgtctgtcatgttgacagcgaggcgagctcgagcgcggagcgggtgtcgtccaagcgtataaccgacgaggacctcgatgagctgaggggatccatggatctc

SEQ ID NO: 107645 - DNA, 175 bp, Zea mays
  Clone ID: MRT4577_2966C.1
ggctgcggccgcggcggtcatggatcgccaagacgagtctatgtccgcgcggccggccctggagatcgaagtgctgcgcttcctgtacaccacggtgggctccctgctggccttctatggcttgtacatcgtcttcagctgcatccttctctacgtggtcattcaggactttccg

SEQ ID NO: 107646 - DNA, 317 bp, Zea mays
  Clone ID: MRT4577_29670C.1
gcttttcctattgacactgtgagatattctgtgctggctctcaacatgttttttaattagggctagttaggagggaacccaagcaaagctcttaactgaattcattggctgagttcgttttagtttgaactagagagctctagtgatactgcagatggatctgttgtcttttacttaattcaattataactagacagttaaattggtaaatagaccattccacaataatgctatgttttcttaactcttctaaggttactgttgcatttcactgcatatttcacaatgctggcttttacctgcgtaacatgttttat

SEQ ID NO: 107647 - DNA, 365 bp, Zea mays
  Clone ID: MRT4577_29671C.1
agcagaagggaggctccaagacctcatcaacaattcagagcaccccatctgggaagaggtataagtttgtggccaccgggcatgggaagtatgagaaggtgcttgtggaagggcgcccggctccctaggcgtcccatctcgcttcctgggtctgcaggtccagccggctggcaccctccatgtacccaggggagattccagccagacacccgccccccggccctggctaagaagttgcttcctgttgccagcatgacctaccctcgcctctttgatgccatccgctgccacctccttttgctcctggaccctttagcctctctgcccttccactctctgaccaccgctcccgccctccccaccca

SEQ ID NO: 107648 - DNA, 128 bp, Zea mays
  Clone ID: MRT4577_29672C.1
cccacgcgttggttataagcgcacgagaggcgtatctcgttttgttggccatggcagggaaggcgtcatgaatgccgaaggggagatgaggctgaccattcagaggcacgcgtgtgatttcatgcagc

SEQ ID NO: 107649 - DNA, 293 bp, Zea mays
  Clone ID: MRT4577_29673C.1
tcctgtatagcggccgcccttgtccttttttttctgttttcaatcacaccaatcaactctcttcataggggataaggcgggttacattattcaccacatcacacattactaacctacgggctatttagcctacacaccacaaccctgatgagaaaattacttttccgtccatcgccacctgagcgatcgcaaattgtacactacattctccgagcagagcacggatttcttttcaacatatatactaacaacaaggttcaaaatggtgtgcctgccccctctttcttgagggg

SEQ ID NO: 107650 - DNA, 1149 bp, Zea mays
  Clone ID: MRT4577_29674C.1
cgtcgccgcaagaaattccagcgcacacgagatcaggagacgaaatcggagcaggaggacaaggacaagcaggcagctagccgcaaagatgccgtgcatccaggcgtccagccccggcggcatgccgcaccagcacggccgcgggcgggtcctcggcggcggcgtcgggtgcgcggcggaggtggccgcggccgtcgcggcgagcgcgggggggatgcggtgcggggcgcacgacggcgaggtgccggcggaggcagcgcggcaccacgagcacgcggcggcggggcccgggcggtgctgctccgcggtggtgcagcacgtggcggcgccggcggcggcggtgtggtccgtggtgcggcggttcgaccagccgcaggtgtacaagcggttcgtgcgcagctgcgcgctgctggcgggcgacggtggcgtgggcaccctccgcgaggtgcgcgtggtgtcggggctccccgcggcgtccagccgcgagcgcctggaggtcctggacgacgagagccacgtgctcagcttccgcgtcgtgggcggcgagcaccggctccggaactacctctgggtcaccaccgtccacccgtcccctgcggcgcccgacgcccccaccgtggtcgtggagtcgtacgtggtggacgtgccgccgggcaacacccccgaggacacccgcgtgttcgtcgacaccatcgtcaagtgcaacctccagtcgctggccacgaccgccgagaagctcgcgcccgtgtaggcgtggacggaggaggggactccatctccgttgggtgatcgatggttttttttttccggggaggaaggaccggatcggagggaggagggatgcgtgtttgtacggcgcgtgaccttctgtctctctctctctctccttcttctttggccttttcacattagtgtcccccttggttttcgttattattcttttttctcgttgttgcgagagacacacagcacagcaagccctccctagctactctcgcttgtgcagagattcgagagacgatcaacaagatgacaagtaaatctgtagagatctaagttctggcgcacgatcgattcctctggatgtatatatgtttgatggtaacagagatatggtttgtggagagcgtttggtttgaaaaaaaaaca

SEQ ID NO: 107651 - DNA, 457 bp, Zea mays
  Clone ID: MRT4577_29675C.1
aaaaaccacgggtaaactagaggcaacttttgcccgggaggcccaaacaaaccctacacacgagtgggggggggcccacatgctaacaacagggatttatacctcccgggcggcccggcgacccccacaaaataaacctgcccgacgacaggggacatgcctgcccagaccacgaccacaagaacattttaattaggcccaaccccccccctttaaaaagggccggggcccaggagggagagaaaaagagacccgttcgtacgggcccctgcctgcaccctgggggaaaggcccccccaaacccctacaggtaggaaggccgggggccctcccgcttggctggggtgggctaacacaccggtaacaatcgggcgggggggcaaggccccacttggccggaagccccaagggccccctgggggccatgttgaaaacccccccccacggggaggttttg

SEQ ID NO: 107652 - DNA, 445 bp, Zea mays
  Clone ID: MRT4577_29676C.1
ggcccaaaactctgaattgcacaaaacaggggcgcgggatattacacaattggccctgatgaattacaagggggggggcggataaaagcagcttcccaactttgaaaggagggaagggaccccacgtaacaaaggggggggtcatttgaaaacagccaccaatccctccttttaaaaccggggggatttcaaagcagcaggcagcatcggctccttttaaaacctacttttgaacgggatccccctgatgaacacctggggggagaagggaaccaacgcaacccccataaaggggcccacccaaaaaaaccagggggcaacccaagcatggggctggttggaaaacacgggggggccaaggctccccccgggggtaatccccgggcccgggatagggatgggggccaaggggaccaggaacaccgcaaaccccattggaaaaggg

SEQ ID NO: 107653 - DNA, 297 bp, Zea mays
  Clone ID: MRT4577_29678C.1
aacttaaaaacaaaattattttttaaaaaaaatccattattaaccgaccaactacaaaattttttatggtaaaacaaacgggccaacggatgaccaaaggaaaggtcaaggaacaacactttgccaatctgagcactcgccaccaaaaaacattttcccagagccaaaaattcccaacttgttccaactggaatacaatatacaaatatcgtgagttggatcaaacacaaaaggactcatcaaaatatttaaaggcacaaaaaattattaaccgctgacaaaaccacacttttacaa

SEQ ID NO: 107654 - DNA, 391 bp, Zea mays
  Clone ID: MRT4577_29679C.1
gcgttcgtgctgcgacccaccgtgcataacagtggggaggggggcgaaccttctgcttgtcacttgacttgaagtttgcacccggtagcatttttgtagatcatttgcctagcaccttgtcggtcccccatgtaactaatcaactttcccttcaattttttctttcttttctagataggtgtgtgcagggtagacagtgtagggtgttattgaaacctgttgagataggagaaggaagtagatgcatattcttttgttcccatcaaaaaaaaaaaaaaaaaaaaaaaaaaaaaaaaaaaaaaaaaaaaaaaaaaaaaaaaaaaaaaaaaaaaaaaaaaaaaaaaaaaaaaaaaaaaaaaaaaaaaaaaaaaaaaaaggggggggcccgttt

SEQ ID NO: 107655 - DNA, 4836 bp, Zea mays
  Clone ID: MRT4577_2967C.1
atggatcctaaggggaagggaatcgtgatcaacgacaaagaaaaggaatccttcgtcaacgagccgaaggacgacaagcctaccgactccggctcggggcatagacggaaggaaggaaagaagaagaagacaaggcgcatcaaggagatcatctactacgacgatagtgatgagtctacttcttcccaaaaggatgatgacaacgactacaaaaagacggtcaattcgaacttttcatttgattattctcgtattcaacatagttcgaattcgcatttgctttccattcctcttggcaaacctccacacttcgatggggaggactacggattttggagtcacaaaatgcgtagtcacttattctctctccatccaagcatatgggagattgtggagaatggaatgaagtttgatagctcggatagccctatgcttataaatgaacaaattcatagaaatgcacaagctactactgttctcttagcatctttgtgcagggaagagtacaataaggtgagcggcttggacaatgccaagcagatatgggacaccctcaagatctctcacgaggggaacgacatcaccatgctcaccaagatggagttggtggagggcgagcttggacgattcgccatgataaggggagaggagccaactcaaacttacaaccggctcaagacccttatcaacaaaataaggagctacggaagcacgcgttggacggatcacgacgtcgtccgcctaatgctcaggtcctttaccgttcttgatcctcatctcgtgaacaatattcgtgagaatcccaggtacacgatgatgacgcccgaggaagtacttggaaaattcgtgagcgggcggatgatgatcaaggaggcaagatacgtcgacgacgcgttgaacggtccactccacgaacctcaacccattgctctaaaggcaacgaggagcaaggagtcgctacctagcaaggtggcgcaagttgaggcggccgggctcaatgatgaagagatggctctcatcattaaaagattcaagacggcgctaaaaggtcgaaagggacagccaagcaaggccaagaccaagggaaagcgatcatgcttcaaatgcggtaagcttggtcattttattgctaactgtcccgaaaatgatagtgaccaggagcaaggaaaaaatgggaagagagagaacaagaaggtttacaagaaggccaatggcgaagcacaccttggaaaggagtgggattcggattgctcttcgtccgactccgacgacgaaggactcgccgccactgccttcaacaaatcggctctcttccccaacgagcatcacacttgcctcatggcaagggaaaagaaggtaatcactcgtaatgctaatacttatgattcttctagtaatgatgaatctagtgaggatgaaattgattactctagtttattcaagggattggatagaactaagatagctaagattaatgagttgattgatgccttaaatgaaaaggatagaatcttagagaaacaagaagaccttttatatgaagaacatgataaatttgttagtgcacaaaattcacttgctctagaagttaaaagaaatggaatactttcttgtgaactttctacttgtaatgaaaccatttcttctttaaaaggtgaaattaatgttttaactgctaaactagaagtagcaagtaactcttgtgttgaaaatattacaatttgcactaggtgtaaggattttgatgttaatgcttgtagtgaacacttagtttcaatttcaaaactaaatgatgaagtggctagtcttaatgctcaacttaagactagcaagagtgaagttgataaaataaaatttgcaagggatgcctacacggttggtagacacccctcaattaaggatggtattggcttcaagagagaggccaagaacttaacaagccataaggctcccatcttcgtcaaggagaaagggaaggcccctatggctagtagtgctaaaaggaaccatgctttcttgtaccatgataggagacatgctagaaatgcttttagaagtaatgatgtttttgattcacatgtttatgattctcatgccatgtttgcttctagttcttcctataagcatgatagagatatgtgtaggagaaatgttgtgcatatgcctaggagaaattttgctcatgttcctagaaaagttgtgaacaaaccttctaccatttattatgcttgcaatgctccctttgctatttgtagaaagggtaagaaggtttatgcatccggaggatcaagctggattatcgacagcggatgcacaaaccatatgacgggggagaagaagatgttcacttcctacgtcaagaataaggattcccaggattcaattatattcggtgatgggaatcaaggcaaggataagtctgaaacccaagggaccctcaagcgcttcctcaggagagctcaaaatgagtttgagctcaaggtgaagaagataaggagcgacaacgggtccgaattcaagaaccttcaagtggaggaatttcttgaggaggaagggatcaagcacgagttctccgctccctacacaccacagcaaaatggtgtggtagagaggaagaacaggacgctaatcgatatggcgaggacaatgcttggagaattcaagacccccgagtgtttctggtcggaagccgtgaacatggcttgccacgccatcaacagggtctaccttcatcgcctcctcaagaagacttcatatgagctactaaccggtaacaaacccaatgtatcttactttcgtgtatttgggagcaagtgctacattctagtgaagaaaggtagaaattctaagtttgctcccaaagctgtagaagggtttttgttaggttatgactcaaatacaaaggcgtatagagtcttcaacaaatcatcgggtttggttgaagtctctagcgacgttgtatttgatgagactaatggctctccaagagagcaagttgttgattgtgatgaagaagatgttccggcggccgctatacgaaccatggcgattggagaagtgcggccacaggaaaaagatgaacaaccttcttcctcaactatggtgcaacccccaaccgaagatgacgaacaggtacctcaagtggaggcgcttgatcaagggggagcacaagatgatcaagtgatggaggaagaagcgcaaccggcacctccaacccaagttcgagcgatgattcaaagggatcatcccgtcgaccaaattctgggtgacattagcaagggagtaacgactcgatctcgattagttaatttttgtgagcattactcctttgtctcttctattgagcctttcagggtagaggaggccttgctagatccggactgggtgttggccatgcaggaggaactcaacaacttcaagcgcaatgaagtttggacactggtgcctcgtccgaagcaaaatgttgtgggaaccaagtgggtgttccgcaacaaacaggatgagcacggggtggtgacgaggaacaaggctcgacttgtggcaaaaggttatgcccaagtcgcaggtttggactttgaggagacgtttgctcctgtggctaggctagaatcaattcgtatcttgctagcatatgccgctcaccattctttcaggttgtaccaaatggatgtaaagagcgctttcctcaacgggccaatcaaggaggaggtgtacgtggagcaaccccctggcttcgaggatgaacggtaccccgaccacgtgtgtaagctctctaaggcgctctatggacttaagcaagccccaagagcatggtatgaatgccttagagactttttaattgctaatgctttcaaggttgggaaagccgatccaactcttttcactaagacatgtgatggtgatttgtttgtgtgccaaatttatgtcgatgacataatatttggttctactaaccaaaagtcttgtgaagagtttagcagggtgatgacacagaaattcgagatgtcgatgatgggcgagttgaactacttccttgggtttcaagtgaagcaactcaaggacggcaccttcatctcccaaacaaagtacacgcaagaactgctaaagtggtttggaatgaaggacgccaagcccgcaaagactccgatggggaccgacggacacaccgacctcaacaaaggaggttctttgctttacttatgcgctagtagaccggatattatgcttagcgtatgcatgtgtgctagatttcaatccgatcctaaggagtgtcacttagtggcggtgaagcgaattcttagatatttggttgctacgccttgcttcgggctctggtatccaaaggggtctacctttaacttagttggatactcagactccgactatgctggatgtaaggtcgataggaagagtacatcggggacatgccaattcttaggaaggtccctggtgtcatggaactctaagaaacaaacctctgttgccctatccaccgctgaggccgaatacgttgccgcaggtcagtgttgcgcgcaactactttggatgaggcaaaccctccgggactttggctacaatctgagcaaagtcccactcctatgtgacaatgagagtgctatccgcatggcggagaatcctgttgagcacagccgcacaaagcacatagacatccggcatcactttttgagagaccaccagcaaaagggagatatcgaagtgtttcatgttagcaccgagaaccagctagccgatatcttcactaagcctctagatgagaagaccttttgcaggttgcgtagtgagctaaatgtcatagattcgcggaacctggattga

SEQ ID NO: 107656 - DNA, 242 bp, Zea mays
  Clone ID: MRT4577_29680C.1
gcattgggttggcagcacgtccctgcacacggtgacacgggccacggcacggggagcgagcgccgagcgagagcaagcaaccgttgtccgccgggccggccacggcggtgtcccttgcttcgcgccttcgccggtgcactaacccttaacgcaggtacggaccgtgccgggtggaattactgtgcccctgggaatttggaccggcctttgtggtcgcaagacttgactcgtgtacacggcac

SEQ ID NO: 107657 - DNA, 804 bp, Zea mays
  Clone ID: MRT4577_29681C.1
agacaaaaccaccagaagccagccacacatcgatcgagacgagttgatctcagctcaacgacgacctcacccctcgaaggtccccagcagcaagcacgcatgctgcaccagcaccagcaccattaccatggaggagtggctagcctccacagctacctctcgaatccggaccaggcattccacgctcactactaccaccacagcaacatcatcgccacgccgctgccgcccactccgtcgttccaccacctctggccttctacggcccaaaccttcgaacaacccgtcgtccacgaagctccggcggccgtcgccgccggcaacagcccagccgggtccggcagtgccgatgacggcggcggcggcggcacggcggaggctgagcggaggcggcggaggatggcctccaaccgggagtccgcccggaggtcgcgcatgcgcaagcagcgccagctcaccgagctgtgggcgcaggtcgtccacctccgcggcgccaaccgccgcctcctcgacgagctgaaccgcgccgtgaggggctgcagcgacatgcgccgcgagaaggcccggctccagaaggagaagaccgatctcggtaccaagctccagcgcctcacccagccgcagaacgccgccctgccaagctcctcctcggagccgcaaccgcaacacgacgccgctactgaataaattcattcttatcttcgcattttagcttccatatatacggtgcttctgttactatagtatacgaaataaaatatgttttcacaggttgtttctccgctgcgaaaaaaaaaaaaaaaa

SEQ ID NO: 107658 - DNA, 255 bp, Zea mays
  Clone ID: MRT4577_29682C.1
gtctgatatacacgctgaattgaataatacaagttattgtcaggcatggataaatgcagcctcctagaatggggtgattcaatgtcctggaatgatggcagaaccaggttaaagcttgaactcattgcagaatagcttttgtagctataatagaatggacgagtttcctcgcatcaactcggtcatattgttatttacacgtaggaagttcctggccatctttgttgtaccaaagctgtatttttttgtttgttt

SEQ ID NO: 107659 - DNA, 291 bp, Zea mays
  Clone ID: MRT4577_29683C.1
cgtaacattataaagtgtctagatgccttaccaaccaaaaaggaaccaaatttctaaattacacttcaagctgggtaacctaagagaaagaactggcttgtgtacccaaaaccagaaaacaataaccgaaaaatgcaaaaaagcccaaaattctggaaaacccaacaaaaagagcgttatgagaagaaataaaggttgttactaaaaaaaaaaaaataggggccagccgagccagcccataaaaaagccagggccccccacttatgaaaccccccaacaggccgcaagcgt

SEQ ID NO: 107660 - DNA, 765 bp, Zea mays
  Clone ID: MRT4577_29684C.1
ctatcgttccaacacattctcattgcattgcaagcatcaccgaagcaacagaatgatggcaaatcatgccttatacagcgacaaaggagagacatccatagttgcagaacacaaatttcacggcaaaaatattggccggatcagaagagatgcctcggaagagtacatagacaccgaaccacgcactggttaacaatagtgtgccgataacagtccctctcatgacgtgcctcagtttttgcactagttgaagtcaggcttctccgggtaagtacagcccgggcgctggatgataatgtttgcggcatagcaacctgccctcacgcagtcttcaatgccctttcctagaaccaactgtgagaggaagcctccaacgaaagcatcacctgcgccgttggtgtcaacaagcttctccttgggcaataggatcacagggaacgttttcaccttcccatcctcagcaacaaccactggatcagcaccttgagtaatcacagcaatcctcttttgcttgcctgaagccaaaggaagttgagagatcttcaaagcaatctcctcaatattctcagttttggcaaagatctttgcctcagtttcgttgccgaagatgtagtcagcatacgggaggaccttctcttgggcatcacggaagaactcacagatgaagggagcagagaggttcatcaggaacaccttgttatttgctgcagcatgctcagcaactagctggatagaatcaggcgacactgaaggaaaaacccggcc

SEQ ID NO: 107661 - DNA, 468 bp, Zea mays
  Clone ID: MRT4577_29686C.1
cttggccctgctcctttgcaggatatggctaggcaaattgctacactacagccaatggcgctactggctataatagggattacctgttctcaatggagaaggcattagccagcattagtccccaaactcgacgcgcaggtacgagaattagccaccagccgacgggatctcgatggcgagctccgcgtagcagaaggacaagagcagcaccgccaggtccccaaaccattttcgcgcgggtataaaaggctatcatgaagctttctggtcaaagtcccaaaagaatgagagacctatcaaatcagcaagcccgaggactgggaatgtaagccaacgccaaaaaagttcttcgtctggttctacggcaccgatgagatgtttatgcgccatcctgagtattccagctttcctatatggacagtttgaacccaaggtttgctgtgtaatctaatatcaacagttgcactc

SEQ ID NO: 107662 - DNA, 520 bp, Zea mays
  unsure (1)..(520): unsure at all n locations
  Clone ID: MRT4577_29687C.1
gnaccgggcctcgcgggccaggtacgcgccgcgcaccagcttgacccccaggcgcacgcgcgcgcgctccacgccgcgcgccatggtctccagccgctcccgcgcgtcgcgtaggtacgcctggaccgtgccgtgcacgatggagcgctcggcgttgcacgccagcgcgccggcgagcgtgaggtagtcgatcgccggctgcaccgccgcgtactccgcgtccaccagcagcggcacgccgcgctccgcgcaccgcgcgcacaccgccagcacccgctcgtgcgccagctccagctccctctcctcctccgccgacagcgccggcggctccgacgccgtgaggtgcagcgggctcgagtccgacaggatcgggaagtcgtgcgtcttccacggcaggttcagcgacgggtgcctcttctgccaccgcagcaggtcgctcgccttctccagcagcgcgatcgggcacagcgccgtgatcttgatgcacacgctcgccgagcccggaggcagcttggcggcg

SEQ ID NO: 107663 - DNA, 1260 bp, Zea mays
  Clone ID: MRT4577_29688C.1
cggacgcgtgggtgcatattgtgtcaagggtggtccagaaaaagagctaaaagcaatgcagtacttggagagaagagagtgtgagtacgaccagaagatatccattgatttctacaaggaaggagatcccctgaaaccagctgtgatgggcgtcttagtgttcgtttccactccagatccaattggcaacaagtactatcttggccctgctcctttgcaggatatggcaaggcaaattgctacactacagccaatggccctactggctataatagggattacctgttctcaatggagaaggcattagccagcattagtccccaaactcgacgcgcaggtacgagaattagccaccagccgacgggatctcgatggcgagctccgcgtagcagaaggacaagagcagcaccgccaggtccccaaaccattttcgcgcgggtataaaagcatagatgacccaattggcattgaataccttcgtacaaataatcatgactcggatgaaggctatcatgaagctttctggtcaaagtcccaaaagaatgagagacctatcaaatcagcaagcccgaggactgggaatgtaagccaacgccaaaaaagttcttcgtctggttctacggcaccgatgagatgtttatgcgccatcctgagtattccagctttcttatatggacagtaggaacccaaggtttgctgtgtaatctaatatcaacagttgcactcacattggtcttgtggcgattcttttcaaaacaggatgatttaaacctatatgttgttccaatggctatgggcatttaacgtcgactggagagtccctttgatatgactacaagtactatcattaggaggattgttgctaaccatgaagcttacctgcgtattgtcagctttcaaactcgatgaaccaactgagaaagtactgcttatgaagctggagaagcatggaaggactgttccgaatcaaaggcaaaagaagttggaagagttttgatttgcatgaaggatagctgttgaagatgcttctgacgcactggagtattgtagcgctgatggaaggcctttgatgaaatgtttccctgaaagttgtatattacatcactgaagcactgtagtattgtagcactgagggaaggcctttgtatcatgacctaaattcatatagggccctctttgatgaggttgttgctttggttttcacttttctttacaaccttcgaattatgtggctatgtctaaaaacttacacttctacag

SEQ ID NO: 107664 - DNA, 582 bp, Zea mays
  Clone ID: MRT4577_29689C.1
cccacgcgtccggttccctttgcggaattgctcctgcctgtggcactcaagatcttccccaacatgcttcccagcacgtacgagggccagtcctccaaggacagcaaggcaaaggctcttcgggctacacgtaaggacgtcagcgacttcctgcgccaaacgttgaaggagaccggactacctgtgtcagcggagaatgcgcagacggctgaatttggcgagttcttccgaaaagtgagaaccacaggcgagaagcccagcccagaagagatcatcaaggtgtgcaagatcttcaaggacgatttgaccttggacaacttgtcccgaccacaattggtgtcgatctgccgctacatgaacatcacatcctttggcacagataacttccttcgttaccaagtccgtgtgcgcatgcgccagatcaaacgcgatgatcgatccattgcatatgaaggtgtcgagtcactctcggttcctgagctccaaacagcatgtgctagccgaggtcttcgcacgtacggtgtctctcccggccgattacgggacgaccttactagctggctcgatcttcgcttgaagcac

SEQ ID NO: 107665 - DNA, 3489 bp, Zea mays
  Clone ID: MRT4577_2968C.1
atggatcctaaggggaagggaatcgtgatcaacgataaggagaaggagtccttcgtcaacgagcccaaagatgacaagcctaccgactccggctcgggccatagacggaaggaagggaagaagaagaagacaaggcgcatcaaggagatcgtctactacgacgacagcgacgaatcttcctcttcccaaaaggacaacaacgactatgataaacaaaagacggttaactcaaacttttcttttgattattcgcgcattccgcatagctcaaatgctcatttgctccccattccacttggcaagcctcctcactttgatggagaggactacggattttggagtcacaaaatgcgtactcacctattttctctccatccaagcatttgggagattgtggaaagtggaatgaaatttgatagctcggatagcccttcgtttattaatgaacagatccataaaaatgcacaagctactactgtgttgctagcctctttgtgcagggacgagtatcacaaggtgagcggcttggacaatgccaagcagatttgggacaccctcaagatctctcatgaggggaatgatgtcaccttactcaccaagatggagttggtggaaggcgagctcggacgattcgcgatgataaggggagaggagccgacacaaacatacaaccggctcaagatccttatcaacaaaataaggagctacggaagcacgcgatggacggatcacgacgtcgtccgcctaatgctaaggtcatttacagttcttgatcctcacttggtgaacaatattcgtgaaaatcctaggtacatcaagatgtcgcccgaagaaattcttggaaaatttgtaagcgggcgaatgatgatcaagaaggcgaggtacgtggacgacgcgttgaatggcccaatccatgagcctcaacccattgctctcaaggcaacaaggagcaaggaggcactacccagcaaggtggcgcaaattgaggcggccggtcttaacgatgaagagatggccctcatcatcaaaagattcaagacgacactaaagggtcgcaagggacagccaagcaagactaagaccaagggaaagcgatcatgcttcaaatgcggtaagcttggtcattttattgctaactgtcccgacaatgatagtgaccaggaacacgggagcaagagggaaaagaagaagcattacaagaaggccaagggcgaggcacatatcggaaaggagtgggattcggattgctcctcctccgactccgacaatgaaggactcgccgccactgccttcaacaagtcatccctcttccccaacgagcgtcacacatgccttatggcaagggagaagaaggtatgtaatcaaaacaatgtcacttatgattcttccagtgatgacgagtctagtgatgatgaaatagattactctagtttgttcaagggattggatagaactaaagtagataaaattaatgaattgattgatgccttgaatgaaaaagatagactcttagaaaaacaagaggaccttttgtatgaagagcatgacaaatttgtagaggcacaaaaatcttatgctttagaagttaaaagaaatgaagtgctttctagtgaactatcttcttgtcatgaaaccattgctactttaaagagtgttaatgatgacttaaaagctaaactagaagtagctagtaaatctaattcttgtgtagaacatgttgagatttgcactaggtgtaaagatttcgatgttgatgcttgtagtgatcatttagtttcaatttctaaattaactgaggaattggctagtcttaatgcccaacttaagactagcaagaatgaatttgagaaactaaaatttgctagggatgcctacacggttggtagacacccctcaattaaggatgggcttggcttcaagagggaagtcaagaacttaacaagtcataaggctcccatctccgccaaggagaaagggaaggcccctatgtccagtagtgctaaaaagaaccatgcgtttatgtaccatgataagagacaaattagaaatgcttataggagttacaatgcttatgatgattttgattctcatgacatgtttgcttctagttctttctatgtgcatgatagaaatgttggtaggagaaatgttgttcacaatacgcctaggaaaaatgttgttaatgtttatgcatccgggggttcaagctggattatcgacagcggatgcacaaaccatatgacgggggagaagaagatgttcacctcctacgtcaagaataaggattcccaagattcaattatattcggtgatgggaatcaaggcaaggtaaaagggttagttgagtctctgggatataatttgctatctgttagtcaattatgcaatatggggtataactgcctatttacaaatgtagatgtgtctgtctttagaagaagtgatggttcactagcttttaagggtgtattagacggcaaactttatttagttgattttgcaaaagaagaggccggtctagatgcatgcttaatagctaagactagcatgggttggctgtggcatcgccgcttagcacatgtggggatgaagaacctacacaagcttctaaagggagaacacgtgataggtttgactaacgttcaattcgaaaaagatagaccttgtgcagcttgtcaagcaggtaaacaagtgggaggagcacatcacaacaagaatgtgatgaccacttcaagacccctggagctgctgcatatggacctcttcggacccgtcgcctatctgagcataggagggatgtatcatggctaagcagactctagtcagtactggcagctctacttacgcttctcctagtggtgatgattctagtcctaatgatgaaatagtctatcttagtttatttaaaggtctagatacaattacgattggcaaaattaatgaattaattgatgcattgaatgacaaggataaactcttagagaatcaagaggatttattgtatgaagagcatgataaatttttagaagctcaaaaatctcatgctctagaagttaaaagaaatgaaatgcttacttgtgaattatcttcatgccatgagacaatttcaaaattaaagagcattaacgatgagttgaatgctaagatagaaatgtctagtaaatcaacaacttgtgtagaaaatgttgttaagtgcaatagagtagaagactaaagaggcaaaaggagacaagcatgttggcaaggagtggcaatcgtactgctcctcgtctgactccgacaatgagggaatcgccgcccctgcattcagcaagtcatccctcttccccaacgagcgtcacacttgcctcatggcaagagagaagaaggtaatcactcgtaatgatgtcacttatgattcttctagtgacgatgaatctagtgatgatcaaatagataactctagtttgttcaagggattggatagtaataaaactgatagaatcaatc

SEQ ID NO: 107666 - DNA, 834 bp, Zea mays
  Clone ID: MRT4577_29690C.1
tgcaaagttcggctcataaaatgcagaaagtggaggcccccgcgtcgcccccgcttgggcggcgctaaccgtcgtctcctcctcttcctcccctctctacctcgccgccgtcggagctagccggcgggttgttcgcccggctcgtgaggaaggcggcggtggggcgtttcggcgtgtcgtggctcgcggcggcggtggcctgtgctcgcgcgcacgccaacggcggtggcattgctgtgctccaacgcgtggccgaccggtttggtaagcatggcggtggtggtgacgaacaacagggcgagagcggagctggcgtggctgcagtggcgggagcaggtgccccggagttagctgatggcttgctcgcggcggcggtgtggctcacgcgcctgctcttccgtcgagtagtggcatccccggcaatcgctcttgaggctggctcgcggcgccgctcgcgtgttcgctgcgtgcgcggcaacacacgcggggaggagtgggctatgtgggctttggtcggcggcggatctggcattgtcggcggatctaggccccatcggcctagatatggcccaccctcaactgatctacgccttggcgatggttgtcattgcggggtgcatgttggtgcgcaacggaggcggtgcgcccggcgacagctggtttcgatgtcgcgggtgccagggccagtggcggtagctcaagctggtttcagctctggcgagtgggcagtgtggcgcacacggcaaggtgttccctggttccatgtgcccaaccggaagggacggcagccggcgctagctttgcgggctgctgcggcagccggcacggtgcccc

SEQ ID NO: 107667 - DNA, 1132 bp, Zea mays
  Clone ID: MRT4577_29691C.1
cattgggaccctcgaggccggccgggcttctcttggccttcaatcgttggtgctgattatcatataatctccttgctttggagtgaagaaaagaagttcgatcagttcattcaattaggaagcgtcagactaggcctttctttcaacgaatgtctcattctaatctacctacccggatccctttgctactaagcgagccaactatctatcgacagacccatcagctttgcacttaactaacccatttatttccaacagtttgacgccccattcctcgttttcccacttgtacttctatgccttgccccatagagaggagtcttctttcttcggaaaaacggctgaattcgattaagtattcccatagagaaaaaagcccactaataactggagctggaggtagtagcccttcctctttggtctagttgaccgcagcacccattgccgaaagcagctcatacgggggtatttccttggccaacgcttctagtaggaggcatattcctttctcccgagggtgaggtttctcacttttgcctatggctggcataaccaaatctagagcggagtgagccaatccatttgtaaccgtttcaaagtcttctgcggcatcttctggatcagaatctcctgctcaaccgagaatgaattcattttcattgtattatgtggcagtcccactactttcaaccatggaagcgaatcgatgatcctgtccagagtatctttatgaagaatatcctagcctagtcatagctttctttgtaaatgatctctcctctgcatcgctggaaaagttctcaaccggattatcggagaacaaccgcactcaaccaagaacttccccttcccccatttccctgtcttcgctattttgcttttctactgcttgctccccgagctccctatccgagtaagtcctaccttcctggttggcaagtagtaaaccctacttccctttcaaatccttgatttgatcatcttcattccatggtggacggaggaaaactagttacaaatgttctttgctcgtgatactttgaattgaaagaggaacgccttgcacgatagcccttgtcaaagcaagcatcctagtgtgaaaaagcaagaaatgcactgactgggcctgcct

SEQ ID NO: 107668 - DNA, 348 bp, Zea mays
  Clone ID: MRT4577_29692C.1
gcacaggggacgccgccgtctccctctccctgccccttcaccacgcccacgcccacggcccgcgcccgctgccgcacccggcgccccaccacctacactgcgcggtcccgctcaggcaccacgccacctccgcgtccgccgtaaccgcgccgtcgcccaagcctgacgttcaggctccttcaatcggccccctgaaccccggccttggcgggccaaggccaacccggtcggccccggccggcgggcgcttcttcaagcgggccggcaccggataccccggaacgcttgcccacccctgccttcggtccggcacccctcgccgggccgagcgccaagcgcgcgcgcttc

SEQ ID NO: 107669 - DNA, 251 bp, Zea mays
  Clone ID: MRT4577_29693C.1
tttggttgttttttaagacattttgggggataacccatccaggtacgggacgatgacaactggcccgcgttatggcggacacaagtaccaggcaagcatataagttcaagtacttaagatgtacataaaccaaaactttaagacattccgacttattgccacctgcccatctagggaccataacagaattcccatgctgacgaacgtttactacttctaggcgtaagcagcatgggtctgctcgacaccgg

SEQ ID NO: 107670 - DNA, 416 bp, Zea mays
  unsure (1)..(416): unsure at all n locations
  Clone ID: MRT4577_29694C.1
gcacctgnnaggatgtgaaaagccaacacttannatctggagtgtgtggnnggtatgttcaaagaagatcaacacaggggaaacagctggtcccctttattgtcattgcccttatgcccgatgaataccnntggactacagaaaccatactgggatcaacanaaaaagttatntcgcaagtattctattgctgatgaaagagttcttgtcctaaaaagtcagctcctgtttatgccaatgatgactctgattctgcagagtaaaaccatctttctagagggctntatcatttgggttggagaacgccgtcagcccgtcactgaaattctgagggcaaaagacgtcgcaaggggagcctgtgggggcttgatgagcagatgtgctggatttccaagtacaggtgcccactggttggc

SEQ ID NO: 107671 - DNA, 271 bp, Zea mays
  unsure (1)..(271): unsure at all n locations
  Clone ID: MRT4577_29695C.1
gatggtcatcgttctcgtcgtgtgcctggctctgtcagctagccaacgcctctggatgcgaaataccctgcccctgcgcggcgctgcaaggcttgtacggtgctgacgccggnctgacgacgatgatgggcgccatcgggctcgacccctacgcggagtaccttgggcagccacagtgcaacccgctggcggcggggccctactacgccgggtgtgggcagccgaacgccattgttccatccgctacagcaacaatgctggcagcatcaga

SEQ ID NO: 107672 - DNA, 350 bp, Zea mays
  Clone ID: MRT4577_29696C.1
gagattataggactataactcataataaagttttttgtctgatgtttgtggcttcccagaaataagaaagtacatttctaaaaaaaaaaaaaaaaaaacaaaaaaaaaaaaagaaaacaaaaaacaaagaggaggaaaaaaaaaaaaaaaaaaaaaaaaaaaaaaaaaaaatacacaaaaaaaaaaaaaaaaaaaaaagggggggccccccaattattgatttcctcaccccgaaaataaattcggaccggtgccctggggccgcccaatttttcctttagtggggccttataaaagctgggctaaacaaggggaaaagctgttccttgggcaaaatgttttccctttcc

SEQ ID NO: 107673 - DNA, 1737 bp, Zea mays
  Clone ID: MRT4577_29697C.1
gtacacaaaaaaaaaaaaaaaactgcgcatatccaccacccaccccatcaggcatcagcgcctctgccgacttcatcttttgcgttccccgtggcgggttggcaggccacttcatccgcctcgtcggcttcattcatcaccagaaatttccatcgccgcgcccggcgtctcctccactcgcctcccctacgctatagcattccattcctgagctcgctaactgcgcttcttcggttcgccggaaagccacgggttgggttcggcgggaggccgggaaacgggaatttatttcaccagtatgcaacagatggccatgccatcgttcgccgtaacctcacctccgtcacatggcactaccttatgggcgcctcatgctcgtcgtcctcaaagactgcacaggagacacgtgcgcagccaagtccgggcagtggcacaagcacagctgcagtaccagaagctgggggactcagacctcctcatcagtgaggtcactcttggaacgatgacttttggcgagcaaaacacggagaaggaagcacatgacattatcgcttattctttcgatcaaggtgtcaatatcctagacacagcggaaatttacccagttccaatgaacaaggaaactcaagggagaactgatctttatattggcaggtggatgcaatcaaaaccacgagacaagataattttggccaccaaagttgccggttattcagagcggtctacatttcttcgagacaatgcaaaagtggttcgtgtcgatgctgccaatatcaaagaaagtattgaaaagagtcttaaacgcttgtctacagattacattgatttgcttcagatacactggccagataggtatgtggcactatttggtgagtttagttataatccgaccaaatggaggccaagcatcccttttgaagaacaattgaaggctttacaggagttagttgacgaaggaaaggttcgctatatcgcaatttcaaagagcatccagtacagttacagtctacttggtacatgccgctttgaagttgatcttgttgaagtttgccacccgaataactgcaacgttggactgcttgcatactccccgttggctggtggggttctcactgggaagtatcttgacgctaacgctgacatctcaaagagcaggctaaatctcttccctggatacatggcacgctacaatgactctttggctaaagaagcgacattagagtacgttaagcttgccaagaagcacgggctaactccagtccagcttgcccttggcttcgtgcgtgatcgtccattcaccgctagctccatcattggagcgaccaccatggagcaggtgaaggagaacatcgacgcgtttaccagcactccacggcctctaccacaggaagttcttgacggcattgaggatcttttcaagagatacaaagatccagcaatcctctagtttttcattcaccttttttggcgaaaagtagcaatcctcggacaatacaaagcccagaaaacatattacaacctatgatcgtatggtcataccattttgttcatgctgatacagttattgctttgttcttgtattggctctacaggcaataccacagagcagaattatgttttttttccttcactgtgtaagtagaatgcaggttttcactgtgtaagcgttcttttatactctgctagtaactgtatgatgtcttcgacattgacaggtcacaagtggacaggtttaac

SEQ ID NO: 107674 - DNA, 852 bp, Zea mays
  Clone ID: MRT4577_29698C.1
gaacaaggaaactcaagggagaactgatctttatattggcaggtggatgcaagcaaaaccacgagacaagataattttggccaccaaagttgccggttattcagagcggtctacatttcttcgagacaatgcaaaagtggttcgtgttgatgctgccaatatcaaagaaagtattgaaaagagtcttaaacgcttgtttacagattacattgatttgcttcagatacactggccagataggtatgtggcactatttggtgagtttagttataatccgaccaaatggaggccaagcatcccttttgaagaacaattgaaggctttacaggagttagttgacgaaggaaaggttcgctatatcggtgtttcaaacgagacctcatacggagtaatggagtttatacatgctgcaaaggctcaaggccttccaaagatcgtgagcatccagaacagttacagtctacttgtgagatgccgctttgaagttgatcttgttgaagtttgccacccgaataactgcaacgttggactgcttgcatactccccgttggctggtggggttctcactgggaagtatcttgacgctaacgctgacatctcaaagagcaggctaaatctcttccctggatacatggcacgctacaatgactctttggctaaagaagcgacattagagtacgttaagcttgccaagaagcacgggctaactccagtccagcttgcccttggcttcgtgcgtgatcgtccattcaccgctagctccatcattggagcgaccaccatggagcaggtgaaggagaacatcgacgcgtttaccagcactccacggcctctaccacaggaagttcttga

SEQ ID NO: 107675 - DNA, 398 bp, Zea mays
  Clone ID: MRT4577_29699C.1
caagcgtgatatcaaaaaaaaaaaaaaaaaaaaaaaaaacaaactaacaaacaaaaaacaagcgagagaaataaatatgggggagtgaaaaccaaaaaacaattcacatacacgcaaaattacaaacatcaaaactgtaaaaaaccctgtcattaacccaacttaataatacttggggcgccttctttttgttcccatctttccaatccctaataggcccgtactttttttttctttccaacacctaatcatacttaatggcgcatggtactccaccctttgcgttgcaaaaaccccggcctttcccaaattttttccccgtggtgaccatcccccttttccagcgccctataaatagataaaagccctttctttctttcctttcaaaaaatgttccc

SEQ ID NO: 107676 - DNA, 4083 bp, Zea mays
  unsure (1)..(4083): unsure at all n locations
  Clone ID: MRT4577_2969C.1
atggatcctaaagggaagggaatcgtgatcaacgacaaggagaaggagtccttcgtcaacgagccaagggaagacatgtccaacgactcgggctcgggccacatacgcaaagatgggaagaagaagaagacaagacgcatcaaggagatcgtctactacgacagcgatgagtctacttcctcccaaaaggacgacgaccacaacgaatacgagagaaagaaaccggtcaattcgaacttttcttttgattactctcgtattcctcaaagtactaatgctcatttattatctattccacttggtaaacctcctcattttgatggagaggactacggattttggagtcacaaaatgcgtagtcacttgttctctctccatcctagcatatgggagattgtagaaagtggaatgcactttgatagtacggatagtcccatgtttattaatgaacagattcataaaaatgcacaagctactactgtgttgctagcctctttgtgcagggacgagtaccataaggtgagcggcttggacaatgccaagcagatctgggacaccctcaagatctctcatgaggggaatgatgtcaccttgctcaccaagatggagttggtggagggcgagcttggacggttcgcaatgataaggggcgaggagccaactcaaacatacaactggctcaagacccttatcaacaaaataaggagctacggaagcacgcgatggacggatcacgacgtcgtccgtctaatgctaaggtcctttaccgttcttgatcctcatttggtgaacaatattcgtgaaaatcctaggtacaccaagatgtcgcctgaagaagttctggggaagttcgtaagcgggcgaatgatgatcaaggaggcaagatatgtggacgacgcgttgaacggtcctattcatgagcctcagcccactgctctcaaggcaacgaggagcaaggaggcgctaccgagcaaggtggcgcaagttgaggcggccgggctaaataatgaggagatggccctcatcattaagcgcttcaagacggcgcttaaaggtcgcaagggacagccaagcaagaccaagacaaaggagaagcgctcgtgcttcaaatgtggtaagattggtcatttcattgctaactgtcccgataatgaaagtgaccaggaaaaggggaacaaaagggagaagaagaagcattacaagaaggccaagggcgaggcacatatcggaaaggagtgggattcggattgctcctcctccgactccgacaatgaaggactcgccaccaccgccttcaacaagtcatccctcttccccaacgagcgtcacacttgcctcatggcaagggagaagaaagtaagcactcatgatactagtacttatgcttcttcaagtgaggatgagtctagtgatgatgatgagatagattactcatgcttattcaagggattagatagatctaaaattaataagattaatgagttgattgatgctttgaatgacaagaatagattactagaaaaacaagaggatcttttatatgaggagcatgataaatttgttagtgcacaaaattctcttgctctagaaattaaaaggaatgaaattctctctagtgaattatctacttgtcatgaatccatctctaaattaaaaagtgttaatgatgatttgaatgctaagttagaaatagctagtaaatcaacatcttgtgtagaaattgttgaaacttgcaataggtgtaaagattttgacattgatgcttgtagtgaacatctagttttaatttccaaacttaatgatgaattgtctagtcttaatgctcaacttaagactagcaagagcaattttgataagctaaaatttgcaagggatgcctacacaattggtagacacccctcaattaaggatggacttggctacaagaaggaagccaagaacttgacaagccataaggctcccatctccgccaaggagaaagggaaggccccctatggctattcttcttatgtgcatgatagaaatgttggtaggagaaatgttgttcataatatgcctaggagaaatgttgttaataggaaagtttatgcatccgggggttcaagctggattatcgacagcggatgcacaaaccatatgacaggggagaagaagatgttcacctcctacgtcaagaataaggattcccaagattcaattatattcggtgatgggaatcaaggcaaggataagtctgaaaaccaagggaccctcaagcgcttcctcaggagagctcaagatgagtttgagctcaaggtgaagaagataaggagcgacaacggatccgagttcaagaaccttcaagtggaggagttccttgaggaggaagggatcaagcacgagttctccgctccctacacaccacagcaaaatggtgtggtagagaggaagaacaggacgctaatcgatatggcgaggacgatgcttggagaattcaagacccccgagcgtttttggtcggaagccgtgaacacagcttgccacgccatcaacagggtctaccttcaccgcatcctcaagaagacgtcgtatgagctgctgaccggtaacaaacctaatgtatcgtattttcgtatttttgggagtaaatgctacattctagtgaagaagggtaggaattccaaatttgctcccaaagccgtagaagggtttttattaggttatgattcaaatacaaaggcgtatagggtcttcaacaaatcatcgggtttggttgaagtctctagcgacgttgtatttgatgagactaatggctctccaagagagcaagttgttgatcttgatgatgtagatgaagaagacgttccaacggccgcgatacacaccatggcgattggagatgtacggcctcaagaacatttggagcaagatcaaccatcttcctcaactatggtgcatcccccaacccaaggtgacgaacaggtacctcaagtggaggcgcatgatccagggggagcacaggatgttcaagttgaagaggaagaagcacctcaggcacctctaacccaagttcgagcgacgattcaaagggatcatcccgtcgaccagatattaggtgatattagcaagggagtaactactcgctcgagattagttaatttttgtgagcattactcttttgtctcttctattgagcctttcagggtagaagaggccttgctagatccggactgggtgttggccatgcaggaggaactcaacaacttcaagcgcaatgaagtttggacattggtgcctcgtcccaagcanaatgttgtgggaaccaagtgggtgttccgcaacaaacaggacgatcacggggtggtgacgaggaacaaggctcgacttgtggcaaaaggttatgcccaagtcgcaggtttggactttgaggagacttttgctcctgtggctaggctagagtcaatttgcatcttgctagcatatgccgctcaccattctttcaggttgtaccaaatggatgtgaagagcgctttcctcaacgggccgatcaaggaggaggtgtacgtggagcaaccccctggcttcgaggatgaacggtaccccgaccacgtgtgtaagctctctaaggcgctctatggacttaagcaagccccaagagcatggtatgaatgccttagagactttttaattgctaatgctttcaaggttgggaaagccgatccaactctttttactaagacttgcgatggtgatctttttgtgtgccaaatttatgtcgatgacataatatttggttctactaaccaaaagtcttgtgaagagtttagcagggtgatgacgcagaaattcgagatgtcgatgatgggcgagttgaactacttccttgggttccaagtgaagcaactcaaggacggcaccttcatctcccaaacgaagtacacgcaagatttgctaaagaggtttgggatgaaggacgctaagcccgcaaagacgccgatgggaaccgacggacacaccgacctcaacaaaggtgtagaccggatattatgcttagcgtatgcatgtgtgctaggtttcaatccgatcctaaggagtgccacttag

SEQ ID NO: 107677 - DNA, 464 bp, Zea mays
  Clone ID: MRT4577_296C.1
ggaagcaacaacgtaaacagccataattattctcaataacccgggagcaatgcaggggaataaacaactcttacaacatcagggggtggaaaccacacaatacttcagaacagacacacataacacgatggcgggggcaactcacgggagatcacgggataagggcagcacactggcctgatgctgggtcataagcaaacttttttagtactcggcaccctcggggccatcctcgccctcatggaactcagggccgacctccttgtagtccttttcgagcgccgccaggtcctcacgggcctaaaaaaactaacctttctccataccctcaccgacgtaccagtgcacgaaggcacgcttggcgtacatgagggcgaacttgggggcgatgcgggagaacacctccacaacactgggggagttggagatcatgcacacagaacgctggaccttggccaggtcgc

SEQ ID NO: 107678 - DNA, 298 bp, Zea mays
  Clone ID: MRT4577_29700C.1
ggcaaggaaaagttatttttattgaatagaaccaaccactggttcaactcatttgcttggccccaactccaaaaaatgggtgctggattataacccactattccatcaataggcaggggccctcgcagtaaataaaaaaatttttttttttgatacatggggcaacaaaacgggtttttttaaaccccacaaagccactgtttttttgtgttgcaccataagagcaaaatttacatggccctgaaatttgacattacttatttttcgacgttatgaccaggaaacccagggggccaaa

SEQ ID NO: 107679 - DNA, 231 bp, Zea mays
  Clone ID: MRT4577_29701C.1
cctatgaggacacatcgtgtgatattattattaagagcctaaatccattcgcccccagaataacactgactattatcctacagcgggcactacaagttccagcactctcaactgccaatctcgatgggtacccacacaatctcatcgtaacaactgtgaggagtggggcaaaccctctaccagacaaggtaggcctattcagtaaacataaaacaacccactgcaccactc

SEQ ID NO: 107680 - DNA, 528 bp, Zea mays
  Clone ID: MRT4577_29702C.1
ccggccggggcagacgattctagctcgtggtcctgcgccggcgttcagacacactcacacaccggagcccgcacatccatgcatgggacgcgctgcgcaaccacagcgcacacacgcgttgcgagagcgaccgcccacttgatgccgctgcttacacacgcaagggtgctctaccatacaatatgctctacgtgcaggcagtggatggggaacctgtagctgagcaggtgctgctgcatgagccgggtgctgcgctgcacgacccagcttcaagcaggctattgaaggggaccgtccgcatgtgcacgaactcgacgccaggcgcaaagaggtggaacacgggtgaactgccaagggccccgagcaagctgcagcgtgcatcgtccgtgccccagaataggtgcgcaccatgcccgagaccactgcacccgctgaagcaaataacatcgccaggcgagccctaccacaagagctgcttcaagagctctgaccgactgtgcatgcatgccacctactattatgccgggc

SEQ ID NO: 107681 - DNA, 325 bp, Zea mays
  unsure (1)..(325): unsure at all n locations
  Clone ID: MRT4577_29703C.1
aaaatatagatctctaatactttattattgttaggacccacatataattttggggtttttattatnacaggataaggggcccctaatctagaaaatggcaccaccaatggagaacggctgcaataagggggtacgattaagtaaagcatgttgactaaatggtagcaattgctgttgttgaaagaaggcaacaatgtttgccacattctgtgggtagaatggtaccaattgttgctgatgcaagaaagcattaatgttagacacaactcgaacctaaaatggattcacactgaagagaattgaaaaacggagaacttgaactact

SEQ ID NO: 107682 - DNA, 552 bp, Zea mays
  Clone ID: MRT4577_29704C.1
gctctatagctccctgctctcattcaaactgctcatcctcttgtcttctgcgcatgcgaattcgtgactcttcaacggcatcctcctccatcttgtcgacaccgatggatagttgtctctgcgcccgtcacatcgcctactacaatcatgtaaaaaagcgcccattgatcagaaggcctgactatatacatggctgttttctgtccgtagctgattctgctgcttcgatacctgagagtgctgactccaagccatctgttgatgttgctaagactgcgttgggaacttgcacgaccctcatcataaaaaagaggacatgatggacgccctccggcaaatgagatggtgtagttatatgactgacgagaagaaatgcattattgcctgttcatggatgtgttaggcgagattatcaactgcgttattttccctacctctatgatctatacttggcgaaggatttttgaccgaaacattgtatgttagtaatgtattgtaccacctcgtgccattttgcccgctagatagaacaaatcaaaggcccctagggcc

SEQ ID NO: 107683 - DNA, 347 bp, Zea mays
  Clone ID: MRT4577_29705C.1
acgcgtgccactgctgtaactcaacctgccttcataccaccatcaccagtatagtgtcccgcccttttctgacattcgcagcgtggacaggcgttgctgcgcgaacggctcctgtcgggggagtagcttcggcgtcagcggatcagtccgcttctgtgcccctgctgggagcggctctctcaccgacctcggcggctacgtcatccacgagccgcgtctactgcgacagactgcggcgccgggtgtcggatcacctgtcaccggaatacattctgtccccggcggtgaggcttacgtgcatgcacttcggcttcggctcgatcgaccactctatcgtcggggtgccc

SEQ ID NO: 107684 - DNA, 233 bp, Zea mays
  unsure (1)..(233): unsure at all n locations
  Clone ID: MRT4577_29706C.1
aggcccgggccgaccgacgcgtncgggtccaatcgtcatcaccggctacctgttcctgacttcacacctacctcctccacccagaggcgccttcatgcaaaactgggcggcctattcctacaacacccgcatatgccccataccaccatatacccgctctgatgctttaaatcaatgtgtataacattccaagcatctgacctgacaaataccgacccaagcaaccatgattc

SEQ ID NO: 107685 - DNA, 1458 bp, Zea mays
  Clone ID: MRT4577_29707C.1
taccctcgaattgggacctcgagccgggatcataacgacgaaaacgaccatcgtgtgcgaccttttcgtgtttccccagctaccaaatctcttcacatcgtcaatccctcttccacagtttctgaaatcagaagggaaacacaggaacgacaggcaattcgaggcgggcaatctaatcgtctgccatcccgtctcatcgttctcccaaatctgagagcgttcccaggacctagggttcttgagatccagccccaggatggatccgaaccctagagctcccctcctcctcgccatcgtcgttctcgcgcttggcgtatccgtggtggccagcgccgaggacgacgcgtcgggggtctctctgggccgccgcgccggggggttcttgcacggcctgaagaaggatgcactggcggagggcgatcatggggtggcactagacgaggttggaccggggctgttcgacgcactctttgccagcctctccatgatactagtcagtgagattggagatgagaccttcatcattgctgcgctgatggcgatgcggcaccccaagtcaattgtgttgtctggtgcactatctgcgctttatgtgatgacagtattgtcaactggacttggcagaatagtgcccaacttgatatcaaggaagcacactaatagtgctgctacagttttgtacttgttctttggactacggttgctgtatattgcatggaaatctgacccaaagggatcccagaagaaggaaatggaagaagtagaagagaagcttgagtcgggtcaagggaaatcaaccatccgtaggttctttgcaagattttgtacaccaatctttttggaggctttcatcttaaccttcttagctgaatggggcgaccggagccaaatagcgacaatcgcgctggcaacacacaagaacgcaatcggagtcgcagtgggagcgtcactggggcacacggtgtgcacatctctcgccgtggtaggagggagcatgctggcgtccaagatctcgcagcgaactgtagcgacgatcggaggcgttctcttcctagggttttctgtttcatcctacttctaccctccgttgtgatgaaaaggctgctgatcgaaacatagatggcgtaacaacccagatcgtaacagcacgcctcgagtcgcgggcttcgtgtaatgtacagacacattcgaacattcctgacaacaatgttctctgccatgctgccttcaagtccgtatgtagaagatgtctcattgagagcatggccgactttttattgcttgtatccgaagtattaacttatactatacgctgctccaatctcgttcaccaggaaaaaaaaaaaaaaaaaccttctttcaaaagcgtgataaaatgtagaaaaggcatcaagaagcccatctctagttgtaaatccttctgctttttctaagtacagatttttattgcacatctag

SEQ ID NO: 107686 - DNA, 466 bp, Zea mays
  Clone ID: MRT4577_29708C.1
caaagcctcaacaaagctgatggactggacatatgtggcaaagtggttgtaccaagcacgagaggcttgtttgagaccatagtgggactttgtgagccgacaaacttagtcgaggtgagctggatcaacgaaacctgatggttgggagcagtacattgtctcagatacggtgccatgaagaatggcattcttcacatcaagtggatgaatgggccagtcttgtgagtgagccaatgagagtactgtgcgaattgtagctgacatcaccactaggctgactgtttcttcctccacgttgctgcataagcatcgtttcatcaggccttgtgacacgatttcacgatgaccttggagagtgagggtatttgctgggaatctctgttcaacaccagtctaagggtttacttttgccacaacgtctctatgcggacgccatacttcaccaggctagtataacaatgtgcaa

SEQ ID NO: 107687 - DNA, 410 bp, Zea mays
  Clone ID: MRT4577_29709C.1
gcgtccgcgcacgcgtgggtcgagcgctccacaccttcatctataacttcatcagatggtttatctcttctgagccccgaccaaaaacgcgggggtgactgtcgactggccggacctgggctatagaggacgctaggttctctcgtcgatcaccgatggtacatgcgcacgctatggacaccttaacggagaaggacctcatacagaccctgctgtacggtaagatgaacacggtgaccgctaataatgttcaccttatcgataccgagatccttcacctctgcgtgacctgccaggaaatcttactctgacaagctattctactagatctagcggccgacatcaacatgtgaagaggccttcacgggcagtttttagacctgcttggtgcttttttagcacgcaggtca

SEQ ID NO: 107688 - DNA, 5256 bp, Zea mays
  Clone ID: MRT4577_2970C.1
atggatcctaagggaaaggggatggtggtcaacaacaacgagaaggagtctatcttcaacgagccgaaggatgacaagcctaccgactcgggctcgagccacaagcgcaaagacgggaagaagaagaagacaaggcgcatcaaggagatcgtctactacgacagcgacgaatcttcctcttcccaaaaggacgacgacgactacgagaaaaagaaaacggtcaattcgaacttttcttttgattactctcgtattcctcaaagtacaaatgctcatttattatctattccacttggtaaacctcctcattttgatggagaggactacggattttggagtcacaaaatgcgtagtcacttgttctctctccatcctagtatatgggagattgtagagagtggaatgcactttgatagtacggatagtcccatgttcattaatgagcaaattcataaaaatgcacaagctactactgttcttctagcttcattgtgcagggatgaataccacaaagtgagcggcttggataacgccaagcaaatctgggacaccctcaagatctctcatgaggggaatgacgtcacaatgctcaccaagatggagttggtggagggcgaactcgggagattcgctatgataaggggagaagagccaacccaaacgtacaaccggctcaagacccttgtcaacaagataagaagctatggaagcacgcgatggacggaccacgacgtcgtccgcctaatgctaaggtcttttactgtccttgatcctcatcttgtaaacaatattcgtgagaatcctaggtacaccaagatgacgcccgaggagatacttggaaagttcgtgagcgggcgaatgatgatcaaggaagcaagatacgtggacgacgcattgaatggtccaatcaatgagcctcaacctcttgctctcaaggcaacaagaagcaaggagacgctacctagcaaggtggcacaaattgaggcggccagacttaatgatgaagagatggctctcatcatcaagagattcaagacggcgctaaaaggtcgcaaggggcagccaagcaagaccaagacaaaggggaagcgctcatgcttcaaatgtggtaagcttggtcattttattgctaactgtcccgataatgatagtgatcaggatcaagggaacaagagggagaagaagaagaactataagaaggcaaagggcgaggcgcatctaggcaaggagtgggattcggattgctcctcttccgactccgacaatgaaggactcgccgccaccgccttcaacaagtcatccctcttccccaacgagcgtcacacatgccttatggcaagggagaagaaggtatgtactcgaaactctacttatgcttcttcaagtgaggacgaatctagtgatgaggatgaaatagattattcatgtttatttaagggcctagatagaaccaaggtagataaaattaatgaattgattgatgccttgaatgataagaataggcttttagaaaagcaagaggatttgttgtatgaagaacatgacaaatttgtagaagcacaaaaatctcatgctctagaagttaaaagaaatgaaatgctttcttgtgaattatcttcttgccatgagacaatttctaacttaaggagcattaatgatgatttgaatgctaagttagaaatagctagtaaatcaacatcttgtgtagaaattgttgcaacttgtaataggtgtaaagattttgacattgatgcttgtagtgaacacctagtttcaatttccaaacttaatgatgaattggctagtcttaatgctcaacttaagactagcaagagcgaatttgataagctaaaatttgcgagggatgcctacacgattggtagacacccctcaattaaggatggacttggcttcaagagggaagccaagaacttaacaagccataaggttcccatccccgccaaggagaaagggaaggctcctatggcaagtagtactaaaaagaaccatgcttttatgtatcataacacgagacatgctagaaatgactatagaagttatgattcacatgctatgtttgcttctagttcttcttatatgcatgatagagatatgtctaggagatatgttcatcatgtgcctagaaagaatattgttcatgtttctaggaaagttatggatggtccttctacaatatatcatgctttaaatgcttcctttactatttgtagaaaggataggaagatagttgctaggaaattaggggcaaaatgcaagggtgataaaacttgcatttgggtccctaagacaattgtgactaaccttgtaggacccaacaagagttggggttatgcatccgggggttcaagctggattatcgacagcggatgcacaaaccatatgacgggggagaagaagatgttcacctcctacgtcaaaaacaaggattcccaagattcaatcatatttggtgatgggaaccaaggcaaggtgaaaggtttaggcaagactgcaatttcaaatgagcactctatctctaatgtgtttttagttgagtcccttggatataatttgctatctgttagtcaattatgtaatatgggatataattgtctatttacaaatgtagatgtgtctgtctttagaagaagtgatggttcactagcttttaagggtgtattagacggcaaactttacttagttgattttgcaaaagaagaggccggtctagatgcatgcttaattgctaagactagcatgggctggctgtggcatcgccgcttagcacatgtggggatgaagaactttcacaagcttcttaagggagaacacgtgataggtttaactaacgtgcaatttgaaaaagatagaccttgtgcagcttgtcaagcaggtaaacaagtgggaggagcacatcacagcaagaatgtgatgaccacatcaagacccctggagctgctacatatggacctcttcggtcctgtcgcctatctaagcataggaggaagtaagtatggtctagttattgttgatgacttttcccgctttacttgggtattctttttgcaggataagtctgaaacccaagggaccctcaagcgcttcctaaggagagctcaaaatgagtttgagctcaaagtgaagaagataagaagcgacaacggatccgaattcaagaaccttcaagtggaggagtttcttgaggaggaagggatcaagcacgagttctccgctccctacacaccacaacaaaatggtgtggtagagaggaagaacaggacgctcatcgatatggcgaggacggtgcttggagaattcaagacccccgagtgcttttggtcggaagccgtgaacacggcttgccacgccatcaacagggtataccttcatcgtctcctcaagaagacgtcatatgagcttctaaccggtaacaaacccaatgtatcttactttcgtgtatttgggagcaaatgctacattctagtgaagaagcgtagaaattctaagtttgctcccaaagctgtagaagggtttttgttaggttatgactcaaatacaaaggcgtatagagtcttcaacaaatcatcgggtttggttgaagtctctagcgacgttgtatttgatgagactaatggctctccaagagatcaagtttgtgattttgatgatgtagacgaagaagaagttccaacagccgcaatacgcaccatggcgattggagatgtgcgaccacaggaacaagatgagcaagatcaaccctcttcctcaactatggtgcattccccaactcaagacgatgaacaggtgttggccatgcaagaggagctcaacaacttcaagaggaatgaagtttggacactggtgcctcgtcctaagcaaaatgttgtgggaaccaagtgggtgttccgcaacaaacaagacgagcacggagtggtgacaaggaacaaggctcgacttgtggcaaaaggttatgcccaagtcgcaggtttggactttgaggagacttttgctcctgtggctaggctagagtccattcgtattttgctagcatatgccactcaccattctttcagattgttccaaatggatgtgaagagcgctttcctcaacggaccaatcaaggaggaggtgtacgtagagcaacccccaggcttcgaggatgaacggtaccccgaccacgtgtgtaagctctctaaggcgctctatggacttaagcaagccccaagagcatggtatgaatgccttagagactttctaattgctaatgctttcaaggttgggaaagccgatccaactcttttcactaagacgtgtgacggtgatttttttgtgtgccaaatttatgtcgatgacataatatttggttctactaataaaaagtcttgtgaagagtttagcaggttgaactacttccttgggttccaagtgaagcaactcaaggacggcacctttatctctcaaacaaagtacacgcaagacttgctgaagcagtttgggatgaaggatgccaagcccgcaaagactccgatggggaccgacggacacaccgacctcaacaaaggaggtaagtccgttgatcaaaaggcataccggtcaatgatagggtcgttactttacttatgtgctagtagaccggatattatgcttagtgtatgcatgtgtgctagatttcaatccgatcctaaggagtgccacttagtggcagtaaagcgaatccttagatatttagttgctatgccttgcttcgggatctggtatccaaaggggtctacctttgacctgattggatattcagactccgactatgctggatgtaagatcgataggaagagtacatcggggacgtgccaattcttaggaaggtccctggtgtcatggaattctaagaaacaaacctccgttgccctatccaccgctgaggccgagtatgttgctgcaggacagtgttgcgcgcaactactttggatgaggcaaaccctcaggaactttggctacaatctgagcaaagtcccactcctatgtgacaatgagagtgctatccgcatggcggaaaatcctgttgaacacagccgcacaaagcacatagacatccggcatcactttttgagagaccaccagcaaaagggagatatcgaagtgtttcatgttagcaccgagaaccagctagccgatatctttaccaagcctctagatgagaagaccttttgcaggttccgtagtgagctaaatgtcctagattcgcggaacttggattga

SEQ ID NO: 107689 - DNA, 496 bp, Zea mays
  Clone ID: MRT4577_29710C.1
ctgactatcctccccgaagagactgtacggctatccgccgctagcaaacttttcggcgggcgagttctacttcgacgggctgaggaagcccggtaacactatacaaaccggggggtttcgtgccgacgcagaccaacgtggaacaagttcccaggcgagaacatgttgaacgtctccttggtgcgcatctactacgcgccggggtgccaaaagacgtcgcacacgcacccgcgagcgatggagataatcttctacctcaagaacacgctcgatgtcggacttcgtcaccaccgacaacggagtcttcacctagagcgtgaccaaggtctacgtcttcctcttcacgcgcaggcatcgacaacttccagaataacttgcgcatacaggcaccgtcgtatgaggcgacgacttctacagtgcagacatcgtgcgcttagaccatcgccatgaggctcttacgtatacgtgtcgaccgtagatctccatacatcgctcg

SEQ ID NO: 107690 - DNA, 684 bp, Zea mays
  unsure (1)..(684): unsure at all n locations
  Clone ID: MRT4577_29711C.1
gtcgacccagcgtccagcgttcccaggacctagggttcttgagatccagccccaggatggatccgaaccctagagctcccctcctcctcgccatcgtcgttctcgcgcttggcgtatccgtggtggccagcgccgaggacgacgcgtcgggggtctctctgggccgccgcgccggggggttcttgcacggcctgaagaaggatgcactggcggagggcgatcatggggtggcactagacgaggttggaccggggctgttcgacgcactctttgccagcctctccatgatactagtcagtgagattggagatgagaccttcatcattgctgcgctgatggcgatgcggcaccccaagtcaattgtgttgtctggtgcactatctgcgctttatgtgatgacagtattgtcaactggacttggcagaatagtgcccaacttgatatcaaggaagcacactaatagtgctgctacaggtagaagagaagcttgagtcgggtcaagggaaatcaaccatccgtaggttctttgcaagattttgtacaccaatctttttggaggctttcatcttaaccttcttagctgaatggggcgaccggagccaaatagcgacaatcgcgctggcaacacacaagaacgcaatcggagtcgcagtgngagcgtcactggggcacacggtgtgcaca

SEQ ID NO: 107691 - DNA, 2917 bp, Zea mays
  Clone ID: MRT4577_29712C.1
gagaattgcgcagggttttgaaaatccacgactacgacgcgcctaggcgcgcctagtcgctaggccatggcctcccgcctggactaggggggtaggcgggctgctaggcgttgggagcgcctaggcggcgccaaggggcgattccacggcgattccgcgcgcccaggagccaaggcggcggcgtaggcgtgctaggcgcgcgtgggaaaaaaggcgggcgggaaaagtcgtgcgcgcgcagaagaaaagcgcgcagagaagaaaagcgcgcagaagaaattggcgcgcgggaggatagcctggcgcgtgcagagaagaaaaaagcgcgcagaaaaaagcgcctggcgcgcgcagagaagaaaaaagcgcgcagaaaaaagcgccgcagagaacaggcgcgcagagaagaaaagcgcgcagagaagaaaaggaagagcgcagagaagaaaaggacgcgcgccagagaaaaaaattgacccctgcttgcttatctcctgtacgcgggacttccttctaagcattagagggcttggactcaaaagtgttgagtgcgttcgtctcttgacgctacatcatatggcttttccagtggacacaaatgttggtcggatatgtgtgaggcttggatgggtgccgcttcaaccattgccagagtctcttcagttgcacctattggaaatgtatcccatgctggagcacatacagaagtacctttggcctcgactatgcaagctagatcaacgtacattgtatgagcttcactaccaaatgattacttttggaaaggttttctgcacaaaaagtaagcctaattgcaattcatgtccattgagagctgaatgtaagcactttgctagtgcatttgcaagtgctaggcttgctcttcccgcacctgaagaaaaacgtttggctacatcggaggatccaaatgttgtagagttttgtcaccaaacatacataaattcaggggctgttggcgaacttgagtggagtgcgaactatcctaagcatgctgtttgtggtaacctgcagccgttcattgaggaaccactgagcccagaacctgaacctgaaaatgtagaggcgaaggacggtgcaatagaggatttctttaatgaagaccctgatgaaattcctactattaatcttaatattgaggagtttacacagaacttgaagaactatatgcaagcaaaccatgttgagattgagtatgctgacatgtcaaaggcattggttgccatcacccctgaagctgcttccattccaactccaaagctcaagaatgtcagtcgtcttaggacagaacaccaagtttatgaactgccagattcacaccctcttctggaaggatttgaacagagagaaccagatgatccctgtccatatcttctttccatatggaccccaggtgaaactgcacaatcaaccaatgcgcccaagacattctgtgattcaggggagactggtcaactatgtggaagtttaacatgctttagttgcaacagtttacgagaaatgcaggctcagaaagtcagaggaacactcttgataccatgccggacagcaatgagaggaagcttcccacttaatgggacatattttcaagttaatgaggtatttgctgaccattgttcaagccaaaatccaattgatgtcccacgaagttggatatgggacctcccaagacgaactgtttactttggaacctcagttcctacaatatttagaggtttaacgactgaagagatacaacaatgcttttggagaggattcgtttgtgtgaggggctttgataggacagtaagggcaccaaggcccctttatgcaaggttgcattttcctgccagcaaggttgttagaggcaaaaagcctggagcggcaagcgtcgaagaataataggtacatcgaagaaatatagaggagctaacaaaacggatggatagccctaaatgagatgctgacccaataagtcgccgaatcacctccaagttctaacccaatttttgaggcgacatgacctgttaaattaggttccatctatggtaacagcttagatgttcttgtgagtcgcatattctttactctgaaattcaatatagcaaatgaaaaaaaacacagtgcatagtctagttctaattgtacctgtgagtggaatcagttgttgtacaacatgaagatgggcctatttgtacaatggtcatacatgttctttgatcatatactataaacaatgtaacctcatcggccgttatttgattgtttcaaaacaaaggaaaagccttttcaattcaagtatatgtattcagtcgggtcacgtcaaatcctcgttctgatagctacatcctcaatttcatggccagcctttgcagatgcagggtacaattcttcgcatgagttcctgttgcttcttggaagctctgaagccaagactttacccaaagctttggaaggtgaaaatgcaagctctagagattgatcatcagattctgacacttcatgaaaaacccttgcagttccttctccaacaacagctactcgcaccttaggacttccagcagccttccatccctgaaggaacactgcagctgcctcaggagaggttacaataatccagtcgaacttgtcattacgtaggacatctaaaagcctatctgtatcagggccttcaacatgcttaataagaggaagttccagagggtgtacattatgcttttccagcgcggagatgagcctggcgttctttccctgctcgcgcgtcaccacgacgtcgggagggggcaagcaggacgccacgaatctcccgggtgcatcggcccgcagcctcctagcgggatgggctcggaaggttccagaaggtgggaagaacggcgccagtacgaagagaaggccaaggtccctcccggccggcctcgag

SEQ ID NO: 107692 - DNA, 1338 bp, Zea mays
  Clone ID: MRT4577_29713C.1
aaatctcttcacatcgtcaatccctcttccacagtttctgaaatcagaagggaaacacaggaacgacaggcaattcgaggctggcaatctaatcgtctgccatcccgtctcatcgttctcccaaatctgagagcgttcccaggacctagggttcttgagatccagccccaggatggatccgaaccctagagctcccctcctcctcgccatcgtcgttctcgcgcttggcgtatccgtggtggccagcgccgaggacgacgcgtcgggggtctctctgggccgccgcgccggggggttcttgcacggcctgaagaaggatgcactggcggagggcgatcatggggtggcactagacgaggttggaccggggctgttcgacgcactctttgccagcctctccatgatactagtcagtgagattggagatgagacattcatcattgctgcgctgatggcgatgcggcaccccaagtcaattgtgttgtctggtgcactatctgcgctttatgtgatgacagtattgtcaactggacttggcagaatagtgcccaacttgatatcaaggaagcacactaatagtgctgctacagttttgtacttattctttggactacggctgctgtatattgcatggaaatctgacccaaagggatcccagaagaaggaaatggaagaagtagaagagaagcttgagtcgggtcaagggaaatcaaccatccgtaggttctttgcaagattctgtacaccaatctttttggaggctttcatcttaaccttcttagctgaatggggcgaccggagccaaatagcgacaatcgcgctggcaacacacaagaacgcaatcggagtcgcagtgggagcgtcactggggcacacggtgtgcacatctctcgccgtggtaggagggagcatgctggcgtccaagatctcgcagcgaactgtagcgacgatcggaggcgttctcttcctagggttttctgtttcgtcctacttctaccctccgttgtgatgaaaaggtactcgcaaccgctcccacttggatggtatggtagtcttgagttgtctcatgtcctgccgtaagaaacgttgtgacttccccgcaggctgctgatcgaaacatagatggcgtaacaacccagatcgtaacagcacgcctcgagtcgcgggcttcgtgtaatgtacagacacattcgaacattcctgacaacaatgttctctgccatgctgccttcaagtccgtatgtagaagatgtctcattgagagcatggccgactttttattgcttgtatccgaagtattaacttatactatacgctgctccaatctcgttcaccagg

SEQ ID NO: 107693 - DNA, 1256 bp, Zea mays
  Clone ID: MRT4577_29714C.1
attaatcttaatatcgaggagttcacacaaaacttgaaggactatatgcaagcaaacaatgttgagattgaatatgctgacatgtcaaaggcattggttgccatcacgcctgatgctgcttccattccaactccaaagctcaagaatgtcaatcgtctgaggacagaacaccaagtttatgaactgccagattcacaccctcttctggaaggagtgaaactgcacaatcgatcgatgcccccaagacattctgtgattcaggggagacgggtagactatgtggaagttcaacatgctttagttgcaacaatatacgagaaatgcaggctcagaaagtcagaggaacacttttggcaagtttgctttgagtcttattaatttttatgtgttgggtattatatacatctacactaaaagtgctcattgtttggacaaattttaagcagataccatgccgaacagcaatgagaggaagcttcccacttaatgggacgtattttcaagttaatgaggtatttgctgaccattgctcaagtcaaaatccaattgatgtcccacgaagttggatttgggacctcccaagacgaactgtttactttggaacctcagttcctacaatattcagaggtttaacgactgaagagatacaacgatgcttttggagaggatttgtttgcgtgaggggctttgataggacagtgcgggcaccaaggcccctttatgcaaggttgcattttcctgtcagcaaggttgttagaggcaaaaagcctggagcagcaagagcagaagaataatagaacattgaagaaatataggggtgctaaccagatgaggatggatagcccgaaatgagatgctgacccaataggtcgccaaatcacctccaaattctaacccaatgacttccatctgtaatgaatggcaataccttgaaaacctgtgatggagatgttttgtggcgacatgatctcttaaattagattccgtctttggtaacagcctagctgttcttgttgagtcgcatattctttattctgaagatcaatatagcaaatgggagaaaaaacatagtgcacagtcgagctgttctaattgtacctcttgtgagtggaatcagttgttgtacaacaggaagatggacctatctgtacaatggtcgtacatgttctttgatcatagtataaacaatgtaagcctcatcagccgttatttgattgtttcaaaacaaaggaaaagcattttcaattcatctgtct

SEQ ID NO: 107694 - DNA, 2775 bp, Zea mays
  Clone ID: MRT4577_29715C.1
gtttgtactatatgggtaaatcattcaacacaggccctgataaagtgaatctttccagtgttacacagtctgagggtagtctttaccctaatgatccttgacaccaagtccacttttgaatactaattaaacaaaacatccaaccattacatagttcagacgaagagccatttttcatgttgctctctccatgtaatcatttttcgaggaacaaaactgaagctcattttctggaaccacttatctgatcaaatcctcaagaggtgtacacaccctcaacagatcaaatggggtcaaaacaatacctatcaggatggggccaaaagtacaatgatgccagagtccaaataacatcacatgaaaggcttcagaattcgaccttgtgtgataaccagaactcttgtttggtggtgttgcaaggagttgcttcagaactcaacacataagctcgtagacactcaaaagtggccgtcaaaagctcgacaaattggatcaaaagctaagaaggtacggggtcgacctaaaacgaaaacttatgactgggacagtttacgaaaagaagtgttttctaatggtggggataaacaaagaaataatgatgcaagggatactgttgattgggaggcagttaggcaagcagaagtccgagaaatatctgaaactatcagagagagaggaatgaataacatgctagcagaacgaataaaggaattcctgaaccgattggtgacagaccatggaggtattgatcttgaatggctaagagatgttccaccggacaaagcaaaggacttccttctaagcattagagggcttggactcaaaagtgttgagtgcgttcgtctcttgacgctacatcatatggcttttccagtggacacaaatgttggtcggatatgtgtgaggcttggatgggtgccgcttcaaccattgccagagtctcttcagttgcacctattggaaatgtatcccatgctggagcacatacagaagtacctttggcctcgactatgcaagctagatcaacgtacattgtatgagcttcactaccaaatgattacttttggaaaggttttctgcacaaaaagtaagcctaattgcaattcatgtccattgagagctgaatgtaagcactttgctagtgcatttgcaagtgctaggcttgctcttcccgcacctgaagaaaaacgtttggctacatcggaggatccaaatgttgtagagttttgtcaccaaacatacataaattcaggggctgttggcgaacttgagtggagtgcgaactatcctaagcatgctgtttgtggtaacctgcagccgttcattgaggaaccactgagcccagaacctgaacctgaaaatgtagaggcgaaggacggtgcaatagaggatttctttaatgaagaccctgatgaaattcctactattaatcttaatattgaggagtttacacagaacttgaagaactatatgcaagcaaaccatgttgagattgagtatgctgacatgtcaaaggcattggttgccatcacgcctgatgctgcttccattccaactccaaagctcaagaatgtcaatcgtctgaggacagaacaccaagtttatgaactgccagattcacaccctcttctggaaggattcgaacagagagaaccagatgatccctgtccatatcttctttccatatggaccccaggtgaaactgcacaatcgatcgatgcccccaagacattctgtgattcaggggagacgggtagactatgtggaagttcaacatgctttagttgcaacaatatacgagaaatgcaggctcagaaagtcagaggaacacttttgataccatgccgaacagcaatgagaggaagcttcccacttaatgggacgtattttcaagttaatgaggtatttgctgaccattgctcaagtcaaaatccaattgatgtcccacgaagttggatttgggacctcccaagacgaactgtttactttggaacctcagttcctacaatattcagaggtttaacgactgaagagatacaacgatgcttttggagaggatttgtttgcgtgaggggctttgataggacagtgcgggcaccaaggcccctttatgcaaggttgcattttcctgtcagcaaggttgttagaggcaaaaagcctggagcagcaagagcagaagaataatagaacattgaagaaatataggggtgctaaccagatgaggatggatagcccgaaatgagatgctgacccaataggtcgccaaatcacctccaaattctaacccaatgacttccatctgtaatgaatggcaataccttgaaaacctgtgatggagatgttttgtggcgacatgatctcttaaattagattccgtctttggtaacagcctagctgttcttgttgagtcgcatattctttattctgaagatcaatatagcaaatgggagaaaaaacatagtgcacagtcgagctgttctaattgtacctcttgtgagtggaatcagttgttgtacaacaggaagatggacctatctgtacaatggtcgtacatgttctttgatcatagtataaacaatgtaagcctcatcagccgttatttgattgtttcaaaacaaaggaaaagcattttcctatcacggattaatgcacagtcatatttcttacagagaaagcctcgagcatccttttgaccggttcatagtcttttgcttcggtagctttgtatcttgttgatgatcggattaatgtgcgaatacttgggattaatgtgcg

SEQ ID NO: 107695 - DNA, 498 bp, Zea mays
  Clone ID: MRT4577_29716C.1
ccggccgggagtctcgtactctactcccggctgccttagacggcattccaggcgataagactcagtcaatcagagaatcaggaggccatcgcccagctcccccgtgcgcggataacgccggagactgcaccagctgagtaaggatgagaggagcccctgtagcgaggcgcgctgccaggatcgtcaacgcctacatcactgcacagctacctgacgcaaaggatgctaaggccaatctgagatccaaatggcgactacacagtccctggaagaaccggaaccaacttgcatgaattgaaactacatctgagtgaccacagaaaccgcgcaagccaccaaaataaatgtttttttttatgaccctacccccgatcggcagagagagctgtagccaaataggctggaagaaactcacttcgagatgaacaaaggccacctcactttgtgaaagacgattgcaacaaatgggttgatcaagaccgatgatagcgctgatat

SEQ ID NO: 107696 - DNA, 310 bp, Zea mays
  Clone ID: MRT4577_29717C.1
gttgacccggtggagcaaaggaatctgactacatgggaaaaaaatcttctgtgggtttgaccacactataaccaaaagttcattttccacttgcttggaagaatttctgtggaggacacatggtattctatcaccagtctctaacaacaacaacaataatgccttttactcccaagcaagtcgggatagactagaattaaaacacaacaaaatccacaagtcaaggttcagacatatgaataggtatttcctatgcactcaaattcaaggttaaatctatagttatattatatcctttatttccttttat

SEQ ID NO: 107697 - DNA, 2962 bp, Zea mays
  Clone ID: MRT4577_29718C.1
aagaagaatccgaccggctgcgtcaacaaacccacaaagtacaacaaggctggctgccattaccgattagcgaaacggccgcggcactcctaaaaccctccatgaaatggatggatggactgatgcaatcgccttgcgagtcaagacatatagagatgggcctttcggcccaagaatccattacaaactgggccagtggaaagccatggcttgacaccaccacctgccctcaacggggggcaattgtcgtcaaagaaagcaaagaatttcttcgacactgcggacggctaccaacgccaagaagaagctccgccatccgcccgttttcaacgttttggggcctcttttgatgctgtcctgtggactctgagcgcctcgagaatgctctcgacccacccctcaagtccaggggtcgttgggtaatatatgctcttcaggccctgtttcttcgctgcagatgcagtggtctcaccgatgcaggcgacggagttgttccagttatcagattttgagataagatttagccatgccctcagtgcagaaggagaagctaccgcaacaactggagctatggaaccacacatagaaactggcactggcaaaatggaacacgatccaaggagactgatgatttgattaaggaatgcccgttgcgtctattttgtagtagtctgaaactacgctccatcaaaacgtatttggtgcttacatgctggtatctccagatctatcacaccacagctttaccttgcacaattcatgaacacgatttgtaaaaaaaaaaaatatatccaaatgtcactgtgtaattacctcagtgcagaaggagaagctaacgcaacaactggagctgatatagcaaggtttaatgtcagcgggtcgacatcttctacaggaacctgcgcgcacacacaacaccttcatatgttactgtgttatattcatgtaaagaaactgtcaaaaataatatgaaaccgatggtcagtgctttctgattctcgatagaaaaatctctactctggtcaagtgtgtcacaatcaacttacagaactaaatgccactgccaaagaaaagaaggcaagctgtgaatgtatcaataccaaatgtcacgctcaaagtacatcatgatccatgaggttaagcaactagcaaatgaatagatgaccatggatggtagtgagttcaagagctcactaggattattattatttttgactgtcaagctcactagaattttaaccaacaggaatgactaaactgttgaaaactagtgacttctagagctcactataggaattttaacctaaactgttgaaaaactgggtccatgtgaagaccaatgactaacactgagatgaaataaatatcgcaagatgctagtaatgtaaatattcatgctacaaaacaggcactacagactacaggaagcggcacaacaagatgcagatgatgagttttttctgaatatgtggtcatagagcagggttttgaaaatcgtcgcctacgacgcgcctaggcgcgcctagtctctaggctacggcctcccgcctggactaggggggtaggcgggcccctaggcgattggagcgcctaggcggcgccgggcggcgattccgcggcgactcagcggcgcttaggcgagctacgcgcgcgccgcgcacgcgagcgggaaatagcgcgcaggaaaggggcgcgcgcgcgggagggaaaaatgcggcgcgtgcgggagggaaaaatgcgacgcgcgcgtgggagggaaaagggtggcgcgcgcgggggatagggtctagggtttgcggttgaaaagtgcctgcttgcttcttcagttcttcccctttcgacgcttgcttctcccttctctcctgcacggctgacgccagagacgcggctgcagctccaccggacgccgaagacgcggctgcagcttctctccagcacggctgacgccggacccctaccggacgctggacccctgcttctctcccctgcttctctcctctcatgtttgcttctctcccactgcttgcttctctcctacacggttgtatgtctactggtccttccctatttttttatctataaatgtatatattattatataagttggcaaaacgcctagaaaaacgcctagcatcgcctaggcaagcctaggctggactagtccctaggctaagggtcatcgcctagattccgcctagcgcctagcaaaactttgtcatagagtagaaaaaaaacaataaccccacacaagtgaaacaatacctacagttgtatatgtattcagtcgggtcacgtcaaatcctcgttctgatagcacatcctcaatttcatggccagcctttgcagatgcagggtacaatactttacatgagttcctgttgcttcttggaagctctgaagccaagactttacccaaagctttggaaggtgaaaatgcaagctctagagattgatcatcagattctgacacttcatgaaaaacccttgcagttccttctccaacaacagctactcgcaccttaggacttccagcagccttccatccctgaaggaacactgcagctgcctcaggagaggttacaataatccagtcgaacttgtcattacgtaggacatctaaaagcctatctgtatcagggccttcaacatgcttaataagaggaagttccagagggtgtacattatgcttttccagcgcggagatgagcctggcgttctttccctgctcgcgcgtcaccacgacgtcgggagggggcaagcaggacgccacgaatctcccgggtgcatcggcccgcagcctcctagcgggatgggctcggaaggttccagaaggtgggaagaacggcgccagtgacgaagagaaggccatggtgccctgagtaaagccgccgggcgtcgggccccgtggcccccgtgaaggtcggagctgagtgaggaacacgcacgattgcggacgcgtggg

SEQ ID NO: 107698 - DNA, 238 bp, Zea mays
  Clone ID: MRT4577_29719C.1
ttttaatcccatccccaaattttgtttttaacggaacaaaaaaccttttttttacccaacaagcattcctttttcgggggtgccaacaggttacaacctaaaggcctggagcggtaataaaccaaagggggggcccttcgcccgtggggactaattcttgccccctcccttttttttgttgttccggggggaccaagggccaacggccccggaattgtgggcctttttcgcccccttt

SEQ ID NO: 107699 - DNA, 6160 bp, Zea mays
  Clone ID: MRT4577_2971C.1
tcaatccaggttccgcgaatctaagacatttagctcactacgcaacctgcaaaaggtcttctcatctagaggcttagtgaagatatcggctagctggttctcggtgctaacatgaaacacttcgatatctcccttttgctggtggtctctcaaaaagtgatgccggatgtctatgtgctttgtgcggctgtgttcaacaggattttccgccatgcggatagcactctcattatcacataggagtgggactttgctcagattgtagccaaagtccctgagggtttgcctcatccaaagtagttgcgcgcaacactgtcctgcggcaacatactcggcctcagcggtggatagggcaacggaggtttgtttcttagagttccatgacaccagggaccttcctaagaattggcacgtccccgatgtactcttcctatcgaccttacatccagcatagtcggagtctgagtatccaactaagtcaaaggtagacccctttggataccagagcccgaagcagggcgtagcaaccaaatatctaagaattcgcttcaccgccactaagtgacactccttaggatcggattgaaatctagcacacatgcatacgctaagcataatatccggtctactagcacataagtaaagtaaagaacctatcattgaccggtatgctttttgatcaacggacttacctcctttgttgaggtcggtgtgtccgtcggtccccatcggagtctttgcgggcttggcgtccttcatcccaaaccgctttagcagatcttgcgtgtacttcgtttgggagatgaaggtgccgtccttgagttgcttcacttggaacccaaggaagtagttcaactcgcccatcatcgacatctcgaatttctgcgtcatcaccctgctaaactcttcacaagacttttggttagtagaaccaaatattatgtcatcgacataaatttggcacacaaacaaatcaccatcacatgtctttgtaaaaagagttggatcggccttcccaacatggtcggggtaccgttcatcctcgaagccagggggttgctccacgtacacctcctccttgattggcccgttgaggaaagcgctcttcacatccatttggtacaacctgaaagaatggtgagcggcatatgctagcaagattcgaattgactctagcctagccacaggagcaaaggtctcctcgaaatccaaacctgcgacttgggcataaccttttgccacaagtcgagccttgttcctcgtcaccaccccgtgctcgtcctgtttgttgcggaacacccacttggttcccacaacattttgcttcggacgaggcaccagtgtccaaacttcattgcgcttgaagttgtttaactcctcttgcatggccaacacccagtccggatctagcaaggcctcttctaccctgaaaggctcaatagaagagacaaaggagtaatgctcacaaaaattaactaatcgagatcgagtagttactcccttgctaatgtcacccagaatttggtcgacgggatgatccctttgaatcatcgctcgaacttgggttggaggtgtcggttgcgcttcttcctccatcacgttatcatcttgtgctcccccttgatcacatgcctcctgttgatgaacctgttcatcgtcttgagttgggggtagcaccatggtcgaggaagaaggttgatctcgtttatcttgttcctgtggccgtacttctccaatcgccatggttcgtatagcggccgtcggaacatcttcttcatctacatcatcacaatcaacaacttgctctcttggagagccattagtctcatcaaatacaacgtcgctagagacttcaaccaaacccgatgatttgttgaagactctatacgcctttgtatttgagtcataacctaacaaaaacccttctacagctttgggagcaaacttagaatttctacccttctttaccagaatgtagcacttgctcccaaatacacgaaagtaagatacattgggtttgttaccggttagtagctcatatgaggtcttcttgaggaggcgatgaaggtagaccctgttgatggcgtggcaagccgtgttcacggcttccgtccaaaagcactcgggggtcttgaactctcctagcatcgtcctcgccatatcgatgagcgtcctgttcttcctttctaccacaccattttgttgtggtgtgtagggagcggagaactcgtgcttgattccttcttcctcaaggaactcctccacttgaaggttcttgaattcggacccgttgtcgctccttatcttcttcaccttgagctcaaactcattttgagctctcctgaggaagcgcttgagggtcccttgggtttcagacttatccgatagcaaattatatccaagagactctactagcccttttatcttgccttgattcccatcaccgaatataattgaatcttgggaatccttattcttgacgtaggaggtgaacattttcttctcccccgtcatatggtttgtgcatccgctgtcgataatccagcttgaacccccggatgcataaacccaactcatgttgggtcctacaaggttagtgcaaatatccttagggacccaaatgcaagttttgtctcccttgcattttgcccctaacttcctagcgactattttcctatcctttctacaaatagcaaaggaagcatttaaagcacaataaattatagaaggttcattcactactttcctaggagcatgaataacattctttctaggcatatgatgaatagcatttttcctagacatatttctaccatgcatataggaagaactagaagcaaacatggcatgaaagtcaaaatcatcataagcattgaaactcctataagcgtttctagtttgtctcctatcatgatacataaaagcatggttcttttgcacactactagccataggggccttccctttctccttagcgggaatgggagccttatggcttgttaagttcttggcttccctcttgaagccaagtccatccttaattgaggggtgtctaccgatcgtgtaggcatcccttgcaaattttagtttatcaaattcattcttgctagtcttaagttgggcattaagactagccaattcctcatttaatttagaaattgaaactaaatgatcactacaagcatcaacatcaaaatctttacacctagtgcaaatctcaacatgttctacacaagaattagatttactagctacttctagtttagcatttaagtcatcattaacactctttaaagtagcaatggtttcatgacaagaagatagttcactagaaagcacttcatttcttttaacttctaaagcataagatttttgtgcctctacaaatttgtcatgctcttcatacaaaaggtcctcttgtttttctaagagtctatccttttcattcaaggcatcaatcaattcattaattgtatctactttagttctatccaatcccttgaacaaactagagtaatctatttcatcatcactagactcatcatcactggaagaatcataagtgacattgttttgattacataccttcttctcccttgccataaggcatgtgtgacgctcgttggggaagagggatgacttgttgaaggcagtggcggcgagtccttcattgtcggagtcggaggaggagcaatccgaatcccactcctttccgatatgtgcctcgcccttggccttcttgtaatgcttcttcttttccctcttgctcccgtgttcctggtcactatcattgtcgggacagttagcaataaaatgaccaagcttaccgcatttgaagcatgatcgctttcccttggtcttagtcttgcttggctgtcccttgcgaccctttagtgccgtcttgaatcttttgatgatgagggccatctcttcatcattaagaccggccgcctcaatttgcgccaccttgctgggtagcgcctccttgctccttgttgccttgagagcaatgggttgaggctcatggattgggccattcaacgcgtcgtccacgtacctcgcctccttgatcatcattcgcccgcttacaaattttccaagaatttcttcgggcgacatcttgatgtacctaggattttcacgaatattgttcaccaagtgaggatcaagaacggtaaatgaccttagcattaggcggacgacgtcgtgatccgtccatcgcgtgcttccgtagctccttattttgttgataaggatcttgagccggttgtatgtttgtgtcggctcctcgccccttatcatcgcgaatcgtccgagctcgccctccaccaactccatcttggtgagtaaggtgacatcattcccctcatgagagatcttgagggtgtcccaaatctgcttggcattgtccaagccgctcaccttgtgatactcgtccctgcacaaagaggctagcaacacagtagtagcttgtgcatttttatggatctgttcattaataaatgaagggctatccgagctatcaaatttcattccactttccacaatctcccaaatgcttggatggagagaaaataggtgagtacgcattttgtgactccaaaatccgtagtcctctccatcaaagtgaggaggcttgccaagtggaatggggagcaaatgagcatttgagctatgcggaatgcgcgaataatcaaaagaaaagtttgagttaaccgtcttttgtttgtcatagtcgttgtcgtcgttgtccttttgggaagaggaagattcgtcgctgtcgtcgtagtagacgatctccttgatgcgccttgtcttcttcttcttcccttccttccgtctatggcccgagccggagtcggtaggcttgtcatctttgggctcgttgacgaaggactccttctccttatcgttgatcacgattcccttccccttaggatccatctcttcgggcggttagtccttttgtgaagagaacggctccgataccaattgagagcacctagagggggggtgaataggtgatcctgtaaaacttgaaaacttaagccacaaaaacttggttaagcgttagcacagtaaatgccaaatggctagagagaagatcttgcacaatacgataaccacaaagagtacaacacagagatgacacagtagtttatcccgtggttcggccaagtacaaaacttgcctactccacattgtggcgtcccaacggacgagagttgcactcaactcctctcaagtgatccaatgatcaacttgaataccacggtgttatgcttttcttttcttatcccgttcgcgaggaatctccacaacttggagcctctcgcccttacacttttgatgttcacaaagaatcacggagtaaagggggggatgagcaactcacacaagacacaaagatcacagcaaatacgcacacacaagacctagacttgagctcaaaaagactagcacactagaacagggctcaaatcactagaatgtcgaacaagtgcgcaagaatggagtgtgagtgatcaagagtgctcaaggaatgcttggtgttctcctccatgcgcctaggggtcccttttatagccccaaggcagctaggagccgttgagagcattccaggaaggcaattcttgccttctgtcgcctggcgcaccggactgtccggtgcagatttctttccttctgtggcgtagccgaccgttggcgcctgggagccgttggtgcaccggacactgtccggtgcacaccggacagtccggtgccccctcccgaccgttcgctcggccacgtgtctcgcgcagatcgcgcagccgaccgttggcccggccgaccgttggctcaccggacagtccggtgaattatagccgtacgccgttaatttattcccgagagcgccaagttcgcctgagcccgcctggcacaccggacactgtccggtgccccaccggacagtccggtgcacccagacagtgctggctttggctgaaacaaagctatctctctccaatttgttttctcctatttccagcacttttgacattatttgcactttgtccaccacattgcatagatcaacgcaaaagcacttgcgttggcagtcaatcaccaaaatacttagaaatggcccaagggcacatttctctttcaatctccccat

SEQ ID NO: 107700 - DNA, 447 bp, Zea mays
  Clone ID: MRT4577_29720C.1
cctgagctcgactctagaaaaatgatgtcgtaaaaaataatgatccacaaattaatatgaatgatccaaaataaagcgagtagtacatagttgatttgggtgatccaaaaataattcaagatccagaagtaatatagataatccaagtgatccatgaataacctaattgatccaataactcggatattttagaaataatctagcagattcatagcatttaaatttacgtgggtgcaatcctacgaggggtggaggttggttgaggtcttcatgtcttagagttcgtcgaagtagttcacgctgaggtgaggtggggcgagcctgcatccatgatcagtgccatcagggtgttgaaggcgatagccatagaattgtcatgaatcaatgtcgcacctcctacttggtgcgccagcagtcgatttttatgacccgactgtgcaccacaag

SEQ ID NO: 107701 - DNA, 308 bp, Zea mays
  Clone ID: MRT4577_29721C.1
ctcgtgacgaggcgcatccgtccatgggggccaaggcggcacaccggcgtgcggtgctggacctggaggcgcaattcaccttcttccgttctcatgaccgtcaccccgtgaacgcggcgcggaaattggtgctctacatgtgcatcctcttcaccaaccttttgttctttgctttactttcgatgaactgtgccatgacaatgctcgagttgaacaggtaatttgacgtcacatcagatgaaagattttacagctggagagaccttggtatttcccacaataggactgataaaattccatgacttttt

SEQ ID NO: 107702 - DNA, 276 bp, Zea mays
  Clone ID: MRT4577_29722C.1
atggctaatgagcaggagcgcatgagtaaggtacaatatgattcagtaattggatctaacatgtggggtgagatcaagatatgcaagatacatacggatttaaatgttgttgatcctttgacaaaacctcttccacaacctaaatatgaggcacacatcagatatacggacaaaggatcatgctatgcttacaagaattgcgatggagcagtcgtatatggttgtagaaacattggtgatgctcctagtgtgccacttcttcgccgcttggcatag

SEQ ID NO: 107703 - DNA, 492 bp, Zea mays
  Clone ID: MRT4577_29723C.1
aacagcaacagtagtactctggttacaccccctgtaggggtcaaccgccaaaaacaccgcggcttcagaccacccggggagagcaacaccagggcggggaaaaccacaaacctgcagaccaccgaaacccaaagcaaggggaagaccgaggggggggggacaacgatggaggggggacagaactacgcttggcccgcaacaagctggacgaagagggccgggggggctccaaacggggggaaggggagggcgctggactcctccacgctaataacgaagggcgccgcgagactcaaaacaatcccaaccgcgtccagtgaaactgcaccgagttcaaagaaattgcgagcaccacaaacctcagtatgggcaggaagagcaagctgcttcttcacaaactaacaaaccgtgggggggggaaacctcttgggcgcgcaggaaacaaatatcataggcattggttgcaggcggaggaaagaggcgcccttcctc

SEQ ID NO: 107704 - DNA, 431 bp, Zea mays
  Clone ID: MRT4577_29724C.1
gcgaaccattttctggagttcaacggctgcgagcgtggtagacggtttacggaagcaacggagcggagttgttggagccgtccaagcagccgaagggggggactttcttcttgatggtgacgctggagcggtatgctccgatgctgggtcatcatggacggggtgaccgctgatgaggcgcgcctctcggaggaggtcggcgcgggcgccgctatggcgctggagtgggtgcgcgccggcgttcgtgcgcacggcagcgtggggcgcatgttggacccggctctcatccggagcattaagggggcagtttccatgccggtcatgggcaaagcccgcatcgggcgctgctctgaggtatagatcttagagggcggggacgtggagttcatggacaagagtgtggaggtgaccccggttgaggacgcgcaaca

SEQ ID NO: 107705 - DNA, 757 bp, Zea mays
  Clone ID: MRT4577_29725C.1
attgggtcccgcgggcggccgggggctcaagacttctaattcctctaaattccaaaataacgatcccatacgtttttgtccctcgccgaatcccaacgcccgcaatgtccgctctcctgaccaacaagcctctcctcgggcccctcgtcggcctcaacgtctggactttcgccattgaagttctgttgtacaaacgcagaattcccgctctttcgaaatatggtgttacgttcgatccagcaactgtcaagaagcagaaagccgagaaattgccagctttcgtccaatggccggctgacaacttcaacaatctcttagaacaacccactcaattttatgccgtcgttctcggcttgagttttttggacgtcaaggacaagcgcacggttgggttggcgtgggcgtatgtaggtctgagagtggtacacagtcttatccacgtttctaccaacaaccctagcatccgcttcccagtctggcttgcaagctccttcgcagtagcaggacttacagctcaggcagcttggaagcttcttttctaaagggtcaattaagtctacgtttaagtcgtaaatacataaaggtattatcaagttttttcttaaccgagtgtgccggctaggcgagcgcgccacctcaacaagctgttgggcctacaaactgcaacagttcaataccacaccgctgtactgtagcttgcaatacagaatgttaattgctggaaaaaaaaaaaaaaaaaggcccctacgagctccag

SEQ ID NO: 107706 - DNA, 473 bp, Zea mays
  Clone ID: MRT4577_29726C.1
ttggcttggaacctttgggctgatttatgtgcttgggttagaggtcgcctattccggagattcgacgtggccacgagcatgattgggtgcggatggaacctggcttcttggacccctaagggttgttgggggtgtattggatattgtgtgacgcgtggcgtctccttggttgtcggatttcattcttggtcgaattgaccttagggccggtaggttgccaagtagaaaagacaatctcctttgacgtttttgttggtgctcttggatccttcaatgctgttgctcgttgttatgccttggtctgggaaactccaatttgacctttccctgggcgatgtgtgcgactgtgtcactcgttgggccctttttgctttccaagactggtccatttacgcgtaagcgttgcctatacggaattccctcgtctcctggttcctaaagcctctacccgaacacctgtcatcattattaag

SEQ ID NO: 107707 - DNA, 2330 bp, Zea mays
  Clone ID: MRT4577_29727C.1
tggtaagacactcaactacacctacatatgtaacatatccaaatggcaccccgaaaagcctatctgcagaaatggcagaacatgccggtccagaagactttgcagtagagagtgagagttcatatgccactgaggacgatgaattcaacaatgtgactggacttgattctcctgttaccagagtttgggaaagcaaaagtaaaggaaatgctaccttatcacatatacatcacccactcgaatctcctggtttccatagagcaaagaagaacagaagtcatgtgggaaaactgaagatgtcaagaacttcttcaggaagaaaaaggtcaaggtcaaatgctcagaagcctcctatctggcaagaagtggagagatcctctttctctgttggtgatagtatggacatactaaatacatctgcaaatgatctaaagacgcatgagctagacgaggatcctgaggtggaaagtatggctaggatgtttagtagttcaaatacttcatctttattgttgccatcaagtgactctgcatattcttcaaattattgtggtgccaatgtgctacaagactcttatttgaagttaagatgcgaggtggtaggagctagcattgtcaaaagcgggtctggcatgtttgctgtgtattctatttccgtgaccgacgccaatggtaatagttggtccattaagaggaggtttcgtcattttgaagacctgcatcggcgtctaaaagagtatgctcagtacaatcttcatttacctccaaaacatttcctctcatcaggtttagaggtttctgttgttcgagagagatgcaagctgctcgacatatatctgaagaaccttctgcaaattcctattgtttcaagctgcatagaagtctgggattttctgagtgtggattcacagacatatattttcacggacactctctcagtcatccaaacattgtcagtcagtttagatgaaagatcaaatgggaaaaatataaaagcattgaactcttctggagctttgaacggaaattctatctctggaggtcaatctttgcatggacatatagacgacaccgtacataaggattcagacatcgcttgtgatggtttgagatttaggaaagggaatgtgaacaagaacttgggaaacggtgttagccacacaacagatagtgttagcaacacaactgccaatcattatcaggacaattctggaagtgatccagagcagaatgatcattccttttcaatagattcattaaatcctaagaagttgcgttcaactgaaaccaatgacacatctcaaattccagagtctggaggattttcagtatctcctaatgattggatggccccgaatcttagtgttcccttgtttcatcttgttgatgtggtctttcagctccaagatggaggctggataaggcgtcaagcattttgggtagcaaagcaaatactgcaattgggaatgggagacacgtttgatgactggcttgttgacaaaatccaattacttaggaaagggaggataattgcttttgctgttaagcgcattgaacaaattctctggcctgatggaattttcatgacaaaacatccaaagagaaattcgcctccacctcctcctggtgctcagagcaatggcatgggaaactatctaagcgatgaacaacggatagaagctgctcatcgtgcaaattttgtccgtgaactgataatagataaagccccatctccactagtgagtcttgttggtcgaaaggattatgaaagatgtgctcatgatatctatttctttcttcagtccccggtttgtttgaagcagttagcgttcgaactccttgagctgcttgttctttcttcatttccggagttggatggcactgtgaggaagtggcacgaagataaagagcaattctgcgcccagtaatgtttatcaaacgtttgaatttgtcacggggcggtgtttgtttccaacacatatcgtctttccagagtggtgtggcctgtgaattctgcgaaaataaggtggtggcttcagaggagtgcccgtggatatctcagtttgaagtgggtggtggctttgtgcagtgtgaatatggttagatagtgcgaggatatggtccctttttccaccgggccatggcagaacggtttttgtgcccgatagagttcatttttccccctccagatttggtatacgtaatgctgctgcctgaaaggaaagagatggtggcgcatttttttttgcacccgttttggtggtacactggtacccgtcttgtgtaaatctgcatagagataaatgaagtttcgaggtggtcaatgaatg

SEQ ID NO: 107708 - DNA, 448 bp, Zea mays
  unsure (1)..(448): unsure at all n locations
  Clone ID: MRT4577_29728C.1
gccttcgattacaacaccctgatgcgcggccacgtcagcggcggcgggggcgaccgcgatccggcggccgcgctgcgcctgtacattgacgggctggaggcgggcgtcagccctgacagctacacgttcccgttcgtgctcaaggcgtgcgcgcagttggcggcattgcaagangggaggcagttgcaggcgcacatcgtgaagctcgggttccagcacgacgagcacgtgcagaacagcctgatcagcttctacggcaagtgcggcgcgccggcgatggctcgtctggcgtttgaccgggtggaggccgaggagcgaacgacggtttcctggagcgcactcctcgcggcgtacacgaaggcagggctgtggggcgaatgtctcgcgtcgttcggctcgatgatgctcgatgggtggaggcccgacgagagctccatggtcagcgcgc

SEQ ID NO: 107709 - DNA, 642 bp, Zea mays
  unsure (1)..(642): unsure at all n locations
  Clone ID: MRT4577_29729C.1
ctcaagcgtgcgcgcagctcgcggccttgcaagaagggagacagttgcaggcgcacatcgtgaagctcgggttccagcacgacgaacacgtgcagaacagcctgatcagcttctacggcaagtgcgtcgagccggcgatggctcgtctggcgtttgaccgggtggaggcggaggagcgaacggcggcttcctggagcgcactcctcgcggcgtacacgaaagccgggctgtggggcgaatgcctcgagtcgttcggcgcgatggtgctcgatgggtggcgtcccgacgagagctccacggtcagcgcgctctcggcgtgcgcgcacctgggtgccttcgacgtcgggcggagtctccactgcgcgttgctgaggaacaccgcgaggctgaacaccatcatgcagacgtccctggtggacatgtacgccaagtgcggcagcatcgagaaggccgcggcggtgttcgacgcgatggacgacaagaacgcgtggacgtacagcgccatgctgtccggcttggcgctgcacggggacgggcggaaggcccttgcagtgttcgacgcgatggtccgggagcgccacgcgcccgacgcagccacgtacgtncggcgtgctgaacgcctgcagccgcgccgggctgctc

SEQ ID NO: 107710 - DNA, 260 bp, Zea mays
  Clone ID: MRT4577_2972C.1
attattgggttatggtttttattcttttttttccttttttttttggaaggagtaaattttacaaaaactgcttggtaaaataaggcttgggcagaccatgaagaaggggggacggaccaggattgagttgttataaaaactctaacagggcacgatttcaagaacacgaagacaaaaaccctggggtataaaatggggggaaaaaggggtttgaacaagttatgctgcgaggggttagagaattacaaggggaaagacgg

SEQ ID NO: 107711 - DNA, 357 bp, Zea mays
  Clone ID: MRT4577_29730C.1
gccacgcgtccgaccacgcgtccattgacgcgtggtcaccgagtaacacacctgcctcagcatacctaacggccgctccgagctcgccggctaagaggtctcttgggggcttgcacgcttcgccggcatgtaacaggacaacgggcttgtgccgatcgtggagccgcagatcctgctggacggcgagcaccgcatgaatcgcacgcttgaagtggctcagaatgcgttggcctaaaccttctacgccatggcggagaacaacgtactgtacgaaggcatactgctgaagccgagcatggtgacgcccggcgcggaggccaatgacagggccaccccggagcaggtggccgcgtacac

SEQ ID NO: 107712 - DNA, 320 bp, Zea mays
  unsure (1)..(320): unsure at all n locations
  Clone ID: MRT4577_29731C.1
taggaggggccgctgggnttnctgtcaaaagcannagttggaccaaagnnggcaacaannttgttgnntagttgtaagaagggggttgcggnnggttagccgcnaaactggctggtagaaaaggcagcaannctgttgctgtgtcaagaaagggaagnncacggtttgctgcnnagctagctnnggctaaatggtagnntagtatttggctggctgnncaaataagcanngcggggttcaagtggcggcccccacgcgnntccgcggacgcgtnggggcggacgccgtggggccggacgccgtggggcgggacgccgtgg

SEQ ID NO: 107713 - DNA, 246 bp, Zea mays
  Clone ID: MRT4577_29732C.1
aaaaaggtttcacaaacatccagttaacagggtactccatctaaatatcgcccacgctaactagttatcacacgaaagggtgttgaagagccatctgaggttaagttcttccaggacgcatgcaacgatgggccccaaaacctcttgatcttctccttgatttggacagaggaacccttcttatttaccgactcttttgtcaaggccgtgcttcaccacattgagggcaaaccatacccttgccat

SEQ ID NO: 107714 - DNA, 397 bp, Zea mays
  unsure (1)..(397): unsure at all n locations
  Clone ID: MRT4577_29733C.1
ggcgtgagcgcgtcggtgctcggtgcgttcggcgggtcgtcggcggtggtggggattctggccacgttcgtgactccatatcttgtcaaggagctgggcattctcaaggccggagcggcagggctggtcccgcagagcgcgctcctcggcgcggcagtcgtggtcttcgtcactggccccgtctcacggcggcgctctcttcgcctttcttggcttcatcgtaaggccacccgccacccacagacactccctnctattctcgtcacggcgtggactgagcagctacgtacgagctgagctcgatcggaggacgtcaacgtcatgatgtgcctggtatgcatgcaacaatgcaggtggcttcccggctggggcacatggcgtacagcgtcatcggact

SEQ ID NO: 107715 - DNA, 273 bp, Zea mays
  Clone ID: MRT4577_29734C.1
ccgctcgagagctagcctcacgagccctatctatccttttctcggcacctcgcgggtctcccgtccgccacgtcccgcattcgtaccctctcctcactctcgccgccgccgcttcccctgcgcaccgagccaagatgaatgtcgagaagctcaagaagatggcacgtgctgtgcgcactgggaggaagggtagcatgcgcaggaagatgaaggcagtccacaagactacgaccacagatgataagaggcttcagagcaccctgagaagaatag

SEQ ID NO: 107716 - DNA, 355 bp, Zea mays
  Clone ID: MRT4577_29735C.1
ccggatcccaaaatctcaaaccgtcaaacgggacccgacacctgagatacgcgcatggcgtcgccgcgccgcattccctctgtgcctgccagatccggcaacaaagagaatatatctcaagatggagatgctcccttggattttgcaaccttgcctaaagaagggcctgccactacaaggcggaagaagaagcttgcaggtttcaacttgaggaaaagcattgcctggaatcctgcttttttaactgaaaaaggtgttttggataactcggagctttctgtgcttactggcttccaaccgatggcaaataggagccttggctcaagcatcaggagtataatgtccccatcctgtc

SEQ ID NO: 107717 - DNA, 487 bp, Zea mays
  Clone ID: MRT4577_29736C.1
gccgggtcgggatctgaacttctgagaggaaggaacccgatctccaccacggctccacgagcccaaccggctagcttcttcttcgtccgctgttacccacaccgcgggaagcctccatgcgatcccctgggcggcgcctacggctaccagcgccgtcgcggctcgtcgcggctgccctcctcctcgcagctctcaccgggggagccgtcggcgccgatgggtacgggcgggcgaggagggtgtacatgaagaacaaggtcctggagatgttttaccatgcctttgacaactacatgacttatgcattccctcatgatgaattgaagcctcttactaaaagtttcacggactcgcttagtgagcttggaaatttaaatcttgaacacttgccacaggattatagtggatccgcgttgacactggttgacgcaatatcaagcgatgttggcgtaggtaacctcccagagtttgagaaggcgttctatgg

SEQ ID NO: 107718 - DNA, 520 bp, Zea mays
  Clone ID: MRT4577_29737C.1
tttttttttttttttttttaccccattgcaggaggattgggtcctgtgcagggtgttctacaagagccgaactgccagcacaagaccagcagcaggccccgacgaggccgggccgctgtccagccagctgatcggcggcctgccgatgccgcgaatggccgcccctgctgacgccgcctacctgtccttcgacgtcacacctgccgctggcggctactaccaccaccaagactccggccccgcggacgcgcgccaccacctgccgccgccgccggcgcagcctttcagcaggagtagcctgtccagcttgcgggacttgctcagcagcatggttgaaggcagcgacgccgccgccgccgttcgggagacggagctccacctgcagctggagggctggaccgaggcggcctacgcgcagcagcagggcggcgccatgccggcgcacccgcagcagacgtggagcccgtttctgagctcgggatgacggcacgcggctgggggctcacgtgtgcgtggcgcc

SEQ ID NO: 107719 - DNA, 470 bp, Zea mays
  Clone ID: MRT4577_29738C.1
acaaaaagtacatgaaccttattaatattggtagcttaaatcgataccttatgttctcttggtgtgtgtggtgtgtcaatgtttttaaggttctcttggtgcgtgtgtgagtgtcaaagcttataacgagtcgccaaggttttcaaaaatgataggcgccttgctcgcctatgcgtccaatcgataggccaacgactgatctcgacttatgcttaaccaaccatggtccgagtatactaccttgctactatggactctttgccctgctgggcttggagtaaaagaaactcggacccgctctccattgggccattgctctagacgatacgagctaacggcccccgccttgcaacgtcatatttcttccatcgggtgccctgaatacaactcactggccctttatttatgacagcgtcacagggacaaccctgtcgagatctaacttatactctttgcccaagatccccgtt

SEQ ID NO: 107720 - DNA, 789 bp, Zea mays
  Clone ID: MRT4577_29739C.1
actacgtgctactgctctctcccagccgaaaggttctagacgctgactccattcacctactttgatgtccgtgatctcttcccatctgcatcaagggtttccttctccacctctgtggaacgctctagagaacaggggatggcggcggcggtcgagatggataggatctcataccagccacgaaagacggccgcatagcctcctccgcggacggagccggagcgcgagacgacgacggcggcgcccgtccccacgagcatgcagatcccgaggccatagcggcgcgcgacatccccactgcttgggaccttgagcacgggcgggcgcatggccaccgcgggctccatgccccagcgtggcatcgtgctctactgcctcctcgccctcttgtcgctgctgttcctcgcttccggtgagttcgtcttcgaggagcgcttcgatgatgtgtcctgcaggcgctcaacaggaagaaccacaagccgctcttcgaggaactgctcaaggtcaaagaaggggatgacccagaggacatgcatccctgaaggctggacattcagcatgctgccatgcaagacactagacgatgaggccaccaccaaggagaatttcgttgctatcgggactatccatacgaaggtgatcagactctggaattagaattttggaaaaaccttatggtccattatattttttgtctgagccatactggtgggttagatggaatctactaagacatgattttgactcgcatccaccaactaatttactaagaaatgagattcttcaatc

SEQ ID NO: 107721 - DNA, 361 bp, Zea mays
  Clone ID: MRT4577_2973C.1
accgttccgaggatactcccaatccaagcaactagacatccctgcacatgcacgctccttcataaccccaaggcgctactcaccgtccagagaatgaccaagaccaccgccgccacagcccacccatctcacaaccacagcgccgactcatccaacgactccacctcctccaacgcactcgcagcctccgccgccttcccccgagcccaagcagcgatcgccgaccgcaccgtctagacagacaccgacacaccagatcttgacgacaactagcgacagaggcgacaagaaaacgaaaaggggcaaaaggatcaaccattcataagctaaagcgaggccacgcaacaaaaacaacaaaact

SEQ ID NO: 107722 - DNA, 568 bp, Zea mays
  unsure (1)..(568): unsure at all n locations
  Clone ID: MRT4577_29740C.1
ggctctctctttctcactcgtcacaagctctctttcatcgcatccacaccattccacttccaccccacgaggatccagcctgcctgtccctctcgccgcacgccacgaccgtagtcgctcgccggcgtgtctagcctagccggggcctgggcctccgcgctcgtgctcccgggaaacaacgaccgacgcgtcctcatagtcatagaggcagcgctaggcagccacgcattcgtcgctcgctcgaccggcgatggcgagaggtggcacggcgggcgcgggcgcgggcggggaggggagggcggcgagcgaggcgctgacggcggactcagccgacgaggaggggcgccgcgggagcagctccagcgccagctccgacgccgcctccagcttctcctgcacgtactccccggccccgcccgacgagtggcacaaggtggccatcatcaagacctgcatggggtggttcggcnnacntnnncggcgggngcggcggcnnggaccagaagccgcgcggcgtcgtcgacgcggccgacaggcacggaggagcctcanagatggagatgatgaa

SEQ ID NO: 107723 - DNA, 430 bp, Zea mays
  Clone ID: MRT4577_29741C.1
gatgcggacgccgcggtccgtccgaattccggtcgcccacgcgtcgatggtttttcctttggactctgggagagggcccgccttcgcgggaggcgggaatgttcgcacgacttcccctggcaccaacgctctctgcctgaactctaacggagggaactgaagaaatttcttgagaccgttccaaccggtgaattgcccaagcgaccagctgtctctttgtggaccccttttaagctgtaaaccgtttgccatccctaacaagtctatgaaccaatgaattgggaatggtccacatgctgaagccctaactgaaatgttttacggtctgttagggaagtgtgaaatatgtcttcacagtcaaaataaggctttttgaggaaagctttgcctgaaaagctcaaccctttgtatgaggagtctacaacctggc

SEQ ID NO: 107724 - DNA, 249 bp, Zea mays
  Clone ID: MRT4577_29742C.1
ctccaacctctttaattattttaaaccaaactaaaatttactactcccatctcacaatactttttatcatataacaactaaccaacctatccatttcaacacatttttaattaatcaacatctcaaacccttcaaaaaaataaaaacttattactaataaaatcataaaatacataacttctattatcaaatattaaaaactgatcaaaaaacacataacactgctacaataaactccaatggaagtgt

SEQ ID NO: 107725 - DNA, 355 bp, Zea mays
  Clone ID: MRT4577_29743C.1
cccacgcatccgcaagatcctccaaccttttattcccgaacaaagctacaaccagaaaggagggttttaaaaacagccggcgcggcaaaagaacgccagcgaacaaacccaacaaggatcaccagatcaaccaccttaacagcacccacctactcaccattccagacttctacaccagtgcctacgcaaagacctacatccataacgatcattctaaagactatactcaccaaagcaacatgctaccactaaacggccaagctcacccagacaactatcggacatccgagacggaaccaatgctcgctcaaaccatttcggaatcatgaatatacatgatttttacagacattaa

SEQ ID NO: 107726 - DNA, 423 bp, Zea mays
  unsure (1)..(423): unsure at all n locations
  Clone ID: MRT4577_29744C.1
ttttnttttcaccactcaaattgaaagtgcgttgcctgcgtcaagcttatccatacaactccttggtttcctctgcttatcacagatctccgacttcgccacgacggctaactgctttattgaaaatcgcactagtngaaaaaggtgctagttgctaatgcgcttcgtttccttgctgctgttggtttaacatcccatccagcttcatctctcctgtttgcgtccagactttttccctgttgaacctgccgctctgttgctgcgctttttttctgcgtgctgatcttgtggctctttcaccttgcccattcccttgttcgtttccgttttcccgtcntgctcgtcttcgctcggtggggtntctcccttttctgttgtgtctttcggtgcctggttctccccgttgccggtggcgcgtttttt

SEQ ID NO: 107727 - DNA, 538 bp, Zea mays
  Clone ID: MRT4577_29745C.1
gactctcttttttttttttttttgtttttttcctcgttgtttttcttttttttcttcttttttttttttttttttttttttttgttttgttctttgttgttttcttagcaggcacaaaaaacttctaccatggaaccaacccgaaggagcccctagaaagggggccccccccagggggggggggggcaaaaaccccgcggggggttgcaaacaaaggggggctcaggggacaacagcgggggctggcaaaaggggcccccgctgtgggccacgggggcgggtaaaagcaacaacaagggggggggccaaaaaacccacagggggccccaaacattggcggcttaaaaggacaacagggggggctggcacccggccgggggggcctgacgaaggctaccacccataagcagggggccaccatcgggggggccccccccgggaccaagtagggggatactggaaaataaaggtctcgggggaaatgtgcaaccgctcaccaatcccccaataaaaatcccgggtttaagatagggaaaac

SEQ ID NO: 107728 - DNA, 369 bp, Zea mays
  Clone ID: MRT4577_29746C.1
cattcgccttctacccctggaagcaatggcttgcctgagccagggccagcgcatcagctgcacagctggatcggcgatacagatgccggacatgcgcgctgctgagctacgacatcagcgttgcgccgcagacggcggacaggctgggcataaggatcgtcttggccgctctcagcaagaccgacgagtacacctggagcgacagggagaccaacgcgcaagagccatgcatttttgaggaggagaggcatgctatcttcgaatgtggtaggcatgggaacactaccattgaggtcttagagaataagatgagcgcactggagacagcacaggacagagtggttgttgcgaaagggatggatgcacatg

SEQ ID NO: 107729 - DNA, 367 bp, Zea mays
  Clone ID: MRT4577_29747C.1
gagtacgtgaagcgcaattattagcgtcgggggaggaacatggggacgccgaagactgcatgggagccatgcccgaaccggatcctggacgacgtcaagctgcgacgttcggaatgagctcgcacgctatgatacgcctttcacttgatcaagggcatctacaactgcaacaactggatacgcatgttcatgggctcgcaggccgagcccatgaacaacgccagcgtaaagggcatcttcaacgagtgcggcagcctattatcaacattaactgctgcatagtctacgcgcgccagaaggaggatacatggaactacattatcgcaggcgcattcacgggtgggtgaatctatatgcaccagggcat

SEQ ID NO: 107730 - DNA, 1215 bp, Zea mays
  Clone ID: MRT4577_29748C.1
ccaccgtatacataatcgaagatatcatgagaaatgattttgttttatttatgttctccatttgtacacttttttttgtttcgtcgctgtaaaagtgtgtccaattttagtaccctgtctctgatatatatgaactatttcatccattcatcaattcagagatccaacacttggacaccgacattcgcattcctaggaacatcgaccgggggggagtaaggaaagctgtgctggtgtaggaagcaaaaaaaatcagatccgttctagctctgttcatttttattattattttttctgttgggaacttcatgtgtatatatatataatatatataatagttcatcaggagccacaggccaagcggcgagacgaggcggtcgagctcccgcccgtgttcacggatctcctgcgacgccatgcgaggggcaaggttgtggagtgggcgccgcgggagaaagtgctcgcgcaccctgctgtcggctgcttcctgacgcattgcgggtggaactcgacgctggagggcgtccgccatggcgtgcctttgctttgctggccctacttcggcgatcagttgaagaataccatgtttaccactcgttgtatgatgattatgtctgggtggagaggtttggagaccccttgctccacaggcatgttgcagtggctagcgtttgggtctgattgcactgaaacttgctgacgacgagatcatacccttcaattatgtctcttatgcctccaactggaggagtgcacaaaagatatcgtagataaatgtaaaggatctcctgtcaatttctctcctttgcagaactccatcaagcagctcgagagtgctgcctccaaaatttacaaagagaagaagttgctgcaagcagaaaactggagcctaaagacaagtaagcatacactgaaagtcagggagataaacgaccggttgatgatggccaagcgagcgttcaccaaccgagaaggaatggtcgggagaccatggtacaagcatatggagtccagtgaagctggagaaccactcgttccggctgcccgagtcgatgccccctgaaagggaattaggcttacacctagtccctaattaattttggtggttgaatcacccaacacaaataattggactaactagtttgcccaagtgtatagattatacaggtgtaaaaggttcacaatcagccaataaaaagaccaagttttggattc

SEQ ID NO: 107731 - DNA, 864 bp, Zea mays
  Clone ID: MRT4577_29749C.1
gactctcctctctttccgctccatccgaccacccccgcgagcttcgacagttcgacacacgcggccgccccttcccggctccagccacaccccccggaggcggcgatgcagatggcagcggcagttgcccccaccgacgccccggcctcggcgtctgcggcggcggcgccctcccgcccccacgcgcacgccgcggcagcggtggcggccgcgtcgcctcacccgcacgcactgcatccgcatcaccatatgccgcaaccgcggtgggtggtcatcccataccctcctccacaccatcccatggtggccgcgccgccgccaccttctctgcagtttgtgaagcattttacgccgccgtcctcggtaacaccgccgccgccgactggatccggcgggaacgggggcgaggataaccggaccatctgggtgggcgacctgcagtactggatggacgaaaactatcttcacagctgcttcggctctagcggcgaggttccttctctctcacagagcctgctcctcctctgatccagcattatccgtactggatctctcgaatccagctaggtttattccatggcttagtgttgattcgtctatactgtgctgtaacaggcttagtggcgtagttttgcggcaaatcctggtttggtaacgaaaaaggaatatgtgatattattctgttgaattgtgttggtaaggtagcaacgtagtcacattctcagttaaggctactgtatttgatctaaatggattatcactttaatatattgttcacgaatggctgtgtttcttgaaaaaattggtctacactaactatcttttattcattccttactggatgccaattgcttattatctgct

SEQ ID NO: 107732 - DNA, 390 bp, Zea mays
  unsure (1)..(390): unsure at all n locations
  Clone ID: MRT4577_2974C.1
naatacactacagtactacatggcgaatcatttttttcatggcatggcggcacttgcggtggaagtgcttgtggtgctgggggggactgcttcccaaaccgcgtctgtggctttttgcaacgcctggcaactggcggcttgcgcgccggcgatcactgtccgcgcgacccccttcgggttgtgctgcttcaacctcaaggcgcaacaagggtgcttctgccaatttgtgaagaaccccaactacgggcgctacattaacaaccccaacgcgcgcaaagtcgtctcctttctgcggcgttttcctgccgcgctggtagtactagtacttgtgggcaatgtgcatgcatgttcgtgcgcacgtgggctgatctttctgcttgtttcctgcct

SEQ ID NO: 107733 - DNA, 1460 bp, Zea mays
  Clone ID: MRT4577_29750C.1
tccttttcttccccggcttcgtttcgtgctttcctcaacctcccctcttccgtgccgcgcagtttatccgctgcttcacggaaatccttacggggctgcatatattatattccctgcgttccaggcggccccggctcttgctgtctcctcccacaccccgccagcctcccggcgtcccaatcccaggaacttccgtcgcgtcaggaaaagggcgcatggcacactgaagggctattagggacatgagagttgagacatgcttccttcgctgaaccttacttgatagcatctgatgcgcgcaggtgatgctttcagcaactacaggtgtaggacaatgtcgatgaactatgatggggataggagtgaggaccgccaaagcgaggaggtccagtcagcatacaaaagggacagtgacgttggtgaggaaatgataataagtagcgaatattttaatgatgagaatgaatggagctgggtgaaccaagatagaaatggtgatccttttgctgaatcggtttcctcacttcatacgacacagcaaatcctcgaaaatgagatacgaaaattatcagaacttggcaaagaacttgaggcggaggaatccacttccggtaacaaagaccaagatgtgatccttttgccgtatagtgaggccgatgtgttggaactgagtgagaagatggaacatcttgaacagaaagtgaaagaagcatcaaacaccatcagagagaaagacctgatgctttccaagcttcaaatactcatcggtactgcagacagggcagcgctggaggaggagttggaggaggcagcagctagcatcgaccagttggagacagagctggagcgccatctccaggagaaactagaggctgaaattcagtgtctgttgatgttgaaagcgaggcagaattggcaggtccgagcggtggaccaggtggccttggaggagcacagggcgctgtctgccggggacaagaccagaatgctgctcaagctacgagagacggagagcaagatcgtgatgctgaaagagcaggtggacaagctggaggtccgggagaaggagctcaaccggacgaccgaggtcctgaagatgcagagcaggaccttcagagcgtccctctttggcctcgtccagctggtaatgctatgcctgtccctgaaggtgttcttcgcgcgggtctcggccccatttgacgaggttgtgccgacatgatgccgtcagctggtgctctcttctgcctgtaaattagctcgccgggattgcgatgccttaacgcgtgtccggctgtcttactgtagctgtagccagtaggtagcacagtttcgttacactgatgcagtgtaggctgtggtgaatgacgtcagaaactacgcgtgttctgttaaaaaaaattactgcaggtctgtgcataaattgggttggattggctaaaaaaaaaaaaaaaaaagcggcc

SEQ ID NO: 107734 - DNA, 462 bp, Zea mays
  Clone ID: MRT4577_29751C.1
gagcattattaccaaaaggggggaaaggcaagatttaaaaagggcgccttttttttttcaaaaaaaattggaaggggaatccggaacaaccaaggggggggaaaaaaaaaaatacaaacaaacaggtactacgctaaaaacgggtttggggagagcagccccaaaattaggaaaaaggtttggccgccggtaaaaaccggtaaaaaattggggtggggtcccgggactccacggtaccaccaccatttaaaaccatttaaaggttggggggggcgggggaaaaaccgccggaagggtaaccgccaggggggccccccgaccggtggtacacgggcgaaacgaagggggggaaaaagggccccacctccttgagcttttcctcgaaaacccccttttcggccgactggttgttgtccaaccactccaaggcctccttggggggctcctccaactttttttttt

SEQ ID NO: 107735 - DNA, 1535 bp, Zea mays
  Clone ID: MRT4577_29752C.1
gccggccgcttcccggctctccacgctgcggctcttgcccgattgggcggtctcccccgccgcgctgctcacggtctgccctgcactcgccggtctgacgtcgctccacctcaccgctgtccgccccctatctttccgctggctcaagctgttgccgcgcctcaagtcgttcgccctcgtcaactccgccgccaccgttgactccgcgggctcgagctcggatgacgccgacggcgaggccgaggacgtcgcagggacattgccgctggagaagctgtcactttgcggcatccgctccggcgaccgcgggcttgggtggctgtggcggcggtgcgggagcctcaagtggttgcagctgcgcgcctgcgacggtaccggggacgggcccgcgtcgctggccttcgcgggttgccttgctggcttgctcgcgcttgagcttcgtgcttgccgtgctgtcgccgaccgtgtactcctccttgcagccgaccattgccgcacgctaacgtccctcctggtctatgacggcggcggcagcgaggcccttcaccggttcatccagcagcgtgctgctggtctgcacaccttggaccttcgcctcccgcttgacctgcacaacgatcatctcctcgccattggagctgactcagttcacaatgctacacatggcctagcttcacttcgcctccagagctgcgtccttatcacaggggacggcctccggtccctggcacgcacagccgccggagccggcatagaagagctcgccttggtgagttgcgacgtggtggagcgggagcccgggttgctgacattcctcagtcagagcatgccgcggctccgtcgacttaacctgtcttacaatgagacactgaacgacaaggtgatcggcgccatgctttcatcctgccggaatctcatcgacatcaggctcagggggtgccggggcctgacgggaggctcgctcctctcgctgcttaggcactgtgggcagtcactggagatccttgacatctcccgctgtccgggcattgctgtaggtaacgttgagctctttgcccagcgcgccgctaggttgaatcatgtgatcatcgaggagagcgcgatgtcggaggaattgaaggcaatcgctcagaagaaaggcatgaaggttggctcattgccgtgcgaaggaggaccattctgaagtaaggttgtatctccttcagaatgcagttccatgttctgtgcaactcgatttgtgaatgtaaccttcactggaatgttaataaagtattgctgcttagtacttgtgtatgcagctttgtatctgccttgtaagcttattatgactagcctcttggtgcctgcttgacatgtaaattgagcgccaaaggtgtgctgtactgctgttgtatatgttcaacaattgccatggaataatacagaaaattcaaaccaagagaaaaatgagccaaccggccctttgattttgggaaaaaaaaaaaaaaaaaaaaaaaaaaaaaaaaaaaaaagggcggcggctcgcgatctagaac

SEQ ID NO: 107736 - DNA, 852 bp, Zea mays
  unsure (1)..(852): unsure at all n locations
  Clone ID: MRT4577_29753C.1
gtttatgccaagtgatattttggttgtggagtttggcaaggttcagtgtccttgggcagggcatgcaaacctgcgtggagctgaagacaggccacgtatgattggtccatgcgttgctggcaccttggagtctctcttcctcatgctgtgagtgacacagctcttgagttcaagtcgatatacatcctctccccagccaatagctggggggtgcccttgtgcttagcgctccaacactcagtctggtgaccacgctcacccaactgctcacctcaccgtggccgagacgcttggagcaattgcatccccgggtggtcagaacagtgccacgctgccgcagaacagagtcgtggacagctccaccgctggctttccaatccatgttgatctcgaatgatcttgtgcgagcactgaaggtgtgaacacctagaagaagtggtgtttgaaggagtctactccagtgcctgctcatcaagtggatggagctatctaactaaaggttgggtagaaggatctagaacctcttctctgcaacaaaggcaagccccggtgcatttgccccttccttgtatttttaaaaagacttttatacacttaagtctagtgaaatgggcattaagtttataggaattgcttagaaactatttgatgcattggctactttgatatccatacctttatagatacttctgatgaagtatcaaaatatgatttacaaaaatgcttagccctgcttagatcttgtggatagaggttgtcttttgcattaatgcctagctcangggttatcttgaggaaggatgacttctacctgcaagaatattttcattgggagcatggtgggatcttact

SEQ ID NO: 107737 - DNA, 363 bp, Zea mays
  Clone ID: MRT4577_29754C.1
ggaatgtgccaagctcgtcctgaatcacctttgtatctccattgcaatttgtaactggaaccctgcctagcacagctgctttcttttgcaagcgaataagaccgtctgaattgctgaaaaaaaacaaaaccttgacatagaacgcccaacctacaccaacactaaacaggctggtgtaccagggcatcatatccctgactgcctccctgaggtgcgatggtgctcttaacgtggatgcgaacagagttccacaccaacttggtgccctacccgaggatccacttcatgctttactcccatgctctagacatctctgctgaaaacgcctaccacgagcagctgtatttggccgagatcaccaac

SEQ ID NO: 107738 - DNA, 285 bp, Zea mays
  Clone ID: MRT4577_29755C.1
tcgacaccagcaccttgccggccacactggtctttctcacgagccacagcacacaggcacaggcaagctgtagagcttagtgcaatcatagcatgggatggcgtcgccgttcgccggggcaactggacagacagtgacggcctcggcggctaagaagcggtccgtctgcgtcacgtacgtcgagggcatgaacgcctacagctgcttcaggtgcttatctaggcgaacatgctcggggtgcgcatgaccgctgactactccttcgtcatggtcgtggcgtcgctc

SEQ ID NO: 107739 - DNA, 300 bp, Zea mays
  Clone ID: MRT4577_29756C.1
ggactatgttgtcgatccagacttgtgaatcacatggcgctgttctccagcctgcggtacaatttccatgccagcatactctaggagtgacaatacatgctttactcgcaatggctctatgcgagataggcacacactgaactctttacttagatgtggatgcttgaagagattacgttgttcaatagttgctaggtatagaggctctcggacagtggacgaatgcagtcgagtgacaagcctggtaatcctcctgcagaagcagttgttcacagggtctggatctctgtgcctctatac

SEQ ID NO: 107740 - DNA, 673 bp, Zea mays
  unsure (1)..(673): unsure at all n locations
  Clone ID: MRT4577_29757C.1
gccggccgggtcggagaaaaataagatcagttagcttgtctttatttcttcctccgatcactgattatacacacgcacttgatgaggttagatcgctagttaagcaagaaattagaggaggagagaggggtagccatggaagagcagcagccccgcccccgcccaagcatcatgttcgtcctgtcgtcgctcgccaagaataacccagagtccgtgctggcgctcatcgcggtgctcaccgtcgtcgccctgcgccacttgatctcctcatggcggcagcaggcccggctgcccccgtcaccgacgagcctcccggtgatcggccacctgcacctgctccgcccgcgggtgcaccgcaccttccaggagctggcgtcccggatcggtccgctgatgcacatccgcctcggctccacgcactgcgtggttgtcagcacccccggaggtggccagcgagctcatccgcggccacgagggcagcatctcggagcggcggcttcacggcggtggcccgccagttcgcgtacgactcggccggcttcgccttcgcgccctataacacgcactggcgcttcatgaagcgcccctggcatgtcngnagctgctcggcccgcgcactgtcgagcagctgcgccccgtccgccgcgccgggcaccgtgtccctgctcgccga

SEQ ID NO: 107741 - DNA, 484 bp, Zea mays
  unsure (1)..(484): unsure at all n locations
  Clone ID: MRT4577_29758C.1
ccaggacagcaaagaaaacgccagcgtcgactacgtcggcggcggcgacgataccggcncggtaccggcacctgctcagcaaggacccagcgaggcgaaggggaaagcgaaatcgaagcagcatacggcggagatggaggagaggcagcccgtggacgccagagtgactgtggagtacgaccaccgaggcgtctgttgggtctacttgagccttatgccttctcttgcttttattagctacaactcatttgctatctgatttctagttttttattttttactcttctttactcttttattttttattgttttgttaatattttatttactttatattatatttcacnctgtttttttttttttatttataagcccaannaaaaatggttattttcaattttttataacaaccaatttttaaattaattttttttattatatttttatttatatatatatttttttttttattttattttatttt

SEQ ID NO: 107742 - DNA, 239 bp, Zea mays
  Clone ID: MRT4577_29759C.1
atgggctactccgcccacgtcaggtatagatgtgagcatcccgggtcactggatcctgctgctgtaatgggaacccctcccccatttacttctccacctcccgtcctccccatcattggtttttttttgtgtgtcaactgtgccgtttttattttattccttttattgtcccccttttcacagagacataaaggtctagaagtatgacaagtactcaaattgctgagatttggtttcat

SEQ ID NO: 107743 - DNA, 401 bp, Zea mays
  Clone ID: MRT4577_2975C.1
gtggtcgagggtccaggaggacttcattggagcatattaagatgtaaatccgtacgtatgataaactggaatcagggagcactcataagaatataggcccctccggtccaaaaaacgaccaatgccgtcatgaaggttgcatgcgataatgccggcccccatcagaaagttgtttgctcgaacaagtcgttttcaaaaaaaagggcttacaaacacaccaatgcttttgattggattcaccgttttggggaagcttaaagaatagtatgcaactaaaacatattttcctggaggtggaccacttgccggaaaataatgaacgatttatcttattgggcaaaatatgttgcgtttgggtttagttgccactactgattcttttatgtagaacactgatgatg

SEQ ID NO: 107744 - DNA, 257 bp, Zea mays
  Clone ID: MRT4577_29760C.1
gcctgcaggtaccgtccgggattattcccgggtcgacgagctcactagtcggcggccgcccttttttttttttttttttttttttttatatggaatgtttttattttctcttttgtttttatttaagtttgtaaaaggccaaaaataaaaaaatttatgttttaaacaagccccaagacacgagcgtttcattggtggaggggggcccaccccaagggtagaaacggtgagaacacttcatatttactatttaaaga

SEQ ID NO: 107745 - DNA, 406 bp, Zea mays
  Clone ID: MRT4577_29761C.1
ccttaaaaagaagtcccaatgatattcatcaacatctattaattcgtagcttgaggtacaccatgatgtttataagcacgcacacaaagcgagcagcctctttacttttcttacatgacggatatgtaaccaaacttttattgactactacgaccagcgtactacacgtgtgctattgctttccattcatttccatacgtggcatacatacccgcatactatttagttgtggacctccactagcttaggacagaacatgggatgtggaatgtcatcagggtgacagcagcaccacgaggacccatggtacccgtctttgcagcaatctcaacggaattgactttaggcttcttcgccgcctccttcgtgacaccgattgccatcaccaccttgtcaattttggacc

SEQ ID NO: 107746 - DNA, 1393 bp, Zea mays
  Clone ID: MRT4577_29762C.1
ctccattcgcgcaaagacgccaagcccacccagcgaaatctctccccaaactacccctcgccagcgcccggcgatgtgcccaacgaagcccgatcgccctggccaggccgccgccggctccggcgagaagagctggcgggaggaggccgtggccgcctgctcgctgcggctggtcgacctggaccgtggcaccaacggctgggcctcgccgccgggggacctcttccacctgcgcgcgcgcggctacttctccagcggcggcgggaagcgcggcaaggcgccgtccgccgcggactggctgctccgccccgccggcgtcgactggctacgctcccacgcgcgcctcgaccacgtgctcgcccgcgacgacaaccgcgtcgccgccgccttccgccgcgcgcgcctcaggaaggaccccagcgcgcacttcctcctggccgtcaatctccaggtgccgggccggccggacgcgtacagcgccgtgttctacttcgcggcggaggcacccatcccgccggactcgctgctcggccgtttcatccacggcgacgacgcgtaccgcaacgcgcgtttcaagatagccaaccgcatcgtcaagggtccctggatcgtccgcgccaccgtcggcaactacgcggcctgcctgctcggccgcgcgctcacgtgccgctaccacaagggcgacgactacctcgagatcgacgtcgacatcggcagctcagcgatcgccagcgccatcctgcatctcgcgctcggcgccgtcacgtcggtgaccatcgacatggggttcctcgtcgagtcccagtccgaggaggagctgcccgagaggctattcggcgccgtgcgcatcgcgcagatggagatgagcgcggccaagtacgtggagctgccccctgatgaggccatgcctgagacggccggcagggccggggccgggttcagggtaagctcggcgaaggtggtcaatcatagccgccaacaagaccacgccggcggcaaggtcggcaggtcgatgagttgcccggagcgagagagcggaggaaaataggcgcaaagtatgcgggtgcactgcagaaagaaaccatccatcgatggcagagcgatggcgagaaccggaagacgaaggccgggtaacccccaacacataaaatgctgaagctggcgccatgaccacgacctcgaccacgaatggcgccccctccccttctttcataaatttctgacttcatttggttgtgatgatgagagcttaaaaacctgatggatgcgaaatcaattcatagcagcagattaatctatctatctatctatggccgagttccatgacataattatgatgatgcccggcttgtcttcagccgcaaaaaaaaaaaaaaactcgagagggggccgg

SEQ ID NO: 107747 - DNA, 374 bp, Zea mays
  Clone ID: MRT4577_29763C.1
aatcaatccacaacacactgtgccgactattgtcgatgatggattcgctttgtgggaaagtcgtgctatcctcacctatctcgtgaacaaattcgctccaggacattctttgtatccacttgatgtgcaaaagcgtgccaatgtagaacgtgctcttaatttcgatggtactactttgtatccggcttttggcgcagtcgtttatccgattttgcaccaacaaattgctttcaatcctacttcagctctaccattgtaccaaaaattagaaattttagatactttgctcggtcagcacgattatgttgccggtgacgaattgtctattgctgatttatctacattggccacagtatcttcaatcacagctattc

SEQ ID NO: 107748 - DNA, 843 bp, Zea mays
  unsure (1)..(843): unsure at all n locations
  Clone ID: MRT4577_29764C.1
ggacctcgagcggcggataggaatggaacaaattagggagataacataaagaggggaagaatctggcacagcagtatttcatggagatttcttggtaacattcacaagcttcgagtgattgagcctacaagtccttgggagacaagtaataaggatgaatttatggacatggtgaagctggagcttcttgacctgtcagggaataccacaatacaatttttgccaagcttgtcaggtgcaatcagcctcagaacccttattctagatggttgtattgaattgcaacatgttgtgcctgaaacactccctccatggcttgaaacatttagctttgatggaggatataaacaagctaaaatctcatgtatgactttagcttgttgtgcaagactggtcaacttcagattgtgtgggtcagtacagaaccttgaggagctggacctctcaaacacatcaatcaaaacacttgacctcagtgataaagtggtgcaggtcccatgcctagagcgcatcatcttgctgggatgtgagcggcttcgtgctgtcctgtggccaaaggatggaatgcccaatctaatggtgctaggcattgacactcggggaggcgcagaagcagctagtgcaaaaacagtacatgataactttgccatcagtaaagaacgagaagaaggttgtcgtgcatttgttgctgttatggaaatgaggttcctttcagtcgttgggtgctagcaagttccaataaactttgctgngacactgacccgtagtatgatcttaacatctgcttgtcttcctctagagtancagcaaagtgttggacacacagctacagggagagacgat

SEQ ID NO: 107749 - DNA, 445 bp, Zea mays
  Clone ID: MRT4577_29765C.1
ccggccgggccgggcttctacagaagaagccgaacgttttcggttccgctcagagtcataagccaggtcagactaggttagggtttacctgtgaggcctgctcccctgccgccgccgccatgggacactccaacgtgtggaactcgcaccccaagaactacggccctggatctagggtttgtaccgctgaaacttggggagctccaaagcatggcaataatggaagcatggatggggacctaaaagatagcctgtactcttattcttatgataaaaccatgtaatgaattgtttggctttgtgtggacgaagttggtgtattctagatggtactcttgaatcttgatgcttccctgctatgctagctgagcatgtcgaaccgctatgaatcagacaatacagtatcaatgttaccacccaaaaaaaaaaaaaaaaaaggccccta

SEQ ID NO: 107750 - DNA, 583 bp, Zea mays
  Clone ID: MRT4577_29766C.1
ggggggcccccaaacccaaaaatttggaaccaaattttttgcccccaaaaaaaaggcttaaagggttggccggtaaggggcaaaaaaaaaaaaattaaacccgggattttaccgggggatataccccccaaacccgaggaccgggacccctcaatttatagggccccccgaaaaggggacccaaaggaatttttggaaggggggttcccacgggaccccccaaaagctattggattggagggtacaaaaacccggccggggggggggccccacccagggaaacccgtccaggaacccatatatatacccattcccggcttaagccaaacggggagggccccccacttcggggggggcccttcaggcttcagggggaaaaatttgggttaaaaccccgggaaaaaaccaaaaacatttccccccaaatttttggcgaccggggaaaagccaatccgggggcaaaaaaaaggggccccccaaatctggcgccccgggaaccccggaaaatggaaagggggcccaaagggcccccggagggcccaaaaaaaatgggaaccacccagcaaaccttttgggccccccc

SEQ ID NO: 107751 - DNA, 458 bp, Zea mays
  Clone ID: MRT4577_29767C.1
cctgcacctgtgaggcctgctcccctgccgccgccgccatgggacactccaacgtgtggaactcgcaccccaagaactacggccctggatctagggtttgccgtgtgtgcgctaacccccacggcttgatccggaagtacgggctcatgtgctgcagacagtgcttccgcagcaacgccaaggacattggcttcatcaagtaccgctgaaacttggggagctacaaagcacggcaataatggaggcacggatggggacctcaaagatagcatgtactcttattcttattataaaaccatgtaatgaattgtttggctttgtgtggacgaagttggtgtattctagatggtactcttgaatcttgatgcttccctgctatgctagctgagcatgtcgaaccgctatggatcagacaatacagtatcattgttactaaaaaaaaaaaaaaaaaagcggac

SEQ ID NO: 107752 - DNA, 526 bp, Zea mays
  Clone ID: MRT4577_29768C.1
acctcgaggccggccgggagagtcattcgccaggtcagactaggttaggatttacctgtgaggtctccttctcccctgccgccgccgccatgggacactccaacgtgtggaactcgcaccccaagaactacggccctggatctagggtttgccgtgtgtgcgctaacccccacggcttgatccggaagtacgggctcatgtgctgcagacagtgcttccgcagcaacgccaaggacattggcttcatcaagtaccgctgaaacttggggagctccaaagcacggcaataatggaggcacggatggggacctcaaagatagcatgtactcttattcttattataaaaccatgtaatgaattgtttggctttgtgtggacgaagttggtgtattctggatggtactcttgaatcttgatgcttccctgctatgctagctgagcatgtcgaaccgctatggatcagacaatacagtatcattgttaccacccagtcttgtcgaaaaaaaaaaaaaaaaaaggggcggcc

SEQ ID NO: 107753 - DNA, 780 bp, Zea mays
  Clone ID: MRT4577_29769C.1
cctatgggcgattgggtccctcgaggccggccgggagagtcataagccaggtcagactaggttagggtttacctgtgaggcctgctcccctgccgccgccgccatgggacactccaacgtgtggaactcgcaccccaagaactacggccctggatctagggtttgccgtgtgtgcgctaacccccacggcttgatccgaaagtacgggctcatgtgctgcagacagtgcttccgcagcaacgccaaggacattggcttcatcaagtaccgctgaaacttggggagctccaaagcatggcaataatggaagcatggatggggacctaaaagatagcctgtactcttattcttatgataaaaccatgtaatgaattgtttggctttgtgtggacgaagttggtgtattctagatggtactcttgaatcttgatgcttccctgctatgctagctgagcatgtcgaaccgctatgaatcagacaatacagtatcaatgttaccactcaaaaaaaaaaaaaaaaaaaaaaaaaaaaaaaaaaaaaaaaaaaaaaaaaaaaaaaaaaaggtccccatcatctcttccaaatcccaccagcaaatccccaattcctccgagttcgagcgaccatgtcggggcgtggcaagggcgggaagggtctgggcaaaggcggcgccaagcgtcaccgcaaggttctccgcgacaacatccagggcatcacgaagccggcgatccggaggctggcggggaggggcggcgtgaagcgcatctcggggctcatcta

SEQ ID NO: 107754 - DNA, 386 bp, Zea mays
  Clone ID: MRT4577_2976C.1
gccagttcagcttcagcaggtgacgtcggttcggcacatgcccgccctgacgaggctcgccgcgccgccggcgctggcggccccgtccgcacgccgcagttcgctgacgctgccaccgccgccacgtcccccacactgctcctcctcctggtacagcgggaggcgctcgccgtcaaggccctcggccaccgccggcggcgccccgcgcggaggcccgctcccggagccagaggaactcgaccagctcctcctcaccgccctccgggctgctcgcatccgcgacgaggagtctcgccgctcagatcctctttttatcgatccatatgctgccattcttctttcacatgacgtggcacatcatgatatgggatatctagattcacatg

SEQ ID NO: 107755 - DNA, 620 bp, Zea mays
  Clone ID: MRT4577_29770C.1
ggaaccaaattttttttttgaaaggacgggggtggtttttttcttggggtgggatcctcctaaaaaaccggggccccctaaaaaaaaaatcctttattcggggattccatttgggggggctttatttcacccccaataccttttctttgccacccttcgaaatgggccccccaaagaaccatgacctttcttgttaagccacctccttccacaattcctggggggaaatccctttgggggggtaaaattttgccccaaaattgttaatttgggcttgaccttaagggtagccctcaaaaaaggggtcctgatccttggcttatttggaaccataaatcttgattgaggattcctcaaccagcccagcttcagtgggcaaaactaggaggggatcacctggttttttttcgatagccttgaaatagctgtggccaaccttgacccaaggaaatgcccaaaattgtcccccaggggcaccaggcccatctttagggaccttggtttttgattaaccccagccattacgctttggtcttgcccgtccaagggtttaacctcctgacagtgcaacgatttctttgtggttaaggcccattctgtaaaatacttccccaaatgtt

SEQ ID NO: 107756 - DNA, 575 bp, Zea mays
  Clone ID: MRT4577_29771C.1
ctcgaggccggccctacagaagaagccgaacgttttcggttccgctcagagtcataagccaggtcagactaggttagggtttacctgtgaggcctgctcccctgccgccgccgccatgggacactccaacgtgtggaactcgcaccccaagaactacggccctggatctagggtttgccgtgtgtgcgctaacccccacggcttgatccgaaagtacgggctcatgtgctgcagacagtgcttccgcagcaacgccaaggacattggcttcatcaagtaccgctgaaacttggggagctccaaagcatggcaataatggaagcatggatggggacctaaaagatagcctgtactcttattcttatgataaaaccatgtaatgaattgtttggctttgtgtggacgaagttggtgtattctagatggtactcttgaatcttgatgcttccctgctatgctagctgagcatgtcgaaccgctatgaatcagacaatacagtatcaatgttaccactcagtcttgcgaaaaaaaaaaaaaaaaaaaaaaaaaaaaaaaaaaaaaaaactcgaagaggg

SEQ ID NO: 107757 - DNA, 314 bp, Zea mays
  Clone ID: MRT4577_29772C.1
acaaataaacacatcaagcgaagcgcactatcggcaacctaccagcaatggctacgaagagtttgtataatacttgcgctccttgcgcttattgtgagcgcaacaaatgcgatcattattccacaatgttcaattgctccttactacattatcccacagtttctattatccgttactcaaaaggcgttcgaacacagacctgtgtaagcctataggctacaataagcgattgcggcgagcgtctgaaacctccaattgcacaatagtaacaacattccttggcacatttaacaatacatatcatctgcacgcag

SEQ ID NO: 107758 - DNA, 453 bp, Zea mays
  Clone ID: MRT4577_29773C.1
cgttgctgtcgggttgttgaaaccgtcaaggaacggggacgtggggcccgaggccagataagattcgctctggtttctctacctccgcgccgcgctggaactccctcccggtgaggttgttgaaaccgacaaggaacggggacgtggggcccgaggaaggtcacgctgctagtttttttccttcgcgatcgatcccttccgcctccggattcgccctgctcttgttcctccgctgttttctcgatcggttggctggtgactctgcccctgcccctgcccctgccccggccccgattcgggggaatctgattcgatcgcgggcgggcgggagagattgggttcttggttctggtgccggtgcgcgcggcgtaatttggtagcagatagaagcaggaagggggagcatcggcccttggctgcgctgctgagaatcgcggtcgggggaggctgatc

SEQ ID NO: 107759 - DNA, 570 bp, Zea mays
  Clone ID: MRT4577_29774C.1
caaggctaaaagttttttctttaaaaaccaaacaattacccgacttttgtttgttttgcccggcccacccccccaaaaggaggacccaaattcccggccgggataagaactaggtttttgctacaacaaaccacaatttttttgatttccatccaaaataggaccggaccctccggggcccacaggaaagggttagggctaatttgttcggaacaaacaaagttttagccgggccgagccccaaaaaaggaaaccaggccctgacattttggcccggtttgaaaccggcccccggccggttggcggttcccctttggttttcttcttcccctgggttctcggaacagttaatccgttttgtataaaaaacctaggggcaaaaaggcccaaaaaacccgtctggcggaattttttccttgacctcggaagttggcacaaccaccacggccgggtttttttggcccctctcactggggggggtttgcccgtttatgctaaagaaaagcatgttttctttaagtttttgaagcctccactaaagcccgaacatgggggcaatcacatccaaaa

SEQ ID NO: 107760 - DNA, 179 bp, Zea mays
  unsure (1)..(179): unsure at all n locations
  Clone ID: MRT4577_29775C.1
ggttactattccatnccttacatacacctgtatgcccacatacggtaatttgaagacaggaaaagttgatcaaactcttagcttgagtgggggaaaaacaacttgcattgcttgccacccaacactaacaataatgaataaccgcgaaggaagacagaactggataagaaggggatgcc

SEQ ID NO: 107761 - DNA, 597 bp, Zea mays
  Clone ID: MRT4577_29776C.1
cgcagcggccggatccgtctcgccgtcctgctcctcctcggcctccggcgcggacgcggccgcctggcccggccccatcgacctcttcctcgaagtggacggcatcatggacatggactgggcgggcatcctttcgggctgcggcgatgacgacgccgcggacataagcgtcgtcgatcttttcgaccattacgcgggcgatggctttgatgaacaagtctggatgtgatgcatgctcttcctgcaggtagcagcagtacactgggcggtaggatggttagaactgtgttgtgttgttactggtgatcgtatctctgctcttgcgtttgcgtgtccagttgcctctcttgttttctttggtttcttgggtcaattcaagttcgcccgcgtccatgcatgcatggttgctggtacgggggagaggcacggcctggtttgtgtggtacgttcttcgtgaagattgaggaatgaattgtgattgcgtcaagctgttgatctcagtctcgtggctagggatcgatcattctcggatcaagagcaagctgtcaaatccttcagccacccgtgtactgcatgcagttcaggaatgtgaaattt

SEQ ID NO: 107762 - DNA, 415 bp, Zea mays
  Clone ID: MRT4577_29777C.1
aaggagctatttttttttttttttttttttttttttttttttttttctaaaaaaaacctcagttgaaactccagaaagaacattcccacaaacacacgacttcaaaattgtatcggggtacctgtcctttgttcccttttgggtaaccaacctcttacccaggatttgaacatttgggcaatcccaaatactaggggaaggtgaacaaaagggtaccttccgtgctaaggctggattttgaaaatttcaaagctttttaagcatgtccctgaaccaataggcccacaccttaggttggcgtttcatcgtttgtaattccacgttgacgatgcctaatttgtacaagttcccttgcagccattttaaattgtcgaggagagaccaggcgaagtagccagccacgtttgctccctgg

SEQ ID NO: 107763 - DNA, 568 bp, Zea mays
  Clone ID: MRT4577_29778C.1
ccccgcgtccggctccacgaatctagcgcctcccccgccgcgaaacccagccaccgaaaccagccatcgcccgccgctcctcaagctccgcgaatcccccgccgcgcctcaagcttccctcctccgccttatcccgccgttttgtagtggcttcgtctttagcttgggcctcgcttccacttcgtagctgcctgcgcgctcgcgactcgcctcgtcgcttccggttgaagggtcaggccgcaatggacgaagaggttggcgccgccgggcgacaacaggggaaaatgtatctactattactgggaacaattgcccttagcttggtaacaactcctcttattttcaaactaattcctatggtaatgcaccttggcatccttatgtgttggttcccctcggaaaacagtatgcagagtgaggtatcctttactaccctatttgctgtttttttattaaaaagcttgacctatggacattgttggctggagcggtaaagacgtaacgcctctgttcaaatttcatggtctacaatatttgacatgttaggttttgaaagagtatcacattt

SEQ ID NO: 107764 - DNA, 582 bp, Zea mays
  Clone ID: MRT4577_29779C.1
ccggccggggcaggactgagttgtatccccggcggcgctgcgtacctgtgcggtaaatacacgatgagccccggtctgcacactgactccggcgggcgcggggttccgtcatcagtgtgagacccacgatatgccaggccaactacatgggcgcggcccacaggacggacggggaccttaccggagtgtttgtgacggaccacggttgcactgcacgggaccgtctaccttgatgtatgtaagccactggtccatgcaccgttccccccgacgagccgtaacggcgtaaccgcgacgcgaacccgccacacggcacggtaaccgccccacctgcttcggcgtccacgggacgtgtccccccactctccaggctctagccatgatgtggatcccaccagaaacgatgaggaaaagaagcgacgaaatgtgcgccatttaactagcgtcgcgtccttccaattcctcctctctgttgcaaacctctcctcactcactccgtccgacgcccttcgtcaccagcctccttcctcgcgccgaccgccgggatccggcgccccaaaaaaaaaaaaataacccgcggcc

SEQ ID NO: 107765 - DNA, 156 bp, Zea mays
  Clone ID: MRT4577_2977C.1
cacataacaggcatattttaccactggaggatcatctcacgatgcaacaacacggggtcctaataacataaagtgcacctaattgaaaaacaagaccatgtaataaacacaactattttgctccctcctgaaaaaccatggagaatgattttggca

SEQ ID NO: 107766 - DNA, 1049 bp, Zea mays
  unsure (1)..(1049): unsure at all n locations
  Clone ID: MRT4577_29780C.1
gcctgcccgcccgcacctcaagctccacgaatctagcgcctcccccgccgncgaaacccagccaccgaaaccagccatcgcccgtcgctcctcaagctccgcgaatcccccgccgcgcctcaagcttccctcctccgccttatcccgtcgttttgtagtggcttcgtctttagcttgggcctcgcttccacttcgtaactgcctacacgctcacgactcgcctggtcgcttccggttgaagggccaggccgcaatggacgaacaggtcggcgccgccgggcggcagcaggttgggctgtccttagcacagatagaagagtttgcttttgtgcttttgagtcgtgcctcccatctccatcttgttggggggaaaatgtatctactattagtgggaacaattgcccttagcttggtaacaactcctctcattttcaaactaattcctgtggtaatgcaccttggcatccttatgcgttggttcccctcggaaaacagtatgcagagtgagcttccattacaggaaaaggcggttatgcttgaagcccacaacagatcactctaacattgcctagccacaacattcttttgactgacggtgatttatttgtgcatcgactctttgcgcatgccatggaaacattggagaaacaattacacaccagtactccctttttgcggcgatatgggaacacgatgggatggacagagttaacagcttggccagccttggggctctccgtatagcattcttttttattgcgcttttgagttgtacatataggggatactgtacatgtcgtcaaggtagcatacagggggaaggcgccgatgggccttggttttgtatcattgttgccaactcgatcagtcgacagtctagaaagctagatagggatttttggtacctcgtgctcaaatgtacacttattgtcagaagacgatgggaaagttgtatgttatgtatttgttatgcccttgtgacgactaattgaccatggacacatgaatggtaacgtgttcaccgtgtaaaaaaaaatcaaaaaatagca

SEQ ID NO: 107767 - DNA, 823 bp, Zea mays
  Clone ID: MRT4577_29781C.1
aattcggcacgaggccaacctcaaagcacccctgatctctcgtccctctcattcgtaacactactacagcaagaacacaagctaggcgcggtgggtacggtgcaagtgagctagcagctctaccgccatgaggccagcagcagagttcccgaccatgagccacggcgcgcccatgggtgcgaacgcgaacgtgcctcactccccgtggcagtcgccggtgccgtacctgttcggcgggctggcggcgatgctggggctcatagccttggcgctgctcatcctggcctgctcctactggaagctgtccgggtacctcgacgccgaccgcggccagcgggccggctcgtccggagaagcgggcgccgacggggagaagggctcggcggccggcgcggccaggccggcggcggggttccaggagcacgtggtggtcatcatggccggcgaggagaggccgaccttcctggccacaccggctgccagccgtgcggtcgtggagctcggggccgcgccgggctccggcggctcggccgaggcgcccgaggaggaggaggcccacgtggacggcgacggcggctgcggcgactgtgagcacgaagtgccccggctcggagccgacgccggcaccgtgagccggagcagtgaaggcaccagcagcgcgacgacggcgctggctgagtgatcgctcgttttttctcttcgcatttttctcctgctggagtggtgtgttaggtttagcttgtagttgtatattcttgacttgattggttcagactgagggtgaaattaaagaaacttcaatgcgagttttgctaactttgcc

SEQ ID NO: 107768 - DNA, 210 bp, Zea mays
  unsure (1)..(210): unsure at all n locations
  Clone ID: MRT4577_29782C.1
agccactccgaagcgaagtcttgctagggtttgggttggggggaatctgacgcgagagcgggagcgaagggggaggagaagatgatcgaggtggtgctgaacgaccgnttggggaagaaggtgngggtgatgtgcatcgtggacgtctgttttggngtntttgtgatgttggtggtggtggggggggggtngtgctgtgngaggattttg

SEQ ID NO: 107769 - DNA, 303 bp, Zea mays
  Clone ID: MRT4577_29783C.1
cctcttttttttttttttttttttttttttttggtggtgtttttttaattttttttgaaaaaacgcccatgcaaatgttattgcggccaagggtaaaaccattttgctttccacccgccgggaaacaccaccaaaaggatggggacttgtggttttttttgtgccctaatagaacatactttggtgctggcaaaaatatgccggggcgaaggttgtcggacccgttgccaacccaaaaactttaactgttggccccatattctgttaaaaaattatccgaacagcaaaatttccggggggggg

SEQ ID NO: 107770 - DNA, 336 bp, Zea mays
  Clone ID: MRT4577_29784C.1
ccaaaaaataaattatcataaaaaaactaaaataaaagaaaatacaaacaaggaggggaggacaataaaattttaaaaaagataactaaacataaaataaaatcattactgtcaaaaaaggcacatatagtggtgagctatatacatattccaactgaccatctttcaaagtcagctattacgtcatttttgaggactacgttaaatctatcatggcctatggtttatacaaactttatggcttgtaaagcctatggatgatacatttttattggccaggcaatcaatacgttttcgattcttgttaactaacgatataaacttggatgttcatgc

SEQ ID NO: 107771 - DNA, 553 bp, Zea mays
  Clone ID: MRT4577_29785C.1
aaccagacggaagaggcccgcaagccacatctaagacaacatgcgacttcctctcgaatcgcgtgcgctttacgcctccaccaggagagctacaggtctcgtctaagaacaacagagctactggagaacaactacgaagccaaagagagctcagctaccaagtcaacatgaccgatctcaacaagcagcttgcatgagccctagatccagctgctgtactgacatggagacgactgtggaggtagacgcttggaacaatctattgtgggcatgggaacatacgataatgcgaatgtgcaaatacactgactacacgccagaaacagaataactacagcacatataactagaataactcaggcatctataaaaagaatctccgctgatatgaaacaaggaattcaggagccatagctatgtaaggccagacccatacatagggcacagcattcgaatgctacgagattactacaacaaggtggcaacgttaataaagagagctgcgaatgcgcagaaagcataacgtacctattcacgcttgcgaccgatcctg

SEQ ID NO: 107772 - DNA, 323 bp, Zea mays
  unsure (1)..(323): unsure at all n locations
  Clone ID: MRT4577_29786C.1
gccgggctacccacccatcgtctcgtcgtctcgtcgcgcgtgggcgtggcgctctctccccccagctcctcttttaagacgacgccatcgccagccgggcctccctcgccgtccggcgccgtcctccttcgtccttccctctcatcacagtttccacctcgcgaggggctcgcgcgcgcgcccatcccggccgatcgactcacgaattcgcggggtgtgggggtcgtgcaagggcatccccgcacggccggaagcacggaatcacttccccgccccccaattcccgggctcctcggcgccgntccctcgccggtgttcgcttt

SEQ ID NO: 107773 - DNA, 636 bp, Zea mays
  unsure (1)..(636): unsure at all n locations
  Clone ID: MRT4577_29787C.1
cctcgaagccggcctagacgcctgcctctcctcctcagagctcgacgccaccggccaccgacaccctcgatcactgcggacgtctagcatgtggagggttagtgtgttcaacgatgcgctcaagtccatgtacaacgctgagaacatcggcaagaggcaggtcatgatcaggacgactgccaagggcatcatcaagttcctgacagtgatgcaccgccacggctacattgccagagtgcgagtacgctgatgaccaccgatcgcgaaagatcatgcccgaactcaacgggaggatgaacaagtgcggcgtcatcaggcctcgctgtgatatcagcgcgaaagacattgagggatggactgcaaggatgctcccgtccaggcagatcgcatacatcgatcctcacaacttcgacaggcatcatggaaccacgacgaggcccgccggaaaagcgtcgcaggcaaggatctacgtttcttctattgaagaaactgaaaatctttgttatggcctgcctgcctgacttactctctcagactatagtacctcgatatcttacattaatatgtctgctctcagactaagcgnncccttttctttactttgaatattggtgactgcattggtctttcactttt

SEQ ID NO: 107774 - DNA, 606 bp, Zea mays
  Clone ID: MRT4577_29788C.1
ctcttcgttacattcctgatcgcattgctggtacctacttcatgttttttcttctacattgttttggatttgtaagtttatattttggcaagttgttgaggagggggcagctttcgtgatcttcttcgcttggggctccgattgagtttcctcttaatataatattgtgggagcggtatttcccctactgcccgagttttttttatggggatgcctatttggatgcagttgttttttgacacttgcacagtgacccattgttttcagcctgtggatatgcaatgtcataccttgcttatcccttttgaacttcagaagacttaacttaattctggaaatgattgtgacctaaacataatgcgatccatgctttacatttctgtaagcttgttagtatatcacttttgcctctatgataatgaaatgtgggtgctctattcaattggattactcagcaccatccaaatgtttaacgatttttttgaaactgaaagcacagatgcacatatgtcttccttgtttggaaccttgatctggtcaagacataactactattgcatcttaagataagatgtggttgtttcagtcaaaagcacttattgcttt

SEQ ID NO: 107775 - DNA, 1512 bp, Zea mays
  Clone ID: MRT4577_29789C.1
ttgggaccctcgaggccggccgggctcatataaaaaaactcatccctgaccacacgagtgcctgccaccacgccgcgccgcgccccgcgatacaacgacttcctgcagtcctgcgctgcgcccctcctttccgcctccacgctgccgacgtccaccacacagcacggtcgagtcacccgatccctccatggcggcggcggtggcggcggtcgcggctgccacgacggcggaggacgaggcgcgcctgctgcgtctggaggagcaggcggagcacggcggcggcggcgcctgggactacctctgcctcgcccgccggctccgcgcccgccgccccgcccacgtcctccgcgtcggcctcgctctcctcaacaacgcctccgctcgctccggtctcgcctcagaacagtggacgctctacgagcaggtggccacggcggccatggattgccagcgtctcgatgtggcaaaggactgtattggagtcctttcaaagcaatttcctggcagcacccgggttgcccggctagaagctcttctgtttgaagcgaaaagtgaatgggctgaagctgaaagagcttacacgcaaatcctggaaatcaatccatttgaccagattgtccacaagaggaaaattgctattgcaaaagcacaaggcaatatgtcgctagcgattggttatctcaataagtatctggaattatttatggcagatcatgatgcctggagagaacttgctgaaacatatgtttccttacaaatgtacaagcaagctgccttttgttatgaggagctaatattatcccaaccaactattccactctatcatatagcctatgctgaggttctgtacactatgggtggcttggaaaatcttcagacagctaagaagtactatgcatcaacaatccagttgactggaggcaagaatacaagagccctctttggtgtatgtctgtgtacttcggcaatcaatcagttgaccaaaggaaggaataaagaggaagatggctcggagctgcagagattggctgcagaagtactgctgaataattacaagcagcaggctccatcaaaggcgccccttatcagcagcttgttgaagaacatgaaactcagctgataccaactagctctacacattcagaatgtcctgattcgatagatagttaagttaaattgatgtggcataatgcttgtttttttttgtggcactggcaccaacattgtgcaatggttaaaaagtaggtgctcccaaggccatgggttgtgtacactacacctgtttgcttgcagagaaatatgcatgacttctttttcattggatgttctattatagatcacaataaaccccggccattgtacttcagcacaaacaaaactttgaatcagtcgctggtgaagttgtacctgttgattttgattggtcaaaaaaaaaaaaaaaaaagtaaaaaaaaaaaaaaaaaaaaaagattcccattggtaaaaaaaaaaaaaaaaaaaaaaaaaaaaaaa

SEQ ID NO: 107776 - DNA, 366 bp, Zea mays
  Clone ID: MRT4577_2978C.1
ccccagaaaaaatttacccataaaaaggcgggggaaaacagaaaagaagggcccaaccaattccgggaattatacaggggggcctgaagaaaaccaggtcagtggttagtggacaaaaacatgaacatttaagcccaggtcctcggttgcaggggaaatcccacatgtaaagcaacacttccggggaaaaaaaacgctgaaagggattttccgagctaaaaaactacgtacgggattttcgggggggcaccctattttaagcgaccctatatgcggatgagggaggcattggtcttgccaatcccctcgtggaagaaaagctccaaaaaggggcccccgccaatacccttcgccaacctcccaggg

SEQ ID NO: 107777 - DNA, 1397 bp, Zea mays
  Clone ID: MRT4577_29790C.1
cattgggtacctcgaggccggccgggaccgtgctggcgccgcgatacaacgacttcacgtcttcacccgtgctcgtgcgctgcgcccatcccttccgcctccacgctccccacgtgcaccgtgcaccgtgcacagcaccacacagccaggtccccatggcggcggcggtggcggttgcgtctgcgacgacggcggaagacgaagcgcgcctgctgcgcctggaggagcaggcggagcacggcggcggcggcgcctgggaatacctctgcctcgcccgccggctccgcgcccgccgccccgctcacgtcctccgcgtcggcctcgccctcctcaacaacgcctccgcgcgctccggccttgcctcagaacagtggacgctctacgagcaggtggccacggcggccatggattgccagcgtctcgatgtggcaaaggactgtattggagtcctttcaaaacaatttcctgggagcacacgggttgcccggctagaagctcgtctgtttgaagcaaaaggtgaatgggctgaagctgaaagagcctacgcgctaatcctggaaaacaatccatttgaccagattgtccacaagaggaaaattgctatcgcaaaagcacaaggtggtatgtcgatagtgattgattatctcaataagtatctggaattgtttatggctgatcatgatgcttggagagaacttgctgaaacatacagttccttacaaatgtacaagcaagctgccttttgttatgaggagctaatattagcccaaccaactattccactatatcatatagcctacgctgaggttctgtacactatgggtggcttggaaaatctccaaacagctaagaagtattatgcatcaacaatccagttaactggaggcaagaatacaagagccctctttggtgtatgtctgtgtacttcggcaatcaatcagttgacgaaaggaaggaataaagaggaagaggactcggagctgcagagcttggctgcagaggtactgctgaagaattacaagcagcaggctccatcaaaggcgccccttatcagcagcatgttgaagaacatgaaactcagctgataccaaccagctccacacattcagagtggcctgatttgatagatagttaagttaaattgatgtggcttaatatatgcttgttttttttatatataaaaaaattgtggcaccaacattgtgcaaggcttaaaagtagatgctcccaaggccatgggttgtacaacacctgcttgcttacctcgaaatatgcatggcttcttcttcagtggatgttctactatatagatcaacaaacccccgattgtacttgagcacaaacaaaattttgaatcagtcgctggtgaagttctacgtgttgattttcattggtac

SEQ ID NO: 107778 - DNA, 389 bp, Zea mays
  Clone ID: MRT4577_29791C.1
tttggtttaattatttcaacgttcgttaagggacatgaaacagatttctggctacaatagcacacgagttttctttgagattgggtccctgaatcatccgaccatagcagttctagtgacggacttcctaatgtccatgcttgggaaggacaacaaggtgatctatagatatagaaagttactactcatgattgctctactttgtgcaggggcgaccatacgggtcagggatacataattggaactgtcaatggatgaacaccggtcggcctcgagattcgatggtttgacccaaacactaaggtaccgctgaaatgactgttcagtgcttgcggtctgtcaggacggggcatacttcaacaaagaccacttgttttatagggtgctac

SEQ ID NO: 107779 - DNA, 586 bp, Zea mays
  Clone ID: MRT4577_29792C.1
gagagatcaccatgtgcgccattattaacaactaatgaagatgcagcacacaccatgcgtgtaataatctataagattttacagtacagtacgtgatcgatcatttctggaacaaaatatatatatatgcgcagtcctagattatatatggtatcatgatcgtcgtcgagcacgcatgcatgcatccatgcacgagctgagtatccccgatcgaccggcggcgtagcgtaggcgtaggcgtagcaggcgattgattttgcctcatctacaagcgcgacgggatggcgctgagcttgtcggactcggtgatgatgtgcttgcgggtgatttcggcgagggaggtgcagccgctgagcgccatggtgagctcgaactcgtcccgcagcatgcgcaggacgttggacacgccggcctcgcccgccgccgccagggagaacaccaccggcctcccgacctgcaaccaccgtagtccaccggtacgtacgtacgtacgtcagccagtccgacgacggcaggccaggaagacgaataatgaagacgttagacgtctgtgcggtggttgtatcagcgctgggtagcagggtag

SEQ ID NO: 107780 - DNA, 860 bp, Zea mays
  unsure (1)..(860): unsure at all n locations
  Clone ID: MRT4577_29793C.1
tcgaggccggccgggccggtttcaagtgggtcgccatggcgatgaacttgctcgccgcactggccatcgcggtcttctatacacgcctttacatggaggagctgcagtcatacgactttttgagttacggcgtgttcgtgacaggcgaggtgcccacgaccgcgtgggtgtggatgggggcaatcagcgcgctgtgtctcggcgtgtctatcttaaatctgtacgcgctcatcacgctctcctctacctatgatgaggtgccgattggcatccccgttggagcaggcctcacgcggtcgatggagctttgggacaactttacctacaacgcgacgcccgatgcgccaaatctattctacaatgtctttggctacgaccccgcacactcggcgttcaactttacgacgattggcatcccgacgagcgaagacgacgcgctgacgtattcgcagcggatcatgacggtggccgtgtcgcatttgtgtcacagcacgatgggtgactctgtctatgcctccctcgggctngaacggtggtttgtacgccaagttttcgtcagacaacccgacgctgagcacgtccacccgccctgacgatccaatgaccgcgctacggctcgtggnggtgtcggcgttccctgccgtttgtgactattctgatcaagttcttcacagaggtcctcaactcttacacccaactcaacgtccaggcgctgatggagaactcagtgatcacgtctctgatcttcaacatttaaagacgcaagtggaccaagaggatctgcgcgcggcgatcgccgagtacgccgcgaccaggattcgagcgtcgcggaggcgtcatgtctgagcggactgctgcgt

SEQ ID NO: 107781 - DNA, 317 bp, Zea mays
  Clone ID: MRT4577_29794C.1
cacgcggcgaactctcctggttatacacagcagtagcagctactaccattcatcctctagttggcgagagccctgctaccttcttgacacaaccacagctgttgccggggtaccagcacaggggggcctaacgcgggcacgctattacaactggagcacatggttgccattgacccaactctgactataacaaacccaagacttgttttaccagcaccccatgattgccggtgccctgttgatagactagttataagttatagcacaatagtaaagttggatatcggatgcgtgtggcttgccagaacaaagaaagg

SEQ ID NO: 107782 - DNA, 458 bp, Zea mays
  Clone ID: MRT4577_29795C.1
aagcagggtaacacccggactgcggggttttttttttttttttttttttttggttttttttttttttttttttttttttttttttttttttttttttttttttttttaaaatacaacaccctttcaaattcacaagacgggaaaccaaaaaaaaaaaaaaccggaaaggggggggggggggccccccattgttcaaaccaccaaaaattctgtttctacccaaagaggaaaaagccctaaatgcaggcccatctgggctatttaaaagaggaaaaaaaacaaggtaaaaaaaacatggacaaggggggccgccccccatggaaaggcccaggaaggatggacgggggaaccaaaccacaaaccccttggtccttttataaaagccacaacgcgccggggtcctttagtatgggcccaaaggcccccccccccgcctctggggtgttcccaccggttaa

SEQ ID NO: 107783 - DNA, 1243 bp, Zea mays
  Clone ID: MRT4577_29796C.1
ggtccagaattcacgggtcgacgcacgcgtccgcccacgcgtccgtatccagatcgagagctgccttgtctgcacatgcaaaagcgccaagagcgagcgcctcatgtctttatattgctctcacaccctccgtttctcgctcccacccactgccactgtacttgtgttgtgttgtgttgtgtgctgcaagaagaagaggaggaggaagagcatgtgctgagaagcctgccagcgcgctttacgacaagcatatatgggggagatcaccaagcctttgcgaagcagaagcttccgaagatggcctacgactactacgcgtccggcgccgaggatgagtggacgctgcaggagaacatcttctccaggatcttgagcagcgtcggggaaccgcgcgccgcgtgtgttcacggtggcgtccgccgcggcaccgacgtcttcaaggcgctcgcgctcggcgccgccggcgtattcgtcgggaggccggtggtgttctccctggcggcggcgggcgaggccggcgtgtccaacgtcctgcgcatgctgcgggacgagttcgagctcaccatggcgctcagcggctgcacctccctcgccgaaatcacccgcaagcacatcatcaccgagtccgacaagctcagcgccatcccgtcgcgcttgtagatgaggcaaaatcaatcgcctgctacgccgccggtcgatcggggatagtcagctcgtgcatggatgcatgcatgcgtgctcgatgtcgatgacgatgatgataccatatataatctaggactgcgcatatatatattttgttccagaaatgatcgatcactgtactgtactgtaaaatcttatagattattacacgcatggtgtgcgctgcatcttcattagttgttaataatggcgcacacatggtgatctctctgtatttgaatatttgatcacaaagtatttgtttcaaaaaaaaaaaaaaaaaaaaaaaaaaaaaaaaaaaaaaaaaaaaaaaaaaagggggggggggaaaaaaaaaaaaaaaaaaaaaaaaaaaaaaaaaaaaaaaaataaaaaaaaaaaaaaaaaaaaaaaaaaaaaaggggggggcggttttaggggttccaagtttacctcccctggcttgcggggtttttttttttttttggggccccctaattttattccccggggggggggtttccacctttggctttggtaaaacctgggggttcccctcttttttgcttttgggggcctt

SEQ ID NO: 107784 - DNA, 2205 bp, Zea mays
  Clone ID: MRT4577_29797C.1
gggtacctcgaggccggccggggagtgctcaccgctgaagaagtaagctcgcccggcctctgcttgtcctatttcatttcatcagtcagtcgcgtcgatcgggaacacgcatgcggtgtgggtgtgaagtgtggacgtgcttgctgatgcatttgcatctatatcatcgcagcgaggcttgcggtggcgaacggcgcggcggggatcatcgtgtcgaaccacggcgcgcggcagctggactacgtgccggcgaccatcagcgcgctggaggaggtcgtgaaggccgcccggggccagctccccgtgttcgtcgacggtggcgtccgccgcggcaccgacgtcttcaaggcgctcgcgctcggcgccgccggcgtattcgtaagctacctacctaccctgctacccagcgctgaatatccaaccaccgcacagacgtctaacgtcttcattattcgtcttcctccgcgcggactggctgacgtacgtacgtacgtaccggtggactacggtggttgcaggtcgggaggcaggtggcgcctcacctctttatatcgctcgaggaccccccgccggccgggcccacccactgccactgtacttgtgttgtgttgtgctgtgctgtgctgcgagaagaaggagaagcagaggaagagcaggtgctgagaagcctgccggcgcgcgttacgacaagcatatatgggggagatcaccaatgtcatggagtaccaggccatcgcgaagcagaagcttccgaagatggcctacgactactacgcgtccggcgccgaggacgagtggacgctgcaggagaacagggaggccttctccaggatcttgttccgtccgcgcatactgatcgacgtgtccaagatcgacatgaccaccaccgtgctggggttcaagatctccatgcccatcatggtcgcccccactgctatgcagaagatggctcacccagatggggagaacgccactgcgcgcgcggcggctgcggcaggcaccataatgacactgtcgtcctgggcaacttcaagcgtcgaggaggttgcctcgaccgggccagggatccgcttcttccagctatacgtctacaaggacaggaaggtggtggagcagctggtgaggcgagctgaaagggctgggttcaaggccatcgcgctcaccgtcgacacgccgcgccttggccgcagggaagctgacatcaagaacagatttgtcctgccaccacacctgacgctcaagaacttcgaaggtctggacctcggcaaaatggaccaggctgctggattcagggctggcttcctatgtcgccggccaagtcgaccgcaccctgagctggaaagacgtcaaatggttgcagaccatcaccacgctgccgatcctcgtcaggggagtgctcaccgctgaagacacgaggcttgcggtggcgaacggcgcggcggggatcatcgtgtcgaaccacggcgcgcggcagctggactacgtgccggcgaccatcagcgcgctggaggaggtcgtgaaggccgcccggggccagctccccgtgttcgtcgacggcggcgtccgccgcggcaccgacgtcttcaaggcgctcgcgctcggcgccgccggcgtattcgtcgggaggccggtggtgttctccctggcggcggcgggcgaggccggcgtgtccaacgtcctgcgcatgctgcgggacgagttcgagctcaccatggcgctcagcggctgcacctccctcgccgaaatcacccgcaagcacatcatcaccgagtccgacaagctcagcgccatcccgtcgcgcttgtagatgaggcaaaatcaatcgcctgctacgcctacgcctacgctacgccgccggtcgatcggggatactcagctcgtgcatggatgcatgcatgcgtgctcgacgacgatcatgataccatatataatctaggactgcgcatatatatatattttgttccagaaatgatcgatcacgtactgtactgtaaaatcttatagattattacacgcatggtgtgtgctgcatcttcattagttgttaataatggcgcacatggtgatctctctgtatttgaatatttgatcacaaagtatttgtttcaaaaaaaaaaaaaaaaaactcgaaactagttctctcctcgtgcaaaaaaaaaaaaaagctacctacctaccctgctacccagcgctgatacaaccacc

SEQ ID NO: 107785 - DNA, 475 bp, Zea mays
  Clone ID: MRT4577_29798C.1
gaggtcgacggtatcgataagcttctcaattctcaacgcaaacactaaccgaaatcctagtagtttgcataaaatagttaggtattgacaggaggagcacccaagcaggattcacacaccctaccatggccggaagattagcttccaacctttccaccttttttaaacccttttaatggccaaaatggaaggttaatggccattggcggtgggaccatgggcttccttaattgggacctaaaataaccggcttaattaattccaggtccaccacaattttaagtaccacctttgggtcttgatttttaaaagaaaaccacatgggcttaataggatataacttaaggccctgaaccactccaaatggtgtttaaaccatcctggacaattttttctgggctacatatactttcgcaaacacgagattattcatcaacacagaatagatgcaaaatagtccggccattcctcccaa

SEQ ID NO: 107786 - DNA, 237 bp, Zea mays
  Clone ID: MRT4577_29799C.1
aaaaaaaaaaaaaaaaaaaaaaaaaaataaaaggcctgccgatctaaaaagatgccaagctaacaaacacaagcatatcaacaaaataattaatcatatagtattaccggcgctccattttcgtggttcttggtttacaccgccgtcgctgcccaaaactattttctttactaagcttaataaaattgaaaacctttccctttttcccaactagctgaattggtaaaatccctttta

SEQ ID NO: 107787 - DNA, 339 bp, Zea mays
  Clone ID: MRT4577_2979C.1
aatgggggcggctttttttttttttttttttttatttgtttttttgtttttggggtttttttgcaatagggaaactcccccaaatatgggtatctttcctggggaaaggggggcaaactggccaacaaaatcccggtgagggggctgggccaaagtaaggggaaactggcgggacaacatccatgtccttggtactttggaggaaccaaattttgaaccgggtagagcctccggggccaaaatatcacgcgggagtggatatagattcaacataacaaaagggaaaaaggggggggagggggtgcaatttcaaaaaaaaaaaaaaactggattggaatt

SEQ ID NO: 107788 - DNA, 550 bp, Zea mays
  Clone ID: MRT4577_297C.1
gccggccggtccgggctcttatttttattttaaaaatggcacctgtcgcaaagtccaagaagaacgctgaatccatcaactctcgccttcaacttgttaccaaatctggtaaatacactcttggatacaagtcttctttaaagactattcgtcaaggaaaaggtaaagtgtttaattgactacagtcttacctggggggcaggagcccaatataaaaagtagtcatcttttttgtttacatcttgccccttttagggctgagaatgtccccccaaccgatcactgacatcttatcttatagccaagttgatcatcatcgccggtaactgccctcctcttcgcaagtctgaaattgaatattatgccatgttgtccaagactggtgttcaccactacaatggtaacaacattgatctcggtactgcttgcggtaagcttttccgtaccagtgttctttctatcactgatgccggtgactctgatattttgaccgctcaataaataagtaacatttttttttaacgaaaaaaaaaaaaaaaaaaggccccta

SEQ ID NO: 107789 - DNA, 108 bp, Zea mays
  Clone ID: MRT4577_29800C.1
cttgtattctacatgttgggagcatatagatctttcataaaaacacacgtcccatgtattgcaaatcttcatagatccaattatctcatgggtatgttcattatgttc

SEQ ID NO: 107790 - DNA, 344 bp, Zea mays
  Clone ID: MRT4577_29801C.1
cccaccggccttttttttaaaaatcacttattttctggtatataaactatagttccggcaatacagggaacagttcggccattggtatttttctttacttttggccactgagtttccacccccatcagagtttccttagtagccaaaaaaccccggggggctttagcgctgggataaaaccccaaatccttctttccagccaccggccaaatggacgcagttttttaggggtccctcccattgtccgtggtaacggtttccgttgccaccgtcgccgtaaataaatgcctgaagggccggaccccggtaaaaacaagggcccccccgttcttgttgcaacactc

SEQ ID NO: 107791 - DNA, 433 bp, Zea mays
  Clone ID: MRT4577_29802C.1
ctcacacctcagtggacgcggcgctcctcttgctgctgggtccgcccgtcggtctactcgccgcgctggcattcctcacgcggccccacgcccggatcgcgctcaaagacaggcacgtcttcatcacgggcgggtccagcggcatcgggctcgccatggccacggccgctgcgcgggagggcgcgcgagtctccatgctggcccgcaaccttgcccggctcgaggaggcgcgcgccgccatccatcgcgactcggtccgcgacgacgtcagcgtccacgcggccgacgtgcggtacgccaacgccgtgatccgtgctctgcaggaggccgtccccgtggacatcctgatatgcaaccaccgcgagttcgtgccgcaagatctcgtgaggcaggacatggatgagatcaataggattgtggacatcaaccttat

SEQ ID NO: 107792 - DNA, 509 bp, Zea mays
  Clone ID: MRT4577_29803C.1
tggacgcctgcggtaccggtccggaattcccgggtcgacccacgcgtccggccgagcgccggagttgcttgtggccgccctgtcccgaggacaagaagatgccacccaagcgcatagctaagagaaggtcacccccagaagatgccatccccaaaagcaagaaggtgaaagtctcacacaggtcccacaacacagaaccaggcttggtgctgacactgggccagggcgacgtgggccagctggggctgggtgaaagtgtgctggagaggaagaagccggccttggtgccccttctgcaggatgttgtgcaggctgaggccgggggcatgcatactgtgtgtctgagccaaagtggccaggtctactcctttggctgcaatgacgagggtgccctgggaagggacacttcagtcgaaggctcagaaatggtccctgggaaagcggaactgcaagagaaagtggcgcaagttgtatgggtggacagtcgctcagcagccctcaccgaagac

SEQ ID NO: 107793 - DNA, 442 bp, Zea mays
  unsure (1)..(442): unsure at all n locations
  Clone ID: MRT4577_29804C.1
cccgccgaggaccggccggaattcgggcgacccagcgccccccgctggcgcgggcaccccgccgggggcctagggcgcaaaccggccgggcgcagcggcgcggggttcccgggggcggcaagacatcgcggcgggaccgctccctgacgcgttggttgctacgggggacgacgcccccccgacggcagctgaagacgngaccgcccggacgaccgcggggaacacgnggtgctcnncgccggcccggcgcgncacgcccacngccccagaagcacncccgggnggcgaggccaaggccggggagcgccgcgccaagggcgacgacaccgaggccagcgncgccgacaacgacgccgncgagaagcgcgcgaggaaggagagnccggggancggggacgaggggccgcncccggcggacggcaacggcgagcnggcgcgcgcc

SEQ ID NO: 107794 - DNA, 285 bp, Zea mays
  Clone ID: MRT4577_29805C.1
aacacaccctctataatgataatttctgcaaccggcctgacttgaatcacctattgcaccactgtattatgagtggctaggcctatgaggctatgaaacttgctacatttgatacataatagatacacacacttgaggagtgtatgccaagggcttataattttccacaacttttgtacttgaatattagtaacaggacatcgctctaaaaattgcacacttacatttgcaaatactgtggtacatacatcatctataaaattacccacaatcaatttactgttg

SEQ ID NO: 107795 - DNA, 1121 bp, Zea mays
  Clone ID: MRT4577_29806C.1
ggcacgaggggaagtataacacggactcgtagcccattgagtgctcctagttcaggcattgtcgctgagcagttaattgagaagatacgaactgtgtagagaatcagaaaagtacaaagctgttatcctacgtatagacagccctggtggtgatgctcttgcttctgatctgatgtggagagaaatccgactactagccaactctaaacctgtagttgcccggccgggtgatgttgctgcaagtgggggctactacatggcaatggctgcaccagtaattgttgctgagaaactgactctcacagggtcaattggagttgttacagggaagttctgccttcaaaagttatatgagaggattgatttcaataaagaaattatatccaagggtcgatatgctgagcttaatgttaatgatcaacgacctttaagaccagacgaggcagagctttttgaaaagtcagcacaaaatgcttatgcattgtttcgtgataaagcagccatgtcgcgatcaatgagtgttgatcagatggagagtgttgctcaaggtcgagtgtggagcggccatgatgcgttttcaagagggttggttgattcagtaggtggactctcacaagctcttgctattgcaaaacagaaagctaatatacccaaggataagaagatccagctagttgaagtttcaaagccctctccatcattaccggagatcttatccggcattggaggttcgttgcttggagttgacagggcagtgaagggagtgctccaggacatgacctccctaagtggagtccaagctaggatggatggaattctgtttgaaagtttaggagacatgtcaggagaaaaccagttattgttgcttgtaaaagatatcatgaactattttgattaattctagcattcaggtccttatgttccaaacatttgtatttagagatgaggggaaattcataatgtcactacacatctatcttgcacagaaacaggtagcttgtgatttgtgtagttaatttagcattgtatatgctattttattcttttgcactgatgactaaccttatcatgattgatatactgggcaaaagtaaaaggaactccaccttttcttatgcatg

SEQ ID NO: 107796 - DNA, 352 bp, Zea mays
  Clone ID: MRT4577_29807C.1
cccacgcgtccgcagtaatgttgtaacttgaaaaaaaataagatttattttcattggaacaaaaaaaaaaaaaaaaaataaaaaaaaaaaaaaagggcggacactaatgcagatccaaaactaacatacacaaacatgcaaaaaaatagctcaacattaaaaaaaaaaaaaagggaattcacttttcgaggatccacatttacttccactggcaacacactggttatacccaatttaatcgcccttaaatccattacccgtgtccgcagtttgacatcatagcgactaggaaaacaccgaacgacctaacctaaatgccttcaagctgaatgcccatttggacacgctctgt

SEQ ID NO: 107797 - DNA, 454 bp, Zea mays
  unsure (1)..(454): unsure at all n locations
  Clone ID: MRT4577_29808C.1
ccccacccaaaaataatacctttttttcccaatttggggggaaaaagccccncccacaaacgtccgcccctgaagcaccccaaaggtggtaaccgccgggtcccaacaaacccgggggatcttggccctttggccccccttaaatgtttttttttttccccgcccgggaccagaaagggcccgggggggggcccccccgggcgtgccccgccacaagaacaacagaccttccccattccaaaccacggaggggggggtggggctccttttttttgcccccccggggtttttctcccccccccctttttgcgtccactggggggggcccccccctgccccccccccaaaacttgttttttnggttactgttaaaacccctgtgcttccttggacccgcccggaaggcccaaaaccctggggcaatcggaaattttggcgggcccttggaaaacgg

SEQ ID NO: 107798 - DNA, 902 bp, Zea mays
  Clone ID: MRT4577_29809C.1
ccggccgggacactatcaccgctgcggccgtgcgtggaggcgtgaggccgatcaaatcggcggcgaatccccaaccctagcagcagtgggcggccggaccgggacgggcggtagacggctccagcacgcaacgctgacaggtttggccgtgcgaggcgcgagggctagacaggtgtcgcggcgccaggcatccagttccagggctgcgtgggctcgaccagagcgagtctgcaatccgcccgtccttgtccccgtcggcggccgttcaccagtgtcaggcagttatatggtgagtcatgtcaaaggcacgtaatgctgtagttgccactggattgctgctcttcgctggtgctggcttatcatttccgttccttttcgtgaaatcaaagaacaagcctattattgattcgacaaaacctctgccaccacaggctacttttcgaggaccatacgtgaatacgggttcacgtgatatcggacctgatcgtaccaactatcccaagaagtgatttgaatcttccatgacatttcggagtcccatttcactcgactccactgctgtgaaattgttcgttttggggccatcttactgtgcacgtgccttgatattgcaaaaaaataaaataaataacaatacctaaataaagggtggttattgaagctcctccattctccttgctcccaaacaaattccccttgcttccaaataaatcctagtgtaaagtttcccaatattgtatgggaatatctattttttacagattcatatatgattagttgaatttcatataaaaaaaaaaaagtttgctgataagactttattacaaaaaaagagttttaggcttgcgaaattggaagaacaggaacgacatcatttccaaaaaaaaaaaaaaaaagcggcc

SEQ ID NO: 107799 - DNA, 564 bp, Zea mays
  Clone ID: MRT4577_2980C.1
ataagatcacgcatcacttttccaagttcagcatatctatcattagtccattattttatatatgtataataagggtaagaaacttagcagctatagcaccactatacacaattgcagcttcaaccttgcattataaagcatccattgcactgagaatctgggagcaccggcaactggattccgcgttcttaaaacgggcaccagtgggtggagcaactaactgaactggacagacgaaactgtcactactgcaagctcctcctgcgcttctctctgggagaaactgaggcggtggactccgccacgtcctccacacctgccacagacactgactgcatctgcactgagatcagctgaggccgaagggcaccaggtccaggcggggaagcagagacgccaggcgtgttggacctcctgtgcagatgcaggcagtgggcagcagggtcttgacagccctggtgctcattgctaccgcccctgctgttgccttgagcactgcctgtaagggctgcagacagcgtcttcccgaagttctctgagctgctggttgcaccacgtctgctc

SEQ ID NO: 107800 - DNA, 919 bp, Zea mays
  Clone ID: MRT4577_29810C.1
ccgggaaaaaaaaaaaaaaaaaaaaatccctacccaataggccaccatcatccaccgctgcggccgtgcgtggaggcgtgaggccgatcaaatcggcggcgaatccccaaccctagcagcagtgggcggccggaccgggacgggcggtagacggctccagcacgcaacgctgacaggtttggccgtgcgaggcgcgagggctagacaggtgtcgcggcgccaggcatccagttccagggctgcgtgggctcgaccagagcgagtctgcaatccgcccgtccttgtccccgtcggcggccgttcaccagtgtcaggtgcggaggtgacaacatttctgaaagaagtaagcaagcactagttatatggtgagtcatgtcaaaggcacgtaatgctgtagttgccactggattgctgctcttcgctggtgctggcttatcatttccgttccttttcgtgaaatcaaagaacaagcctattattgattcgacaaaacctctgccaccacaggctacttttcgaggaccatacgtgaatacgggttcacgtgatatcggacctgatcctaccaactatcccaagaagtgatttgaatcttccatgacatttcggagtcccatttcactcgactccactgctgtgaaattgttcgttttggggccatcttactgtgcacgtgccttgatattgcaaaaaaataaaataaataacaatacctaaataaagggtggttattgaagctaaaaaagatattgaagctcctccattctccttgcccccaaacaaattccccttgcttccaaataaatcctagtgtaaagtttcccaatattgtatgggaatatctattttttacagattcatatatgtttagttgaatttcatataggcgtattttgttttgtagataagactttattac

SEQ ID NO: 107801 - DNA, 728 bp, Zea mays
  unsure (1)..(728): unsure at all n locations
  Clone ID: MRT4577_29811C.1
gacgcctgcaggttccggtccggaattcccgggtcgacccacgcgtccgccggaattgttaggtggagcctggtaaagggaagagagaggatgtggaataggaaaaagagaaaattgtactgtgattgatactgaaaattcgaataacaacggacgagaatgatgtgtttgtttctaaaagttactacttcggagagtaattttttttttcaaatattaaaaacaaaaagacccttacacttaatagggcttaccaacattcagcaaacctgcgtgttaaattaaaatgaaaatgttctgtcgaatgcagctgattataaaatacgtggttgtccccgacccttttattagagcaagttcagatgctttgaacgaatgttttttgctgtgttctctctttctcaacagaatttgccattttcagtggaaaacaagtggcggttgctggctatgatgaccgtgtactttggatctgggtttgccgcacctttctttatagtaagacaccagctacttaaaaaataaggatatttaattcatccctttaacaggtaattagtaagtttctaattttcctaaaacagtaatttctgttctataccctatacactcttccacaacatgcaagtagatagttgtcgccagattccttnaggttaagtgtaaatgtcatattggtagaggcaatttggaaaacctataaaaaaaaataagttttgatcagtaaa

SEQ ID NO: 107802 - DNA, 219 bp, Zea mays
  Clone ID: MRT4577_29812C.1
gacagagaaattgctaaaactcagccgactgaacttaagaaggactgcgttgatatcaatggagactcaactcaagaagggagtttcgtgatgaggagatacgtgatgtcaggcaattggacatcaggcacttcctgtacgcctgatcgacgctaatctttgaggcgcaacgcacctctggtatttaggggcaagttgatgggtgcaccacacctatga

SEQ ID NO: 107803 - DNA, 610 bp, Zea mays
  Clone ID: MRT4577_29813C.1
gcaattcagaatcacttggttaaaggaaatgctatggttatagtccttattagcatggtacttggggtactactgcatgttatggacgggagtgcatgacacatgaggcatgcaacgcttacactcccggtataaagtgaagacatcaagctcgccatcgatggagagaatgctgcgattaacagtatatactggacaggcatgtagcaactatgaatagccggcacagacaacgatctgttaagcgctacagactttacctcatagtgaccactacccaaggctgccaccgcggctacaagatccacggagttccaaggcagcaagtatcaggcccccatgatgatcgattgattcatattacggcaataaaatcatcagctattaatgaacactaagtatctataatggaaccaactatcaaaacaacatatctaataatcatatatctgtatcttgtgtggatgcgagtagaaccaaaatgggtattacaagctgtactacagagatatggctgacatcatgaaggataacataactatgaagatttggatgatcattaacatccaaagtaaatgtttatgatacacatgaatagaactgctaatac

SEQ ID NO: 107804 - DNA, 763 bp, Zea mays
  Clone ID: MRT4577_29814C.1
aacttctcatctcccatcccatcggctctgcttgccagttccgcggtgagagcccaccacttctgcgtctcaaggggcagaggttgtacgaatcgctgtggccttcgccgccggccgccggcgcatcaaccaccgcgcgggcacgggcgcacgcaggtgacattccgctctccggctctctcctccggaagcgggtctctcccggaacagaacgcctacctactctctcggcaacgtttctaaaagttcgttgaggcatcaaagaattgcctgccctgcgccgtgcgcgtgtgtgccgtgcgacggcgcggccgggatgggcaagatgagctgcttctccggtctgctcagctgcaagaagaaggcattggagggtaagaacaagggcgcttacgccaagaaggctagcggcaatgattgccccaaggtgaagccggtggaattcatggacatggtggtggcggacgctgttgtggacgacgtcagcaggtgccgagacagcgttccagcgtctgcatgcagcagtaggcttgtcgttgtcgctcacgcagccgccgagctggcacgtcatgccactggcgagaacggcgacaaggccgcagctaagagggactcgtcctccgccgctggctcctcctcctccggttacagcagcgacggaacaggcgacgatgccaagagcgccgagccggacgacggcgaaccctgcagcctcggccgcatgtcgccgacggcggcatcgccaaagctgatgcgctcctgc

SEQ ID NO: 107805 - DNA, 291 bp, Zea mays
  Clone ID: MRT4577_29815C.1
atgtgatggtgtaggatcattagttcagctttctggtctactagccaagcttgcgcttgggggggaaactgaaggagcaccgtgaacttgttgtattacagatgataatagcttgagtcatgctgtgctatcatggtaacctatttcagctaataacgctgtcatgcttggcttaatttctactgacgcgatgtatctctgtaagatagtgcttactgaagaaacaactatcatgtttacccagagtggtagatctagctgttgtgcagcacccagagaaaggatatagac

SEQ ID NO: 107806 - DNA, 276 bp, Zea mays
  Clone ID: MRT4577_29816C.1
atggtgctgcgagatatctcggggaaagaagccatggcccagtggggtcacgtaggtgtggcacgggttggagaggatgccgcccgggacggagaccagccgatgctgatcttcttccccaagggctccagccccaacgctagcgggcccgggggacggcggttcactgaagatggagacgaggacatggcggcggcggtgctagggttatggggtttgtggaagacgaatgagagggaagtcagctcgctgctcgcgtcgaacatggaagtttag

SEQ ID NO: 107807 - DNA, 432 bp, Zea mays
  Clone ID: MRT4577_29817C.1
ggctagcggcgcgggcagcacgggccccccgcaaccggcgctcgccccctggttcccttgcccggccttccggccggggcggttccccgtggggcagcgtcaatggccctggcctaaacggcccggccgcaagcactggtggcgcgcacagacccggcaagtgcagccacggatcaggccaggtacgtccacggcgcggggtgctttgcgcggctccgcgacggcgcacaggcggctcaggcttgcgggctcgcggccccaacccccggctggcgcggccccggccctagcctcggcgcgggcgaggccttccggcgcgcggcccctgctgcgagcgcatcccggcggcgagcgcgacccctgctgcgagcgcgtcccggcggcgagcgcgacccctgcaagtcacaggctcggggcgggcagcctattcgc

SEQ ID NO: 107808 - DNA, 476 bp, Zea mays
  Clone ID: MRT4577_29818C.1
ggcaggaacaggggaagatcaaatttcacgagacgaagttcgagcaaagcttaacacaagcaagtgttgtttgcccaaatgggcccaaaggctaaaacaattatgcccccataaactggtaaacacaaaaaacaaaggaggggggagttaatgtacaccaatggctgacccggggccaaaaacaaaccaagccctacaaaaaaaaaaagggtgccggcggcccatgcttgattgattgattcccccaagaaaaagaaaagaaaagatgccatgggggccaagctggtggctcacactactggtactaagggtacagaaaaaaatgatttacacaggcaatattggacaaaaggacgatccacacaaaacagagcccccccactcacggggggaacggaaaaggggccctttgccccccaggcggaacgaaaggcattgggaaagtcaaaagaaaaatacccccccaactcaggggc

SEQ ID NO: 107809 - DNA, 576 bp, Zea mays
  Clone ID: MRT4577_29819C.1
agcagtggtaacaacgcagagtacttttttttttttttttttttttttttttttttgcttctacctcgatcggataagtaggtctcggtaaagtaaattaggactaggataggatccaaattaggtcttcgatcttaagtgtccagcgtcacgcgttgacttcatctgcgacggactcgtcgaggttagttccatgtttagatacgatatataaattgacgatccgacatggagttggcagagtcgcgcatcaaccagcagcatgcacgcacgcatgattttacctagacacctagtactccctcctccatatcttttatttgtcccaatttaatttaaaaacgaactaagcggacgacaaatattcaagaatgaagtattactcaacatcagctccctcaccacggccttgaatcatataaccttgttccaggattgttgtacgagggtgagcgcatgtcctctgctccgctgatcgtttcttcgaaatagacaggggaagtggtctggaattctagtcaaaatgaacattgggaaaattagcttccccgcgtactctgcgttgttaccactgct

SEQ ID NO: 107810 - DNA, 246 bp, Zea mays
  Clone ID: MRT4577_2981C.1
gacaatggctctataatccatactgcttcctttctacgccctgctcatgagtggtgggggggacgatcgctgtgtgtgtcccgctaccttcaatcttcatgggcctggcaagattcgccaacatcgccttctagcaccttacatgctcgactgagttattggccatttaagttgggatcagatgcatgaacagaaacggcgctttccaaacacaggccatgtattatatccaaaaatatgctgtct

SEQ ID NO: 107811 - DNA, 302 bp, Zea mays
  Clone ID: MRT4577_29820C.1
taatttcccaaaagatctgttgcaagtagcattgtcctgccagctattggtgattcagccattctcaatacaccaaatcttgcgcccaatgaatacaaccaaactgtatttgcatcacaaatacgccacggcgcaacacataaattgccaaacgttgccgatgaggcgcactctgtatctaaagacgcttcctcccttgatatgttaccttcagcaaagggaacagatgttgaagccccttccatgagtgctaacatgcacggttcatcaacgccacacgccaatgcacatgccgttgaaaa

SEQ ID NO: 107812 - DNA, 462 bp, Zea mays
  Clone ID: MRT4577_29821C.1
gtacccggtccgtattcccggggcccgcagaaaacaaacctgcgaatacaactgacgccactggctcgactccagccagcaccaaactacgaggcccgcagaagcaaaggggcgcaagtcaacgggcggaaaggcgcccgggaagcagctggagaccacagcggggcgcatgtctgcgccgaacaccggcgggatgaagaagacacaccgcttaccgccccagcaaccggagggctccgggatatccgcacgtaccagaaaagcacagaactattaatacgcaagttgccacttaacagcacctacttacggcagatcacacaggacttgatgacctatctgcacttgcagtgctgctgcgaaaacatcactgcgcgaagccgacaaagcctacctactgagggtatatcaggacactaacctatgctccatgcacaccaagcgcgtctcgcatcatgccca

SEQ ID NO: 107813 - DNA, 546 bp, Zea mays
  Clone ID: MRT4577_29822C.1
tgtgattctatatattgtgtcatgttcctggataatgagtaatcgaattaaaaaatggagtactgttccattgatgtggatattgtcgttgaatattgcaatccattttcacccttgctagctttcacgtgatttttttctgaaaagcgagtatcgtctggagtcgctaaaacaacgtgtacaggctctgattcgatttaagggcccaggttgaaatgtcccaggacggtggggggtgtttcgcaaatactcagagcctgattgacgagatacaagaggtgtggtgggagggtttaaacgcaaaaacagcagacaacgttggattcagattggatggtttggatggactgattgcatgcttgcacaagataacggattgcacaggatatggcgccgaggaagagagtatggttggggaataaacgagttttttttattcatgcaacccccaacattagactctcttcaatgagatttttgcaagcatggcaccggctttaatgggcttcacacgcacggcaccgccacgtgccaattgcaaacatg

SEQ ID NO: 107814 - DNA, 328 bp, Zea mays
  Clone ID: MRT4577_29823C.1
cccacgcgtccgcccacgcgtcctcccacgcgtccgcggacgcgtgggtaaaaaaaaaaaaaaatttttaataaaaataaaaaaaaaaggtcggcagataatatagtaaaaaaatttatattctgttgtctacttattttttaatttttatagggggggcccttctttatagttcaaattttccttcctcttccatggccacgacttttttcttcttggtgtcacccaactttatttcattggccgtctttttacaacttcttgattgggtaaaccctggctttcccaatttttttcgcctttcacaacaaccctctttttcaagttg

SEQ ID NO: 107815 - DNA, 228 bp, Zea mays
  Clone ID: MRT4577_29824C.1
aggttaaacaggcattcaataattgagttatgcatgtagcaaagaaacagggtatcgattattgggaggacttagaaagtaggctggtaaatgggccacaaacaataatttgtgttgacggggccctatctaatccataaggggacattggtcctcgggataaaccttgcgaaagccccaccacaatacactggcaagggggggaaaacctttgctataaccacacct

SEQ ID NO: 107816 - DNA, 2463 bp, Zea mays
  unsure (1)..(2463): unsure at all n locations
  Clone ID: MRT4577_29825C.1
atgctatcctcgccggcggccgggaaggccgatccccgccccaaaccccaaaccctcgtcgccgcccggcggccgtcgcccaagcgcacccgcggaagatgtcgctgtcgaagccggtctcggcacgccgcctcgtgccggcgctcttcccgctcgcgcacgcggacgccgcctcggccacggcttcccgccgcgagcgccgtaaggacacgttcgtcgcgacgcccccgatccccgcgccttccccgcgggcagtgcgcctcgcggagccgctccccacgctggcgccgtcacgcctcgcgttccacaaccggatcctcgcgctcctctcggggccccaggccgacctccccgaggcggcgctcctcacccgccacgcgctccactccaactgccgcccctcgtccttcacctgcgccgccgtcctcgccgcgctcctccgcgcgcgccgcctcgaagacttcttcgcgctgcaccgcttcgcgctccaagccgccgtcccgcccaccgccgccacgcacgtgctctacctatccgcgctcgccgcgcgccgcctcgccgacgacgcgctccaccacttccgcatcatcgcccgccccggctcccccgtgccgccctccccgacggcctaccgcgtcgtcgtcgagtgcctcgttgcagaccacggccggctcgcggatgccgtcaagctcaaggatgagatgctcacctctggattcgtcgggccggatcccaaggtctacagccttctcatggctgggttcgtgggtgctggggatggagccaaagccgtggagctgtaccaagaactcaaggacaaggttgggggcgaaccaattctggatggcattgtgtacgggactctcatgaaggcgtacttccttatgggaacgggggaaaaggttatggagtgttacaaagaggtgctgtgtgttgaatcggcggtgaggtttggggccgagagctacaatgaggtggttgatgcgcttgggcagaatgggaggttggaggatgcacttaagctgttcgacagaatgcttgaggaacatgacccaccactgcggattgcagttgatctgagaagcttcagggtgatggttgatgcctactgtgctgctgggagatttgaagatgcagttgcaatgttcagaagaatgggggaatggaagctggtgcctgatgtggcatcctataataatttgattcggcacctgcagattaaccagctgatagataaggcggaggtgctctacaatgagatgtgtgagagtggtgttggtgcggataaggagacatatttactgctcatggaagcatgcttcagtgttgatcgcatcgatgatggtatctcttactttgacaaaatggacgaattggagctgaagcctgatgcaactgcatatcataaacttattgatggcctggtgggtttcagtatggtcgacaaggctcaggaatacttcaatcagatgaaggagaagggagttaacccaagcatctcaagctacgagacattgctgaaggcatatattgctgctgaccggttggatgatgcagtcaatgttgcaaaaggtattcttttgaatgagaaggttctgttcagctatggaatgagggagcttttagaaggagcattacgtggagacgggagggaaaatgacatcgccaagttatatgaggatgtggagagggaaaaggctgaagcggaagcccgggctgcagaagagaaggcgagggcagaggctcttgccagggaagagagggagaggaggagagcagagattgctgctaaggatgaagccgcagctaaagccagtgccgctgccattgaagctatcctagcccataaaaggaagacagagaatgaaggaggagcgcctgctcctgatgcaaacaccctggatggtggctttctcagtaagctaggctttaaaacagccggcgaaggggcacttcaaggcaatccaacagaaagtggagacgatggagaaggggcacttcatggcaatccaacagaaagtggagacgatggagagggggcacttcaaggcaatccaacggaaagaaatggaggcaatgtgcagcagggatatctgtgatgaccacaaaaaattatgtccacaatttgctcatcacattcaagtcataagctaccgtttgtcagtttatatatcaatataatgagcacgattagtgatttccgcaatgccaaaaattagcttgcttctggctcagcattgtgttactgcagtggatgcatacaaacataattttgatgtgtaaccattggaaaccattttccatctgttcaggttcagtatcaaaacaactgtctgtttgctaccagtagcgtgtaaatgatacgaattgttgttgcaaaatcattgcaagctacnnnnnnnnnnnnnnnnnnnnnnnnnnnnnnnnnnnnnnnnnnnnnnnnnnnnnntaccccgagcttcc

SEQ ID NO: 107817 - DNA, 386 bp, Zea mays
  Clone ID: MRT4577_29826C.1
gacccacgcatcaacggacgcgtgggccgcgctacacgcccgcgctgtctcctcccgagcgttgtatcctcccgagcgccgcaagcccgcctgcgtcgagcgccgcccgagcgcctgcggtggacggaggagctgcaccggcagttcgtcgagtgcctcggtggccaggacggtgagtcagcccgcttctaatacttcccttcgtgtccgatccaaaaatatgattccatccggccatgtgggtcgctagggttccatccggccacaagagcctttttgctgcttctctgtcccttccgaccgctgtgaagcaaggcccgcctcgccgctcccgtccgggcgccgccgcagcatggctcggcaagaaagatgtccccagcagctcc

SEQ ID NO: 107818 - DNA, 347 bp, Zea mays
  Clone ID: MRT4577_29827C.1
aaaatatgagaattccggggcaattgattggaagagttacataacattacagctgggaaaactaaacgcgaggcatttttaacaaaaaaaaggtttcgtttttctgcgattctaggttaccatattggacaaaaccggggcgcggaacattaaccaaaaaaggggctttaatgtgatttccaaaaccccttaaaaaccggttattaaaaccccttgttccaattttcaccggtttattttaccggggaaaaagggctttggaggttttgtttttttttccccgcccccttgggggcttgggttaaaagtaaaaccctaagttttttccccctaaaggttgggcggaa

SEQ ID NO: 107819 - DNA, 1472 bp, Zea mays
  unsure (1)..(1472): unsure at all n locations
  Clone ID: MRT4577_29828C.1
tcgagccggctaccactctctctctctctctctcagtctcaccggcagcgctatcgtatagcatgggctcaccgccggcgacgtggccgcggtggtggacgaggaggcgtgcatgtacgcgatgcagctggcgtcgtcgtccatcctgcccatgacgctgaagaacgccatcgagctgggcctgctggaggtgctgcagaaggaggccggngacgaaacggagacgccgatcaccagaaattgctaagaacgccgatcaaccagcaagatggccaccgagacaacgtgcgcatcctcgcgtgacgggacccactcgccgatcaacgagcaggatggccaccgcgccaccggacgaccctcctcatcctcctccggcggaggcgggcgccgccacgccaagccgttcgagaccgtcggggttcgagcagctagacgggcgagtcaaggagctgacctcgtcgcaggcggagttgctggagaggatccagaagctgaaacatgaggtgcagaactggcgctccaatgtagagacgcaggtcaagacataccagaatgaactccaggatctcaagaaaggacttgactctgaagtggaacagctgaaatcggaaatgaaggcggttaggtctgcggtacaggaagagaaaggcaatctacctgcacaaaataccgactttagagacgaacaataaaaatgcaggacaagcttggcagacaccaggccaagcacagtattgaagagcaaacagcaacacagccgtgaattggtgcttccttgcagaggtgaagggctgttctgctggatattcagatcctttcaatggatcaaaaggggggaaagctggcagatacacggaatcacatgaagtattcatttttttaatatataccagcaagtttccaagtgcaaatatctctataacagtgagcaatttcaagagtaatgtacaagaactgcttgttttgtaacaattccatgactactaatactactattacaaacttaatcttgaaataaaatctgcacagcctcctattgttccagtgttctaaacatgcttaaaacaaaaataaaatttgttacccaatgaggaattggaatctggaggtggccatgtaatattgcacgtcagcatgtaatcatttctgcaattttgctgcttcatcacagctagctgagatctccttatgtcatttaactgaaatgcaacagtctagtactccatcccaccttgtaaactgaataacattatggagttaattctggacttccgacctcttcagttgctacagggtaacttacaaaaacttaggttgctttcccttaaaagcgaagctgcctaagaaaccttaacatctttccggttatctgtgtgaaggcttcctacaagggcagaatatagggagtcatctgggatcaatccagctttcagcatatcatcatacagctggaacgccgcccggacgctggg

SEQ ID NO: 107820 - DNA, 611 bp, Zea mays
  Clone ID: MRT4577_29829C.1
cccccaaataaaacttttttgttaaaacaaatttttgcgtcctttttaaaaaaaaaaaagggggaaaatttcatttttcctccccatcaaaaaacctttaaggctttttttttttgattcccgtcccttttttttttaggaccaaaagccgagggtttatgggggttccaaattgcaaactgtttaaaaaaaaccaaattttcaataaaaggaaagctggaactttttccacaaaaaactttttaataggttgggggacagttaaaatcccctgttaaaaaacccaagggctttttgtagggcagggttcagggaaaacttttcaccctgggcaatttgccccatgagctggccctttaggaccagcccacccttggtttcccccttagaaccagctggggggacaacacaggggtcatggcccccccttgccaaaagttaaacatcctaatgctcctttgaaaaattttttgtttttttccaaaaggggctgggggctaaaaacccattttgaagaaaataattcccccttttgatacccctccctaaaccccgccggagcaattagttcgggccctcacatttccagcctcttccttttaaaactcatc

SEQ ID NO: 107821 - DNA, 211 bp, Zea mays
  Clone ID: MRT4577_2982C.1
acgaaaccgatccataataccggtttacttaaaacgcgtgccacgataatactgctgaccaacaatagggtataacgcggttgcaccgggacggctacggtaaatcgagcagacactgggccatccaggcactggaggtgacacacacaaacctgacacaaaccgcttatgccacctgcatgatcttggggccagggccaccggttgcaga

SEQ ID NO: 107822 - DNA, 314 bp, Zea mays
  Clone ID: MRT4577_29830C.1
ataatttaactttatatttttcatttttttttttaacacccccacacggaggcttgaattgcttcctgggggattacatttgtgagggggttgggcctcccccccgcccacctgaaatacagccatgcccctgcttttccagataataccatggagaaccccccggcctccgttgggaaatcttaaagcccaccccaagtgcaagcccccttcctgaaaggaattccaactggggctgggggggggccccccacaattgcaaaaaatggacgttgtaaatcctagccatccccccagaacgggggaaacccccc

SEQ ID NO: 107823 - DNA, 497 bp, Zea mays
  Clone ID: MRT4577_29831C.1
tttgtttcccttgccgagatcctctccgctgaccgtaacaaatccactgggttgggagtataaaaccggcaccctgcaaccccctccctccatagcctttgcagcaagtcgagataacccatccgtccggtggcatggcgagatccccaccgtggatcatcatggcggctgccggggggaaacctcacctaaatcaacccgtcgctgtgttagccaccaccaccgactggggtgcctcgtcggcgctaacagaagggaagcaagagagaagctgcgaatgggagatccgccacgggagttccatgcgccattctagcagagaaagagaatgggtccgtcgtgggccaacctcgcctcactggcgatttagcctcgaactcccctccaccagccatgtgcccatccaccgtggcctggcttcgacaagtcttccccactggtgagaattccctcatgcgattcgccttggttcttgggtcatgttgcatcgatcggat

SEQ ID NO: 107824 - DNA, 471 bp, Zea mays
  Clone ID: MRT4577_29832C.1
atggcctcagggcaaacgctgctgaaaaggctctcgttcgcgtcccctcacgggggacgagaaccagccattaaagccaaagagccggaggtctggagcgcaggtggcactgacggtctcatcggcagaggcaaccgcttcgatagaggaagcctcacctatggcgactaccacctctgcaccgacgacagcggccacctgcccaccaacaccgcaccggcaaacggcggccgccccaaagcgcaccggcaggtcctcactcccgtcctcgccctaggaacgaggacaggaccgtcccagaacacgagtgccgccctcgcggcgtacgacgtgttttgcgaccccacggtgcagtcgacagcacaaggaggaccaggacgtggccggcccgcgcgcgaccaacacccctgtggcggacgggcagccgtgctccgccccagcggtaggaggtggcaccggaagcagcgctag

SEQ ID NO: 107825 - DNA, 230 bp, Zea mays
  Clone ID: MRT4577_29833C.1
tctttttttttttttattttttttacggggggcttttttaaattttgtcagcgttctcaaacccactaaatgaggcattaaggacaagagacacaggcagcaagcagaccacgcacaaaagaaaccaccatactaaaacgggaaaaaaaagaaccagagcaccaattaaagatacaagatagcacagccacgacaaaaagagcgggacaacaggagggcaggcctcacaa

SEQ ID NO: 107826 - DNA, 623 bp, Zea mays
  Clone ID: MRT4577_29834C.1
attccacccttaacatctcctcggattttttctcctacgagccgctcgttcgaatcaaataccacctccatgcaggtccatgccaccatgggccgaaaaaagacgctgggaaaataatgctgcaggtgatgacgccgctgactagatagcgctccctctccatgaatgcatatcgaggagaaccgtgactgcgctcggagagactgctgccaagcataagtacggagagcgaaacgttgccgatgaagggcaaaaagagcgcgcagagctacgatatctacctcttcattgcggtgaactcggcgcacacgaaagttggaagctactgcaaggccatgttcttcctgaactccttcatgagcgatatcatcgagaggctcgctgttgaggacatcaatatcgctcgctatagaaagagaactaccatcacctcccgtgagatcacaacctccgtgcgccacttccttaccgggtagcttgacatagcactgcgactccgaaggctccaacgtcgtgcaccaagttcacctcgtgctaaggtgcatggtcgtcgcttgcaggattctctcctggggtcacgacactagctgtagataggcgctactgcctggtgctctatatgc

SEQ ID NO: 107827 - DNA, 407 bp, Zea mays
  Clone ID: MRT4577_29835C.1
aagccacccgttacgtaacacttgctgaatatgttatatgttatgtatggtgttctataacactataaggggaggcgtatttattgaggaatgatgtctatatatgcaactagactatacccatttaattctgggaatgactgctaattgtgtcaactaatactgaatggaactttgatatgcagagttaaaaggacactgtttcactatcgtcgcacaaactatatatatgtagcctaaatctaacttgaggactagaatcagaactgatggccctgtctgcataacaaggatgtccaatgagacactactggtttcacgcatggaatacttctcggaagtcatgaccgtttacaagccaaggcttcttacatcactgaagctataggcaatatattgatctgatg

SEQ ID NO: 107828 - DNA, 163 bp, Zea mays
  Clone ID: MRT4577_29836C.1
tggcgcgcgccggttgggataccctggaggtgaagccgatggtgcttgagttagcgaggtcggtgaggaaaaggagtttatggtgacggtgacgtttttttaggacaagcttgggatgggcttcagtttttgggaggcttgtttggacagacggctccctctt

SEQ ID NO: 107829 - DNA, 388 bp, Zea mays
  Clone ID: MRT4577_29837C.1
catgatctagcgctgatagctagtcagccattgtcaccttctacgtgtacagacctactcaagtatccacttcgcgggctcccgggtcccggacgccacgcggaccacacaggcggtcccgtcgaggaggacaccggcccgagcggcgccggcgcagagccaatctgagcgaacatagtgctgcccaacacatcctacgaccggacgctctttcggctcagtcccatcaaggagtccatcaagaacggcgagatgacccgtgactacaagaccgacatgatcacctacgccaacaccgacgtcgccatcgtgggcgccggctccgtggggctgaacggcgcggacgagctctacgaggaccctgccgggagcatcagcataggggagc

SEQ ID NO: 107830 - DNA, 655 bp, Zea mays
  Clone ID: MRT4577_29838C.1
gacaactaaaaaatgaatcctgccctcaatttggggtatttacatttttcaggagcacataagtgacaagcctggaaaaaatgaattttcaagaaactatttcaaaaaaaaagcttcatagagcatttccaccaaattgaacatcccatttccctaaattttgcaatagggcaatccccttcaacttaaaaaaaatttgagggagcggtgcttcaggaaattgaaaaaaactcatcccctttgcctaccctgacatatgggagtatgggacccacacatcagtggctaatatttatccaactcccttttttcctttccctttcttctcttggctgctcccatgcctcagcctcaagccatttgccgtccacacaacccagaatacaaattccatgtggggccatgctggagggccggttatatgggtgacgcccgctgccctaaagcaacatgcagggagaggaggccaagcacgggaaaggcggcctccagtaacgtcatcctcttaaagtttgtcacggctcaacggtggtgtggggcagctgctaacgtggagcaaggaaggtgcatcccggcctggggttgtgcaagggcatggcgcagaagcagggccatctttaggggcacagcattggcatggctgggattcggccga

SEQ ID NO: 107831 - DNA, 149 bp, Zea mays
  Clone ID: MRT4577_29839C.1
gcacgaggcggaggcattggagcagtccaggcattgaaagctcaaccgcgacgtggaggccgtggcgctgcccgtcaggaaccgtcgcagccaggcattggagcagacagctactcgtgccacgagagatgggggatttttttttgagc

SEQ ID NO: 107832 - DNA, 590 bp, Zea mays
  Clone ID: MRT4577_2983C.1
ccggccgggctttatccgcacgcttgttgctaccatgaattgcctcccctagccgtcgccgccgctcgtctgcctgagaggagccgggaccgaagaactgccccagatctaggatgagaatacgctgtgcttgacctaccacggagtctgttgcctctggagcatggagaaggggacaaattcgtgagatctcgtgccggatcaggcgtgcgaactcgaaaatcaggggatgcacccttagctcctgcgactggaatcactgggactaatggcctctagggctgtaaaaagatctagcagtatcacggtccatgatgggtgaagctgcccattggctacaggactgaggccgatcgtacctgccggatgcgtgaagagatgttccatggctgctgcttactgcaacatgcacatataaaccatcactgatgtccctttaggctatctcattctagtgaagataggagtttgtcctgtgtcactatgcatctctgtccatctctgtagactgctgcttccttgtagtccaccagatccacagccgtgctcattgcactcctccctcctccgtctgctggattgtgccatga

SEQ ID NO: 107833 - DNA, 359 bp, Zea mays
  Clone ID: MRT4577_29840C.1
tttactttttttttttttatagcactctatatagactttcgcgcaggggcccaaaatcccggacccgcccttccaaacccaacaccttgagagcttaaacacctcactaaaacccggggcccaccaaaaacacataaaatgttttaaatcagcatcggctatagaatctacaataccgcgtttgcatgataaacctttggtacatacccccttcacaaacggtaatcctcacataaaccttcctcgaacagcccttcatactcagttccattgacgacttattgctcaactccttcattcatttaacgctttggcttacgacaaccctcacttgtttagctccaacagcctttttgata

SEQ ID NO: 107834 - DNA, 828 bp, Zea mays
  Clone ID: MRT4577_29841C.1
atggctagtagcactcattcttctcatgttagcaaaaatcatgcttatttatatgctcatgttaagaatgctcataatgttcatcatgcttctcattatgctcatgatgcttgtgttgatcatgttattcctactaggcgtcatgttgttcataatgatatttattctccacatggcatgattgcatcatctagtattgtatcatttgctcatggtaggagtagacttaggcacaatgttgctcatgctagatcttgtaatgtgccaaaggccaggaatgcatctcatggtccttctatctcataccgtacatctgatgcttcctatgtgttatactgcaaatttggtaaagtagttgctgctaatgtggggcccaagcgcaagagtggtaagacatgtgtttgggtttatgcatccgtgggctcaagctgggttatcggcagcggatgctcaaaccacatgacgggggagaagcggatgttttcttcctatgtcaagaacaaatattcccaagactcgatcatctttggtgacgagaatcaaggcaaggataaaagtcaaacccaagagaccttaaagcgattcttaaggcgagctcaaagaatatggcgattggagatgtgtgaccataggagccagaagagcaaaatcaaccctcttcttccaatcaggcgcaacccccaagtaaagatgaggaacaaggacatcaagataatggcaataatcaagggggagctaatgaagaagacaaggatgaagaagaaggtccacaagcgtcgcaacctcgagtctgcaccaccatacaaagaggccatccggtggacatga

SEQ ID NO: 107835 - DNA, 267 bp, Zea mays
  Clone ID: MRT4577_29842C.1
agagaatcacacttagtttgggagccacaaaattagaggggctcaattccccttattcaaaattgaataaaaaagatgaatttagcttcttcacattacttcagttttatggcttctaaacttgagatcttatttttttaagggatccttctaattttctcaagggaaattaggtcatttttccttggaaaaatagaggtaccaaactagttctaaaccgttttttgagaggccaaggccatggtccccatttatgggaagggaaat

SEQ ID NO: 107836 - DNA, 322 bp, Zea mays
  Clone ID: MRT4577_29843C.1
gggtcaagcaaatgatatcgttctattgaccctcctcgggtaaatcaagcaattccaaagctggagacctgagagaggtacaatacccatcaacttgaggggatttccttcaacattaaataacctggccttacatagtaacgggtctggtctggactaaaaagccccatttgcatcaggcaccacttgggaatctccaaaccaggccgggcagtaatggcagttccatatataagaccgactacatgggcttgctcgaccttctacaaaggatcggatcaactatggattacataggcatcaccgaagccaggaaacacta

SEQ ID NO: 107837 - DNA, 1213 bp, Zea mays
  Clone ID: MRT4577_29844C.1
attcgtggaccaagcagcaattgtggttttctaggtgtgagatctcaaaaatcatcttgtttattcattttcatcgaaatgttataaatttttgtttttatctcatcaatgatgaatgaccatttaatttttaatattcatttatctgtttctttgaaaaaattgttttcatgttgttgatcactaggcatgcacacaacagaatgacgttaccaattttgaattggaggactactatgtacttggcagaatgatttattattagttgaccttttgccaagcacaatggattaatttccatgttcccaaacagggtatatgcgaggataggactttggaattttaccttgtcacctatgatgacattggtggagtaacttgtcgacgatttagggatacacagagccaaaactctggctactctcctgttttttggacaacagatactacatttcttgaaccaccattctctgagcaagagctggttaattatgccagccgcgatcatatccaaggtgttacttccaatcatgcaggcgctgagaacagggttgtctcaaggatattacgcatcaattccagttatgatgtggttgatactcatctctcaactcccttggatgatgggaggagcgtggagggaaggatttggctatatgaggatggaacctttcggttttggatttgttggcagtaattcaattatagatctgaggcatgtctcctcggctggctgtattcttgatacttaacattagatgatctggatcttgctggcacataatttttgccagcgagacccttgtacagtacttggcgtgaggcatgttgcctccgatttgttgtactctcgatgataaggtcactgaatactggtcccttctggcacttagctgtggcgagagtgcccttgtaaaccgaaccttggttcctttgggcatgtacttgttgacataaaaaaaaaaaaaaaaataaaaaaaaaaaaaaaaaaaaaaaaaaaaaaaaaaaaaaaaaaaaaaaaaaaaaaaaaaaaaaaaaaaaaaaaaaaaaaaaaaaagaaaaaaaaagtgataaatttatttaaagaaaaaatttaaattaaataaaaaagggaaaaaaaaaaaaaagggggggggttgtttaaaaaaataaattttattgaactttttttttataagtagaaaatttttttttaagtggggaggaaataaaa

SEQ ID NO: 107838 - DNA, 359 bp, Zea mays
  Clone ID: MRT4577_29845C.1
gtgataatgctgccagatagtccagataggcacatttggagtttctctaattcgggctgctattctgctaaatgggcttttgatgtgctgctctatatagctacaggaaacgtatctggaagagttgggcacctcccaaatgtcgtatttttctgtggttagtagcccacaaccgttgttggacagcagaccgattggcgaggcgaaaccttgatcacccggaagcttgtgttttcttgtgactaggaaatggagaccattaatcatctgctgttgtcctgcgtttcgagtagcacctccaggtcctaggttcgatccccctcgggggcgaatttttggctaggttaaaaaaatcccct

SEQ ID NO: 107839 - DNA, 182 bp, Zea mays
  Clone ID: MRT4577_29846C.1
agccggccgggctgcgaggtttgttacctgacgaaggcgtcttcagaaacctcacctaccccgcggtcgaggggaaacgggcggcttgtgtggtgggataccaagccttctgctgcctccatgccccgctccttgccgcaagcatggggcagaaaacgggtggcccagggattccttaacac

SEQ ID NO: 107840 - DNA, 628 bp, Zea mays
  Clone ID: MRT4577_29847C.1
tccctcgaggcctgccgggattggtgcttggccgtggggagccaggcaacgtggaactggaaggaggaagatctgcccgccgcaaagcaagcatgggactatctgtaccaggcgggcatcaacttcatcgacactgccgaggcgtacggcgacggcagatcggaggagattgtcggtcaattcgtcagagacctcccaagggaatccttcgtcattcagaccaagtacatcggcacggcagcgggcatcaacaactacatccaccccgtagaggctcccgtgaagagcttgaaaggcagcctcgggcgtctcgggctcgagtacgtggacatctacttggtgcatggccccatccacccgcagagcatcgccaacgtcgccaagggcatggccgagtgcgtggagaagcgtctcacgcgcgcggtaggggtagcgaactacgagccggaggacgtggagaagatccaggccgagttgcggaaatacaagatccccctggcctcgaaccagtgcgagtacaacatcctgcgtcggtccccggagctgcacgacgggatcgccacctgcgagaggaacggcctggtcttccagtcctactcctcgctggcccagggacgactgacgggca

SEQ ID NO: 107841 - DNA, 566 bp, Zea mays
  Clone ID: MRT4577_29848C.1
ccggccgggatgacacatactccgattccgactcctcgtggatactctctctctctaatttccgcgtccaaccccaagttccatctactccatgggcagacgatcgatttggttcccttctctctctctttctgcgcggtcgacggaatggggatcgcgtttctgctacctggcgctgatgctgatgtggcgaaggattttgctctttccttgctgcaggcgcaactaggccagcacatgtgattctcgagacctttcatgcatgctgaatgtctggagctgaacgaggtgactgcaatagccatctatgccagcctgcgttcctatctcttaatcacccgcgtctcaaggtgtatgacattctacataccaagcctattgactatgaccagcgcaacaccttggatgatgcctctccgcagatgagaacatcaaagcgtctccgattgcgtgaccatatggatcattcgctagggagtaatttgctcctcacaatgacctgtacctctctatcagatgtacagctcatagtgatgagcatatactcgcaacgcgatgatctctat

SEQ ID NO: 107842 - DNA, 223 bp, Zea mays
  Clone ID: MRT4577_29849C.1
ctccggccggcgctcaaagacatcgtctggtcggcctacccccagcccgccgacgtgtgacgcccgagctggcgcctgcccgctcattgtgtctggatacgagtggtgccatagtttagtcagtgtcactctcattcccatagtgattgcgtcactgttttcgatctgataatgatgtgagatctactgagtgtggggggaagtcaagaatatcaattttacc

SEQ ID NO: 107843 - DNA, 668 bp, Zea mays
  Clone ID: MRT4577_2984C.1
ctctcgagcctgacccttacgccttcgctcgcgccgccgccgccgacgccgctacgccccgcacctcgcttcatttcgtgtcgccaagatgacgaagcgcaccaagaaggccggaattgttggcaaatatggaaccaggtatggtgctagcttgcgtaagcaaatcaagaagatggaggtatctcagcattccaagtacttttgcgagttctgtgggaagtttgctgtgaagaggaaagcagttggaatttgggggtgcaaggactgtggcaaggtgaaggctggtggtgcttacaccatgaacactgctagtgcggtcaccgtcaggagcacgatccgccggctgagggagcagactgaagcatgatctagctctttatattattgggggttcctgtagttgctcttgtcaggcatgttgttgtgggggccttctctagtggaaatgtggaatcactgtactggctgttttgccgagacaatgctccttatatttggtttatgctctaggatctcaaagttgtggtgttaagatttgccctcggttaccgttctgaatctgacaagtgatatttgatcctatgccatcttgacgtcgaatttggttgtggtttaaaaaaaaaaaaaaaaaaaaaaaaaaaaacaaaaaaaaaaaaaaaaaagcggcc

SEQ ID NO: 107844 - DNA, 105 bp, Zea mays
  Clone ID: MRT4577_29850C.1
gatggatcagctgtattgtcaaccaaattttagctgtagtgatagcaatgtgaaacaatgttggcccatcagtcatgcatcttcagcattgtggtgctttcgttt

SEQ ID NO: 107845 - DNA, 390 bp, Zea mays
  Clone ID: MRT4577_29851C.1
ggcggatccatccactctgacttgttccaagtccaaggctgcctgttcgaccccaggtgtggcgatcatcctccagttctcgcgcccgcgctcgaggaagaacttaggcagaggcagaggccatctcatctcagggaacagagccaaggagcgatcccgcagccactcgatccgtcctcgtctcggcaagactggtcgggtgatcgccggccaggatggagcagctccggcagctcggcgaggtggtgggcgccatcgacgcgctcatggcgttcgagcccgagctccgcgtaaacccgcgccagtgccggcttctggccgacgcgtgcgcccgcgcgctcgccggcgttacgggcgaggtgcgcgcgcaccttcgcttcgaggagcgcg

SEQ ID NO: 107846 - DNA, 544 bp, Zea mays
  Clone ID: MRT4577_29852C.1
ctgctggttctgttaggcaggtggggtgatcgaatagatcagctggacaagctgtgaggacaacgtgctgggcggtcatcacccgatagacggacctctagattgtcggaaaaacaccactgctccgccttcattgcatcaaacagagcactctggactgcgattaggtactagaacaactcgtttaattgcggaacacccagactaccctggtgacggcttcgatgccgttttcaacgacacaagccgagagattgccaaaattgttggaagctcagtttagtagccagtcagcgaggacaacaccctgtgcttagtcgacttcctgttggagacccgcgacaggacagataaaccgaccattgtattaagtagtctttgacggttagcatgagcatgtagcaacctaatgataattcccaataaataaagactcgttgatgatgttatgggcgttggagctgggtattattgaacaggtgcttggttactatgcggtgaggctactttatattgctattgaataataatgaattgtagttat

SEQ ID NO: 107847 - DNA, 276 bp, Zea mays
  unsure (1)..(276): unsure at all n locations
  Clone ID: MRT4577_29853C.1
ccgggttttcagaagccctgaccgccggcggcggttaacattaaacagcactgccnccncccncgccaacnncnngggtccaccacacatatgacacaatcaacgggcggtcccganagccgcgccgccacncccacacgccacgcggcgacgcgcggccccaccacgcggcaccccagaccgacgaccaccccgacgaggagggggcaccccagggggaggggcagaacaagcccccgcgcgaccagcgcgccgcgccgcccggggcaacaaagg

SEQ ID NO: 107848 - DNA, 412 bp, Zea mays
  Clone ID: MRT4577_29854C.1
cgacaagcttctttctttctttctttttccttttaccagccaaaactttattatgtgaaaactccttattcaaccttacaaaaagcgaaccgccaatacaggggggatgttacctctctcacccttgttcctacaacagtcatcaggccggttacaatagttacctttggtgcatggatccagacaaaacatcagggcgcacactacaacaactctgctgcaaaccatgctgctacttcacaacaacatttcttccataaccaacagctgcattgatctctgcttcttattagcaacaacatcatctaccattcaactcgctaaatgctggctgccccgcacaatttctttcattcaaccaactagcagcattgggctctcctgattatttactgaagcaacaactactacc

SEQ ID NO: 107849 - DNA, 556 bp, Zea mays
  Clone ID: MRT4577_29855C.1
acttccacccagcgcactcgagctcgagccctcgccctctcctcaaacactagcctcagatctcagtcacctgcgccgccgcttctctctgcgagcgagggcgagaagacaggaaatgacggcgaccgaggtcgtgctcctggggatgagcaaccccctcctcgacatctccgccgtcgacgatgacgccttcctgacaaagtatgacatcaagttgaacaatgctattctcgttgaggagaagcactgtgcactatgtgatgcacggagtgtgtctaacatacgagcaatgttgaatatattgccggaggagccacccagaactctatcagggatgcaccaatggatgcttcaaactcctgacgcaacaagttacatgttatgcattgaaaaggacaagtatggtgaggaaatgaagaataacgctcaagctgcatgagctactgctcattactacgaggatgagactgctcctactgccgcatgagatgtatgtgctgttggtggtgaatgtcattgattgcaaatctgtcagcggcaaactgttacaaatctg

SEQ ID NO: 107850 - DNA, 640 bp, Zea mays
  unsure (1)..(640): unsure at all n locations
  Clone ID: MRT4577_29856C.1
actactcccggccgccgccaccacttgctcgcctttgccccttccccttctgtcacccttcgtccgtagcagaccaggaacgcccaaggcgctagcgtctccaagatggtgctgcaaaacgacattgacttactcaatccaccggcagagcttgagaagctaaagcacaagaagaagcggctagtccagtcccccaactccttcttcatggatgtcaagtgccagggctgtttcagcataaccactgtgttcagccactcccagactgtggttgtgtgcccaggctgccaaactgtcctctgccaacctaccggtgggaaggccaggctcaccgaggggtgctccttccgtcgcaagggcgattaggtcctgcttctcttaacgtgagaagagataaatttggtgttttgcaactttctcaggatatgtactgtactcggtgagggttttgttaattattatggctgttagcgtggcctgacaatgcttgtgtgtaaacctgcactttgtttgagcgtagtgacatctaatatggtgctgtttggcttttgctgagggagtgggaatgcaaatgaaatcaaggcgtttttttgtcagggtttanaaaaanagaaaaaaaaaaaaaaaaatntnnnggaag

SEQ ID NO: 107851 - DNA, 638 bp, Zea mays
  Clone ID: MRT4577_29857C.1
gccggccgggccgggcccccgccgccgccaccacttgctcgcctttgccccttctgtctcccatcgtccgtagcagaccaggaacgcccaaggcgctagcgtctccaagatggtgctgcaaaacgacattgacttactcaatccaccggcagagcttgagaagctaaagcacaagaagaagcggctagtccagtcccccaactccttcttcatggatgtcaagtgccagggctgtttcagcataaccactgtgttcagccactcccagactgtggttgtgtgcccaggctgccaaactgttctctgccaaccaaccggtgggaaggccaggctcaccgaggggtgctccttccgtcgcaagggcgattaggtcctgcttctcttaacgtgagaagagataaatttggtgttttgcaactttctcaggatatgtactgtactcggtgaggattttgttaattattatggctgttagcgtggcctgacaatgcttgtgtgtaaacctgcactttgtttgagcgtagtgacatctaatatggtgctgtttggcttttaaaaaaaaaaaaaaaaaaaaaaaaaaaaaaaaaaataaaaaaaagaaaaaaaattaaaaaaaaaaaaaattatattattaattg

SEQ ID NO: 107852 - DNA, 337 bp, Zea mays
  Clone ID: MRT4577_29858C.1
taggtgacctataagatctatgagcgcagcaccgcgtaagctggtccttaagcggcgcctttgttttttttttttgaagacaacgaacagccatatattctaatactaggccccccgcaggggagtcaacatcttttacaacatcaggtgtggaaaaccacacataactccagaacagacacacatatcacgagaacagtagcaactatcggcagagcaggggataagggcagcacactggcctgatgctgcatcatcagaagacttacctagtactcgtgaccttggtaacaatcctcgccctaatcaaacccagcaccaacctcctcgaacccct

SEQ ID NO: 107853 - DNA, 1584 bp, Zea mays
  Clone ID: MRT4577_29859C.1
ccgctctccaccagcctgaagtcccgttctccgccagccccgttcggctgctactgcagcagcagctttcatccatccaggcatccggcgataagcagttgcatattctcagaacagtggccttgactatcagctcaacagggcaacaggcctgagcggctgccttggctggggactggggtgaccgtgacctacagaggagcaggaggagcggtcgctggcgaagacagagagagagctcgagcgagagagaaccaagggcaaatgaggaactccagctccggtccagcagattacgagcggcgttaagggcttaaggcaagtgtgtgagtgtgtctcagtcccatatctgaaagagtgcaacgttgatgaacaaaggtgaaaacggccatattggtagtctcatttttgcaataagctcatcaaaaagatgcttcttcctcgtaagcttctcccatggcggcgctccgctcaggacgcccaggccctggcaggccgcctcctgcgctcctcttcatcctcctttgaccccgaagacgacgaccctccgttcacgcgggttcctaagctcccacctcgggcgccatcgacgccgccgccgaagcccaaggccctggcgggcaagatcaggcccgatgagcctgcgcactccgaccttccctttgacttccggtactcgtactcggagacagacccgacatggaggcccatcggtttccgcgagcccacccggttctcgcccttcggccccggccgcctcgaccgcccatgggacggcacagccgcggcacgcgtcggcgatgatgctagtggcgacgagaggagccgggaggaggttctcggggaacctctgtcggaggaggaggtggcggcgctggtggagaggtaccggcacagtgattgctcacggcagatcaatttggggaaaggtggggtaacacacaatatgcttgatgacatccacaaccattggaaacgtgcagaggctgtgaggatcaaatgtctgggagtgccaacgctcgacatggacaacatttgcttccatcttgaggataaaacaggtggcaaagtcgtatcccgcagcataaacatcattatactgtaccgcggtcggaactatgacccccagaaaaggcctggcgtaccattgatgctgtggaaaccgttagctcctatctatcctaagctcgtgcaaaacgttgctgaagggttgactttcgaggaaacaaaagagttgaggaacagaggattgaattcgccaccacttacaaaactgagatttggttccatgcattcctatattatttaaagacgaacagattatactatggagagggaaggttcgccaagagcgttctgtttcagcagagtgcagttccagcccacaatgatgcacgcatctgccggtgattcacaggagttattattgcgctgcgatattgatgatggttcgggcggattgctgtctgtggaccgtggtgggggcgaggggcgaggccggccaccagtgattcagtgaagaagaaaacaaaccaacacatttgtgtaatcaactttgatgaaacttcaattgaggcgcggcac

SEQ ID NO: 107854 - DNA, 364 bp, Zea mays
  Clone ID: MRT4577_2985C.1
ggaagggaaaggaaaggaagaaggaatggcggacgttctggggatgaattcgatggggaactacgcggggagcacgcctccgagtgcgtctcagatgcccaagtgggagagtaaagttgactgtcgctcggagaggttcaaaaccaactacgccgagatgtcgaagctggtggacgagcttcacgagcgtctacagctgagtctcaatcagggtccagaggctcacgtcaagaaacacctccaagctggtcatctcttagcgagagagcgtttggagttgttgttggatccagactcgccctttttggagctgatgccacttgctgggtggggaaaggagaagatacctcttggagggtccatc

SEQ ID NO: 107855 - DNA, 848 bp, Zea mays
  Clone ID: MRT4577_29860C.1
gccggccggtccggggactccttcgtcacctttctcttcctcccttttaatctctcgaggccggcctcacttccgtctttttgcaaccttacccactctctttatatactctaatcagccaacatgcgtgtctcaaccgtcgctgttcttgcctccaccctcttcggcttcgcttccgcccagaagttccagcaggtcgaagttggaacgcctgattccaagttgctattcaacccacctactgtcgatggtttcggcccgggcgatgtcatccaattcatcttctaccccaaggcccactctgtcacgcaatccacatttgccgacccttgcacttacaacggtactggtattaacacgggtctgcagaagtacaatgacacgaagcccgccatgttgaagtcgtggaacttcactctcccggccaactcaagcacggagaagcctctgtggttcttctgcgccaacacgggccattgccagcagggcatggttttctccatcaacccgggcaaaggcaagaccgctgacggcactcccacctcacacgaggcgtacgtcaagaaggctatggccgttccgattcctggtgcctctggaccatccaactccacgagctccactggcggcgctggtggtgctaacaacaccgctgctggtaacactgctgccggtaacggtgccagcaacactgcggggacatctgcaggtgccgcttctgcaagtggcagtgcccctagtgcatcaaccactagcagcgctggatccgtcgcgcgcaattcagcgggtgctctggctgctgtcggtatcgctcttggtctcttgctctgagtggaggatgatatgtc

SEQ ID NO: 107856 - DNA, 634 bp, Zea mays
  unsure (1)..(634): unsure at all n locations
  Clone ID: MRT4577_29861C.1
aggccggtggacggagggcggaaggattgggaaaaactcgggagccggccggggccggcactcgacaaaaacaaatctccctaatttcagtcatgaaggcccaggtcgcagcagcaactgtcttggtcttgctcctcctaatctttgctgcggaggctcgtacgtgcatgtcgcgaagccaggaacagaaagggaggtgctttcacgatacggattgtgccgccgtctgcgtcaaacagagcttcaccggaggcttatgcaacgggcggccgccgttcaagcagtgcttctgcactaagccatgcaagagagagagagctgatgctacactccggtcgtcaggcctctgatcatgtgtgcttgatccacatgacagcgcgactctcgcatgtatgcctaggttgatgtgtatgtaataaataaacaaaatagtaaatgacatgttttcttacatgaaaaaaaaaaaaaaaaaaaaaaaaaaaaaaaaaaaaaaaaaaaaaaaaaaaaaaaaaaaaaaaaaaaaaaaaaaaaaaaaaaaaaaaaaaaaattttggtaaaaaaaaaaaaaaaaaaaaaaannnnnttcccttgcccggggggcccgcttaaaaggggaaattcccaccacccgggg

SEQ ID NO: 107857 - DNA, 2051 bp, Zea mays
  Clone ID: MRT4577_29862C.1
ccgctctccaccagccttgaccccgttctccgccagccccgttcggctgctactacatcagcagctttcatccatccaggcatccggcgataagcagttgcatattctcagaacagtggccttgactatcagctcaacagggcaacaggcctgagcggctgccttggctggggactggggtgaccgtgacctacagaggagcaggaggagcggtcgctggcgaagacagagagagagctcgagcgagagagaaccaagggcaaatgaggaactccagctccggtccagcagattacgagcggcgttaagggcttaaggcaagtgtgtgagtgtgtctcagtcccatatctgaaagagtgcaacgttgatgaacaaaggtgaaaacggccatattggtagtctcatttttgcaataagctcatcaaaaagatgcttcttcctcgtaagcttctcccatggcggcgccccgctcaggacgcccaggccctggcaggccgcctcctgcgctcctcttcatcctcctttgaccccgacgacgacgaccctccgttcacgcgggttcctaagctcccacctcgggcgccatcgacgccgccgccgaagcccaaggccctggcgggcaagatcaggcccgatgagcctgcgcactccgaccttccctttgacttccggtactcgtactcggagacagacccgacatggaggcccatcggtttccgcgagcccacccggttctcgcccttcggccccggccgcctcgaccgcccatgggacggcacagccgcggcacgcgtcggcgatgatgctagtggcgacgagaggatccgggaggaggttctcggggaacctctgtcggaggaggaggtggcggcgctggtggagaggtaccggcacagtgattgctcacggcagatcaatttggggaaaggtggggtaacacacaatatgcttgatgacatccacaaccattggaaacgtgcagaggctgtgaggatcaaatgtctgggagtgccaacgctcgacatggacaacatttgcttcgatatcgatgatggttcgggcggattgctgtctgtggaccgtggtgggggcgaggggcgaggccgcccaccagtgattcagtgaagaagaaaacaagccaacacatttgtgtaatcaactttgatgaaacttcaattgaggagcggcacaaaaatggtgaatatggcacttagatgcattgtttcgatgaatccagggtttatgaatttagaccgtttgagaaagtttttgtagaataaagctcagcctgttcatttgtttaatctttatcggctgtttttacattgttttgtctctatcaattgtacctacaataattcgaacaactgactttaatatgaagcgaacaactactgttttttaagactgtggaagttgtccggctagattgcactcatgtagattgcactctgggactactgactgcaagaaaattggtgtgaagttgagggatttggttccatgcattcctatattatttaaagatgaacagattatactatggagagggaaggttcgccaagagcgttctgtttcagcagagtgcagttccagcccacaatgatgcacgcatctgccggtgattcacaggagttattattgcgctgcgatattgatgatggttcgggcggattgctgtctgtggaccgtggtgggggcgaggggcgaggccggtcaccagtgattcagtgaagaagaaaacaaaccaacacatttgtgtaatcaactttgatgaaacttcaattgaggagcggcacaaaaatggtgaatatggcacttagatgcattgtttcgatgaatccagggtttgtgaatttagaccgtttgagaaagtttttgtagaataaagctcagcctgttcatttgtttttaatctttatcggctgtttttacgttgttttgtctctatcaattgtagcagctacaataattcgaacaattgactttaatatgaagcgaacaactctactgttttttaatgaatatatatatgtggagctctaccaact

SEQ ID NO: 107858 - DNA, 373 bp, Zea mays
  Clone ID: MRT4577_29863C.1
cgaggccgtctggttcaagaccggcgccctggtggtgggcggcaacactccttaggtatgtctgcaacaacatccccatcaacctggtggtcgccgtgatcgcggaggtggtcctcgtcagccgcgcctagtactaccctatcatcaacggactggacctcgacgacaagctgcaccccagtggccccttcataccccctgggcttgaccagcgaccccgaccaggccgccatcctcaacgtgaaggacatcaacaacggccggctcgccatgtgctccatgtacgccttcttcatccaggcctacgtcacccgcgaaggccccgtccagaacctctccaagcaccttaatgacctcttacgcaacaacctgc

SEQ ID NO: 107859 - DNA, 1111 bp, Zea mays
  Clone ID: MRT4577_29864C.1
cctcgaggccggccgggtcacagttctatgcacagcagttcagttaaaaatggagaatttctttcaagaaaattggcaagaatgctggagaagattcagaacttctaggaaaacaacagtagtattggctagggcctttgatgcactggggataaatcagcgatcagttgtgtctatgccatttgaagaattagctctctgcattgaatctcctgcagttctccagaccactaaggcattgcttgaccgtcttgagagtcgttttgtcttttctcagtcatcaacttcatcaaaaccagaaaacattgaccaccttctgaagcatctaggatcaccgaagaggaagatcccactgagcaatgtggggacaagtgaagcaacactgaaaaacgcagttggaaattatgattccagtacgttgtctagatattcgcaaaggattgcactttgtgcttatatgattctaggtcatccaaaatctgttcttagtggacaaggtgaacaagagaaatttcttatggaatcagcaacaatctttgtaagaatttgaactgctggttaaaacagtacttgatgccctagatggtgcatgcatattggagctggtcagttatagatgatgccacacctgttcgttctagctacgaggaatcttcatccattgttgctgatctgaagaaattcagaactcagctgcttgcctttgacaaagcttggtgtgcttatctttaccattttgtggcatggaaagcaaaagatgctaaatcattagaggatgaactcattagggctgcatgcaagcttgagctgtcaatgattcaaacatgcaaaataactgaaggtgaatctgataacctgggtggtgatttgaaagccatccggaaacaggtcgcagaagaccagaaacttttaagggagagtattcaacacctgggcggtgaagctggtatcggaatgatggaatctgctttatttgaaacacggtcaaagttctttcaagcaaaagaaaagagggagtccattgcaactacagttgcaaatgtagcattttctttagtacatggtcttcaggacagtctaatgattctgaaactggtatcggaatgatgga

SEQ ID NO: 107860 - DNA, 271 bp, Zea mays
  Clone ID: MRT4577_29865C.1
aaaaacttaaactagctagaaacgggaaaagaaacaaggggggaaaaaaaccttgggggcccccactacaggcttaacacactaaaggggttaaccccattgggggggggaggttgccccccccaaaaatccattaacaattaacccggtccaaaaattttttgatccgggacccaaatccaaccccccggggaccctggaagaggcttttaatcgaatgcttaattgtccggccccggggaagtggtgggaccctgaacttgccaaattt

SEQ ID NO: 107861 - DNA, 115 bp, Zea mays
  Clone ID: MRT4577_29866C.1
tgtacctgcgcatctacgacgtgacgcagacgatcgacctgctggcctacagcacgccgctgtacccgggctctcatccgccgtaccagagttcgctagacgagtctctacagcg

SEQ ID NO: 107862 - DNA, 766 bp, Zea mays
  Clone ID: MRT4577_29867C.1
ctgggctcatcccgctgaaattcatccccaatctgaccccgtcgaccaacacctactggctcattcgcccgcactcgagacgcttgcttcctccccagagaaaccagcagatatccccgccacaactgaccatgtaaatgtccacggccaccaagacatcggtgatggtaggacttcgactttgctgcatcagcacaacaatgacgcacatgaagcacagcagaccctggtaaattttgatctcccagaacaaccaaaggaacatccgcaagtacagctgggtggggcttctgaaaaatcggcggcagatgaattcgcagggaaaaaggaagagaagaaggtcccttcggctgtgtcttctgttgagggaagccatgacaacttcttccttcagcacgaaaaaccttcagcaaatcgagaagcgttggaattagcgggggacaagaggaagtccagagaagcacctctggaaccaacaattgtctcaacgtcgtccggccatcaacatccacacgacgattacaacctggattatgagcctgaaggagttgctgtggaggaggagtactacccagaagtgtataatccctacttcacgtctaatgcagcaaacccattcagacctcgacctcccaccataccacccaaataaatcaaggcagggaatcaaatgtggcaaacagattttttttacctctttgttcataaatgtttataaacacgagtcatttattttgtgaatataaaaacgcataactcacttgcc

SEQ ID NO: 107863 - DNA, 103 bp, Zea mays
  Clone ID: MRT4577_29868C.1
ttgccgaattatactgatcaaacatccaactcaacactgacgagaggtctccaccggacaacggactaaatgccgtcttgacacactcccaggcattcttaac

SEQ ID NO: 107864 - DNA, 216 bp, Zea mays
  Clone ID: MRT4577_29869C.1
ggcttttggccttactgacatgttggacgctacttactatggcgcttggtgtgaagcagtcgtagacttttttttgttagaagagatgcaccagcgtttatagtgtaccgccgtggatgtgtatagaacctgagctttggattctaattgttgacattattggtattggcttgcttttgaacatggaaaaaaaaaaagaaaaaaaggggggcgtct

SEQ ID NO: 107865 - DNA, 629 bp, Zea mays
  Clone ID: MRT4577_2986C.1
ggctcgagcctgacccttacgccttcgctcgcgccgccgccgccgccgccgctacgccccgcacctcgcttcatttcgtgtcgccaagatgacgaagcgcaccaagaaggccggaattgttggcaaatatggaaccaggtatggtgctagcttgcgtaagcaaatcaagaagatggaggtatctcagcattccaagtacttttgcgagttctgtgggaagtttgctgtgaagaggaaagcggttggaatttgggggtgcaaggactgtgggaaggtgaaggctggtggtgcttacaccatgaacactgctagtgcggtcaccgtcaggagcacgatccgccgcctgagggagcagactgaagcatgatatagctctttatattattgggggttcctgtagttgctcttgtcaggcatgttgtgggggccttctctagtggaaatgtggaatcactactgtactggctgttttgccgagacaatgctccttatatttggtttatgctctaggatctcaaagttgtggtgttaagatttgccctcggttaccgttctgaatctgacaagtgatatttgatcctatgccatcttggacgtcgaagttggttgtagaaaaaaaaaataaaaat

SEQ ID NO: 107866 - DNA, 126 bp, Zea mays
  Clone ID: MRT4577_29870C.1
ctctttttttatcccctcgaacaaatcgaaatgattgaagtttttctatttggaatcggcttagggctaatggctattactggagcgggatgaggggcgactgcgtattgggcctacaggcggggg

SEQ ID NO: 107867 - DNA, 449 bp, Zea mays
  Clone ID: MRT4577_29871C.1
aaagaaaagggccccagggccacaacaataataattaagggagcacccccccacccagaaaaacaggggagccccaccccggatggcacacaccccaccaccacaaaggttccctctaacccgacgcaaggaaaacaacaaacagcccatcaaacaacaaaaaaagcaacccccggaaaaaggaggaaacaaaacctggacagggaaggaaaattaacctctggaaccaaaaagcagaaacaaccccccgccgccaaaaaaaagaaaactttttttttccccccgggaaaggaaaaaaaaaaaaaaaggggcagggaaaaaaacacaaccccccaagggccccctcccgctaataaaaaaacaaggtcgggggccgccgccgcccataattggggggagggccccccctccacggccaggggaacggggctcgcctggggggggacctg

SEQ ID NO: 107868 - DNA, 165 bp, Zea mays
  Clone ID: MRT4577_29872C.1
aacccaaaggctcaaacgggcctttgggtgcattggcccacatggacaatacaatcggacatataggacggtttattcgacaaggggcctctgcatgcaataatagtaccccgactacaaagggcatgatgaaaatggatatttggggctaacaatttgtcaagc

SEQ ID NO: 107869 - DNA, 634 bp, Zea mays
  Clone ID: MRT4577_29873C.1
aattcggggcgaggtgaacatggaaaaatcatgtgttttaacggagtaagtgattgggctttatatttattgagaaaatatagtataaatttagtagggacatatgagcagatttaattggattaggttaaaatcatagaacaaagttaaataagtggtacgaatccaaatcacagaatgcataggattacaggaaaaaatattacctgaactgcaggatttgattcatatgagccatcatgcttaatggcactaccatttgtcactgcggttctgtagcagtaagagaaagtaaccatatcatgacctgtagtgaatgacagtaaatggcacataagagcacagttttaagcacataatcatatgaaaaatagagaattttgaggataagttattttaagacctgtgcgaaaacatggtgagcgaaatcctgtgcgggagaggctgggtttgggttctacagcaggtgctgaatgcctataaaaatttgctgcgctgtgatggagggcgcccatgcctaattagtggtgggggcagaacgatgttatttgggtgatatggagtggggggggtgctggaaaacatcaaggggacagtgattggaaagttacatgggggagtattggcgggggtg

SEQ ID NO: 107870 - DNA, 270 bp, Zea mays
  Clone ID: MRT4577_29874C.1
aacaagggttcttttctggattaatgtgtgaacacctttaccggtggattttcaattcattttttttcttaagggcaagaagatgaaaattgcccatgcgcttaattacgggttttgtttttttggggttccaggtgggcttttttttactttcaaggccattttttcggggttttggcttaccacttttcatggtacattgggttttggtgggggattctttttttttcataccccctttttttaacaaaattaaagggtgggtttttt

SEQ ID NO: 107871 - DNA, 1048 bp, Zea mays
  Clone ID: MRT4577_29875C.1
ctcaggcggcggggggttactacatacgagaaaaccatactccgtctcctcgctctatcgcgctccattgattgctctcgcaacaaggactccatcgtcttatcgatggagttgttcgccgccggagaccgccgcttccccgatcctcccaggcacgacgctggtgcagaggactcgtcgatgctggtgatcagggacgcactgctgtcacagctccagaaggaccgacttcgccaggagatcatcctggccgagctcgccaggatagagcgtgccatggccctgcgcgccgccgacgccgagcgtgccagcccgagggcgcccttctccgtcgtcaagctcgaggagatgccgcgcagcagagaagcgtttggtcctgcagaccttattgtcgccgcggatgtggacaaagatatggaggagaagaaagattccgcaacaagtcttcaggcatcgagtttgattcaccgcaagaagcctgccgccgaatatctcgtccgtgaatgcctgaagacttcttgcggtgctggtaacgctgcaggtcggcggcaaaatgcagcacttcatgagaccaaactacaagaatccactgagactaggttgcccaaggagacgatgcctcctttatcaaaatggaggtgtgacatctgccgggtggaagcaccgaccgagggccacttgcaacagcattgtgcagggcacaaacaccggtctaaagtagcaaccttggtggtacccagaccaatggccacagtcacaaagcgagggcggctgctgctgcgaatcccggagacgtgcgtcaatacgacgaaaagctacgtctaacctgggtctgcaggttctgccaatccaactgcacctgcagatcagacctggagagccacctgagaggcaaaaggcacaaagaaagatccagtgcctgctggaagaatgcaagaacatggcagtggtctatagctataggtcgccgaattcacagccaaaccttgcgacacaggaagaggacaacggccctgcttcagcatggaattgcagcctgtgccaagcc

SEQ ID NO: 107872 - DNA, 371 bp, Zea mays
  Clone ID: MRT4577_29876C.1
ggcgccttttttttttttttaatactagaagtagagggcctggaagattaaaattcagggccaaaattaaccccagttattgataatccgggagggtggcacccaagaaacccctttgaaggtaatagaaaaagcaagttaaagcaagttgattgcctgggtacaaatctttgggtgaaacatttcttttcggtttaaagttgagatacagtagggttcggtttcaaaagcaagggaagtaacttgggggcaaacatccttaaaggggaagttttgctcttccccaatggcagattggaaagtcaaaacaagttccttccggttttggaacctttccttaatttgggcacaagagtctaataagttgggag

SEQ ID NO: 107873 - DNA, 631 bp, Zea mays
  Clone ID: MRT4577_29877C.1
gatagtatctttctttgaaggtgtaaactcttccctaaccgctgccgtggttgtcgttaccgggctcattggcgcgaatttcgtgcaagtagctatggataaacttggtctcaacgaccccatcgccagaggaatagggacagcttccagtgctcatggactggggacagcagcactgtcagccaaggaacctgaagcgcttcctttctgcgccatcgcttatggtctcacgggaatttttggctccttggtttgctcggttccagtagtgaggcaaagcttggtattcatagctggttaggagcagctcgtgatgatctgaatttgaggatctgattctttagataaaggaaatcgtttcatgtgtaaaagaagtcgtgctcagaagacgaggaagcaaaacgcccccacgttttgggtcaggatgaagaaaggtgaataattccgtaatcaggatgtaactaaaacactagagcaaggcggatccattgtttgtttgatactttgtgatatcacctttctcccttcactgacacgagagatataaagtacttgtaggtttcataaattcgacaatttgtttagacaaattacggtttgtagttggagaagaaaaaatcattccagatct

SEQ ID NO: 107874 - DNA, 516 bp, Zea mays
  Clone ID: MRT4577_29878C.1
ggcggcgcaatgcgcgtccctgtgggcgcacgcgcgcgcgctgctggtcgcgccagcggtgcgggtcctggtgctcctgtcgctggcgatgaccgtgatgatactggcggagaagctgttcgtctgcgccgtgtgcctcgccgtgcgggcgctccggctcggcccggaccggcgctaccgctgggagcccatcggcggcggagtcggagacgaggaggaggagtccgggtccggccacggcgccaagtaccccatggtgctcgtgcagatccctatgtacaacgagcgggaggtgtacaagctgtcgatcggggcggcatgcgagctggagtggccgtcggagcgcttcatgatccaggtgctggacgactccacggaccccgttgtaaagccgaactttgtcctgctgcggagccatactaccctgagcctgattcatccctgtagggcgctcttgatgtaattagaatagtgaatgaagctgtgaataggctaatgaacaaaattgctgataaa

SEQ ID NO: 107875 - DNA, 2789 bp, Zea mays
  Clone ID: MRT4577_29879C.1
agcagaaattcttcctgactctactgtttctcagccaaaaccgcagaagactttgtcaggccaatttaggataggggggatgacttgtgctgcatgtgtgaactcggttgaggggatcttaaaaaaattgccaggtgtaaaaggtgcagttgttgcattagcgacctcattgggtgaagttgaatatgatccttctgccattagcaaagatgaaattgttcaggccatcgaggatgctggttttgacgctgcactgttgcaaagtagtgaccaagacaaggtcctattaaatgtccaggggttacatttcgaggaagatgtagatgtattgcatgatatcctgaagaaaatggaaggcttgcgtcagttcggtgtaaattttgcaaactcagaagttgacattgtatttgaccctgaagtagttggtttgagacagattgtagataatatcgagacggagagcaacaataggctgaaagctcatgtacagaatccatatatacgagctgcatcaaatgatgcgcaagaggcctctaagacgcttcatcttcttcgctttagtttattcctaagtattcctgtatttttcatccgcatggtatgccctcgcatacctctgattagttcattcctacttatgcactttgggccatttcgtataggagatctgctgaggtggattctggtgaccatggtacagtttattgttggcaaacgattctatgttgcagcgtatagggccctaagacatggctctacaaatatggatgtcttagttgttattggcactactgcttcatatgtctactctgtttgtgcactactttatggggcattcactggatttcatcctccaatatattttgagacgagcgcaatgataattacatttgtgctatttgggaagtatcttgaggtgctcgcgaaaggaaagacatcagatgctatcaagaagcttgtagagcttgctcctgctacagctattctacttctgaaggacaaagagggaaaatattcaggagagaaggagattgatgcgtcgttagtacaacctggtgatgtgttaaaagtgcttcctggttcaaaggttcctgccgatggtatcgtgggttggggtacaagtcatgtcaatgagagtatggtaactggtgaatctgtaccaatctccaaggaagtatccagtctagtcattggaggcacaatgaacttgcatggtgttcttcatatacaagcgacgaaagtaggatctggaacagttttgagccagataatttctctcgtggaaaccgcccagatgtctaaggcccctattcagaagtttgctgattatgtagccagcatttttgttcctattgtcatcaccctgtccttcttgacattccttgcatggtttctatgtggatggttgggagcatatccaaactcatggtctgctgaaagtagcaattgctttgttttctccctcatgttctccatatctgttgtggtgattgcttgtccatgtgctcttggtctggcaacaccaactgctgttatggtagcaacgggagtcggggctagtcatggagtacttgtaaagggcggagatgccctggagagagctcagaatgtgaagaatggatctgggggactttctcacgttggtagcgtcagcagaggcaagcagtgagcatccactggcaaaagctatcttggattatgcattccatttccatttcttcggcaatcttccctcaggaaaagacagcatcaagagaagaaaagaagagatactttctcagtggcttctggaagtcgtggactttgctgccttgcctggcaaagggattcaatgctggatcaatgggaagaaaattttggtagggaatcgtgctttgataactgaaaatggggtaacattcctgaagaagctgaacgtttcctggtagacatggagctgaatgcaaagactggtattctcgtagcgtatgatggtgacttcattggcttggttgggataaccgatcctttgaaaagggaggctgctgtggtcatacaaggtctaaaaaagatgggtgttcatccagttatggtcactggggataactggaggactgcacgagcagttgcaaaggaggttggcatcgatgatgtcagagccgaggttatgccggccggaaaagccgatgtaatccactccctgcaaaaggatggcagtgttgtcgcgatggtcggagatggcatcaacgactcgcccgcccttgctgccgccgatgtcggcatggccatcggcgcaggcactgacatcgctatcgaggcggctgactatgtgctcgtccggaacaacctggaggatgtgatcacggctattgacctctcacggaagacgttcatccggatccggtggaactacttctttgccatggcctacaacgtgatcgccatccccgtagctgctggcgcgttgtttcccttcaccggggtccagatgccgccttggttagccggcgcgtgcatggcgttctcgtccgtcagcgtggtgtcgtcgtcgctgctgctgaggaggtataggaaacccagactcaccaccgtgcttcagataacagtggaataagttccttttttttttggcaatttgttgtatctcactttatcggagagaaatagatacaaacgtgaatgttggtgtggacgtgcggtgcagtactgagagtcaaacacagaaacacttgtacatatcgaacagtttgcaattgcaaccgagttatacatgttaactatgtgagggatcaagagacatgcgacaagac

SEQ ID NO: 107876 - DNA, 1939 bp, Zea mays
  Clone ID: MRT4577_2987C.1
ggggaaaaggggatggttttcaaagccatttaatttgggaacccccaggtttttcccatccccacggtgttaaaacccggcccattaaattttaatcccccccctataaggggaaatgggcccctttaaaggaaggtccaacggcccccaattttaaggaaattttcaaaaattccccctttaacggcccccccggcaaggaccttttttttttttttttttttttttttaccctaattcccctttttttttttttttcctttttttttttttttttttttttttttttttttttttttttcttttttttttttttttttttttttgatggcacaggatcaaatatcatttgtcagattcagaacggtaaccgagggcaaatctcaacaacacaactttgagatcctagagcataaaccaaatataaggagcattgtctcggcaaaacagccagtacagtgattccacatttccactagagaaggcccccacaacatgcctgacaagagcaactacaggaaaccccagtaatataaagagctatatcatgcttcagtctgctccctcaggcggcggatcgtgctcctgacggtgaccgcactagcagtgctgcaaacacattaacagaatttagccgtggctaacaaattgtggttttcggacaggcgaagaattacttacttcatggtgtaagcaccaccagccttcaccttcccacagtccttgcacccccaaattccaactgctttcctcttcacagcaaacttcccacagaactcgcaaaagtacttggaatgctgagatacctccatcttcttgatttgcttacgcaagctagcaccatacctggttccatatttgccaacaattcctgccttcttagtgcgcttcgtcatcttggcgacacgaaatgaagcgaggtgcggggcgtagcggcggcggcggcggcggcgcgagcgaaggcgtaagggtgtagaactataatccctgctagtaatccatttgtgctgtttatgtatcgaaggcagcaaagatgtgtgaagcggcaatgggatgcttgctgttatgtacatattattcaaatgttgtcgattaaaaagcgtatacagctggtgataacgttgctacatccaaatagcgtgtagcatgcctagcaagccaaacatattaccttacagcaagcatcccattgccgcttcacacatctttgctgccttcgatacataaacagcacaaatggattactagcagggattatagttctacacccttacgccttcgctcgcgccgccgccgccgccgccgctacgccccgcacctcgcttcatttcgtgtcgccaagatgacgaagcgcactaagaaggcaggaattgttggcaaatatggtacatgttagagtatgatatttcccgatttgtcaatctgggacatgaagttaacatcgcaaattataatgttacaggaaccaggtatggtgctagcttgcgtaagcaaatcaagaagatggaggtatctcagcattccaagtacttttgcgagttctgtgggaagtttgctgtgaagaggaaagcagttggaatttgggggtgcaaggactgtgggaaggtgaaggctggtggtgcttacaccatgaacactgctagtgcggtcaccgtcaggagcacgatccgccgcctgagggagcagactgaagcatgatatagctctttatattattggggtttcctgtagttgctcttgtcaggcatgttgtgggggccttctctagtggaaatgtggaatcactgtactggctgttttgccgagacaatgctccttatatttggtttatgctctaggatctcaaagttgtggtgttaagatttgccctcggttaccgttctgaatctgacaagtgatatttgatctaaaaaaaaaaaaaaaaaaggcccctagggcc

SEQ ID NO: 107877 - DNA, 1755 bp, Zea mays
  Clone ID: MRT4577_29880C.1
gttggggtacaagtcatgtcaatgagagtatggtaactggtgaatctgtaccaatctccaaggaagtatccagtctagtcattggaggcacaatgaacttgcatggtgttcttcatatacaagcgacgaaagtaggatctggaacagttttgagccagataatttctctcgtggaaaccgcccagatgtctaaggcccctattcagaagtttgctgattatgtagccagcatttttgttcctattgtcatcaccctgtccttcttgacattccttgcatggtttctatgtggatggttgggagcatatccaaactcatggtctgctgaaagtagcaattgctttgttttctccctaatgttctccatatctgttgttgtgattgcttgtccatgtgctcttggtctggcaacaccaactgctgttatggtagcaactggagtcggggctagtcatggagtacttgtaaagggcggagatgccctggagagagctcagaatgtgaagtatgttatttttgacaagaccggaacactgacccaaggaaaggctactgtaactgcaacaaagattttttcaggaatggatctgggtgactttctcacgttggtagcgtctgcagaggcaagcagtgagcatccactggcaaaagctatcttggattatgcattccatttccatttcttcggcaatcttccctcaggaaaagacagcatcaagagaagaaaagaagagatactttctcagtggcttctggaagtcgtggactttgctgccttgcctggcaaagggattcaatgttggatcaatgggaagaaagttttggtagggaatcgtgctttgataactgaaaatggggtaaacattcctgaagaagctgaacgtttcctggtagacatggagctgaatgcaaagactggtattctcgtagcgtatgatggtgacttcattggcttagttgggataaccgatcctttgaaaagggaggctgctgtggtcatacaaggtctaaaaaagatgggtgttcatccagttatggtcactggggataactggaggactgcacgagcagttgcaaaggaggttggcatcgatgatgtcagagccgaggttatgccggctggaaaagccgatgtaatccactccctgcaaaaggatggcagtgttgtcgcgatggtcggagatggcatcaacgactcgcccgcccttgctgccgccgatgtcggcatggccatcggcgcaggcactgacatcgctatcgaggcggctgactatgtgctcgtccggaacaacctggaggatgtgatcacggctattgacctctcacggaagacgttcatccggatccggtggaactacttctttgccatggcctacaacgtgatcgccatccccgtagctgctggcgcgttgtttcccttcaccggggtccagatgccgccttggttagccggcgcgtgcatggcgttctcgtccgtcagcgtggtgtcgtcgtcgctgctgctgaggaggtataggaaacccagactcaccaccgtgcttcagataacagtggaataagttccttttttttttggcaatttgttgtatctcactttatcggagagaaatagatacaaacgtgaatgttggtgtggacgtgcggtgcagtactgagagtcaaacacagaaacacttgtacatatcgaacagtttgcaattgcaaccgagttatacatgttaactatgtgagggatcaagagacatgcgacaagac

SEQ ID NO: 107878 - DNA, 599 bp, Zea mays
  Clone ID: MRT4577_29881C.1
ttttgggggggaacacgaaaattttctgaactgtataaagaaaattgttaactgtgacgctagtttctcagcagcgcacaacatgaccgttaggaagagcaacagggcattcttcaagccaaaagggatttcttattctgtagagagctggggaaaaggtaacttggcgccagttaccaaggaagagaagccggcacaacatcgtgagttcatacttcttttgcattgtaggattacagaggtccagggaaggtgccgttttcgcgttgctcgttccagcgatcaacctgcgaattgaacacaattcagccgagcttaagatgccaagacggtaacaggaaaagctgagggactgaaaaattacagacaatacagttacagacacagaattcttcttcaattatgaaaaattaatgcgtgcaagggcagctatttacaaaatgtgtttagaccattagatgttaggatatggaatgggacattactcactatgctaatgctgtagtactgtgaaccatcatttcacttcaataagaccaataagtgcagatattgggctgaagctccacattaattaacccatattattcacaacttga

SEQ ID NO: 107879 - DNA, 142 bp, Zea mays
  Clone ID: MRT4577_29882C.1
gcatctttcgggcatcgagctcatccgcggactgcctggggtcatcgtacaggccgcgctcactctgccccacaatccgctttttccccatgctcactcggcacggatcgaagtcatgatccgattcatcgtgtgaaccata

SEQ ID NO: 107880 - DNA, 511 bp, Zea mays
  Clone ID: MRT4577_29883C.1
ctttgttctaagtcaaacttctttaactttgacaaatatatagaaaatcattcaaacatctagaatatcgtatgagctccaataaattctttatgcagtagcgaagctagagtgaatcagaggagagggtgcaaatgctttgagggtgcgtagtaacgatttataactggtgcatatatggtgaaaattcgctctaaatcactggttttacaaatttccgtgggtgcatatgcaccctttctcgtgcatgtagcttcacccctgtctttatgcaatatattttgatagagaacttatttgtacttgtagatgtcaatatattttctacaagcatggtcaaagttagagaagtttgactttggacaaatccaagatggaatataaatttgtaatggagtatgaactatcaaattcaatttatatgtgttagaaataaaatacacagttactattgccaatcataaaatgcatcttttgcctaattgaatttcatcttgtgcttccgatggct

SEQ ID NO: 107881 - DNA, 303 bp, Zea mays
  Clone ID: MRT4577_29884C.1
gcgaatcttacttgcactcttacaaactattttatcttatgttatctctctacacttgcctgacaactacccaagctttaagaaaccaaaaatttcctatttcattaacatacaccatcttatgatcactaaacctatctttatactatatattagaacctgtcattaattttcaagcaagacgacggtctttttataaccaacattcatacttacaagtacacttaattttcttaaaaatattttgtttcacctaaacctaaattaaaagtcctcccttaacaaaaccataactgtgaaaat

SEQ ID NO: 107882 - DNA, 365 bp, Zea mays
  Clone ID: MRT4577_29885C.1
cggacgcgtgggctccgtgataggcaactcgctgcgcaatttcatgaaatgcctctggatcttaagatgatccgagcagaaaaagctggatttgaaatcctgaaatctacaacggtagataaactccccaatgatcttgaaggaatcgcttactgaatggagaagctctacattcttattgatgagatctacagatacctggatgatgctggacaaagacgcgcggcacctgatcacaaaatcgaacggctgctatctcaatcctgtgcttcaatgccaagattcgccccaggtgctgacgatcagcttttaaatgacaagattcaggataaccttgcgctagtatacctgtcaagcatcacaag

SEQ ID NO: 107883 - DNA, 450 bp, Zea mays
  Clone ID: MRT4577_29886C.1
gtgcatgcaacctctcagattttatccagggatgacagggaaagtcctatttctcacaggattggcagaaatgattctcgcaatgattatgaaaaccagcattcaaaagatgctggaaagagccagtaccaaattattcatcaggaagattttggttcaccagggcaaaagaaacatgaagatgctatttcacaacagccacagatattgactcctgtccagactactgctcttagcatgcataatgaaaaggtatctgaaatggacagtcagaatgctccttcaagcattggaggtttgagcatgcaatcaggggattcgagtgctaacattatagcagagcaaagcctgggtcaaatacttcagagacatgatccaatttctcatattcctgggccacaaacgcttccgatcaccacacaaccacagaatgttacgtcttcattcgca

SEQ ID NO: 107884 - DNA, 627 bp, Zea mays
  Clone ID: MRT4577_29887C.1
gcagacagcaggacaccactcatcttcttctcccccgcctcgtttccatcgccaccaccctcttctcctgcggtcctccctcgtaaaaatcccaatcacctcggatctgactccaatgaacatgaatgcatactcaaggtcaacgtgccgatcgtgggcaagaccgcgctggggttgcacgtgcaccaagatcgaacgtctccctcctccatgtcatcgcggagctcctcgaccgcggcgtcacctggcagcttatcaactccaccgacgaagaccctaacgacgacaaccatgggaatgtgctcgcgtaggcgaaactaggaacactgtctgctgaacccgccgccgcttctgtacagcgagaaccagttccgcgacaccttcgactgttaggaggagaagaagggcatcgcgggcgacatcatcgtcaagaacaaccacggctacgagttcttcctcgagaacatcaccctcaacgacgtgcccgcgacactgcaccatcgtcttcgacgacaactcatgaatctacccgcattgcaagtaccgctacaaccgtgtcattcatctccaacgacacgtacctccgcagtcatatgccgtgggagctgaagccctaccgcgacgacg

SEQ ID NO: 107885 - DNA, 3510 bp, Zea mays
  Clone ID: MRT4577_29888C.1
atggcttcgttcaacaaccaagctggagctgcttcggctccgaagctggtactcccgataacaggcggttcatgctcagagccagctaacaagaagcagaagaatgaggcacagagaagggtacagcatgtaggggtgcaaggacccttcatcaagtcaagatggtctcacatcccaattaccttctctcaagaggaccttcagctcaaggattaccctcacaatgatgctatggttatttcttgtgttatcaaaggatttctggttcataatattctggttgatacaggaagtgcagcggatattatatttgctaaggccttcagacatatgcaagagcccgaagataagatccatgatgctacacatcccctttgtggcttcggaggaaggcagattgtagcgctcggcaagatcacgatgccagtgaccttcggatttgtcaataatacaaggactgaacaagttgtgtttgatattgttgacatggaatacccttacaatgcaatcattggtcgtgggacactcaatgcttttgaagcaattctttatccagcatatctttgcatgaaaataccttcggaccaagggcctattgctattcatggaagtcaggaagctgccagaaaggccaaaggaaactggacagattcaaaagcaatccataacatagatggagccgaagcttctaatgatctctgtggtgtcaacagggatgttattgaacacttgctcaatgttgatccatccttcagacccagaaagcagaggctttggaagatgtctgatgacaaagccgaaggtgctcgaaatgaagtgaaaagacttctcagcgttggagtcatcagggaagtaaaatacccagaatggctagctaacactgttatggtgacgaaggccaatggtaaatggagaatttgcattgattttactgatctcaacaaggcttgtccgaaggatgaatttccattgccaagaatagattctctggtagatgtagcagcttcgtcaaagctcatgagtctactagattgttattcaggctatcatcaaatctggatgaagaaggaagatgagccaaaaaccagcttcatcacccctagtggtacatattgttacctccggatgcctgaggggctcaagaatgccagaggaagcttcagcagaatgacagcgaaagttcttcattctcaaataggcagaaatgtgctaacatatgttgatgatatcatagaaacattcgctaactttaggcaagctggcctgaagttgaatctagagaaatgtgttttcggagtaaagaaggggaaattccttggttgtttagtctcaacaaaaaggatcgaagctaatccaaataaaatcgaagctatccttcggatggagccaccaagcacaaagaaaggggctcaacggctaacaggaagactgacatctttgaatcgatttatatccagatcagcagagagaaatttaccattctttgaagtgttgaagtcggccgaagtcttccaatggggatcaactcagcagaaagccttcgaagagctgaagcagtatctgatagatttaacaaccctaactccaccagcgccaggggctcctctgatgttgtatgtggcagcttcgcactctgcagtaagtgcggcacttttccaggagaagattgaaggacaattgaaaaatcaagctccagtgtacttcgtctccgaagttctcagtttatcaaagaaaaactatacaaaattggagaaggtgttgtatgctgtcttaatggcctccaggaagctccgacattattttcaagcataccatataattgttccttcatcacagcctttgaaggatattatgagaaacaaagaagctactggaagaattggaaagtgggctgcggaactcaacgagttcagcattgattatgtgcatagatcttcgattcagtcccaggcgctagcagacttcatcgctgattggacgccaggggctcaggaggaagaagcaagtaaagatgccgaagcttggacaatgttctgcgatgtttcctggggaaccttcggggcaggtgcagctgccgttttaattgcaccttccaaagtcagaacatgctatgcagtgaaacttgattttagctgcacaaataatattgttgaatatgaagctttacttttggggcttcagaagttgaaggcaatggggataagaagggcggttctcaaaactgattcccaagttatttctggtcatgttgacaagagttgcaaagcaagagatccgaagcttgagaaatatttggatactgttcgaaggcttgaagcttccttcgaagggttttctgtcaagaatattccacgaggagaaaatgagcacgctgatctgctagccaagtcagaggcacaagggctgcctttaccttcggaagtattctttgaaacaataaaagcaccttcggtcgaccttcttgaaagagcagtgctcaatatatctcctgtttatagcgaagattggagaactgagatcatgtcttttctccagggcaatttcctttcagatgacgaagcttataataagagaatagcgacaagagcccgtccatatgtaataatagaaggggagttatacaagcatggagtctgttctccattactcaaatgtttatccagagctgaaggtatagagctgatgaaagaaatacatgcaggcctgtgtggatctcatatcggatctaggcccttgctgggtaaagttttttgtcaaggattttattggccgaaggcagctttggatgcagcagaattagtccaaaaatgcgaaggttgtcaaaaatgtgcaagagatcaaaaacaaccttcgtctctaactcaattaatacagcctacttggccgttgcaaagatggggccttgatttgctaggcccacttccaccagcacaaggaaatttaaaatatgttgtggtggcagtagaatatttttctaagtggattgaggcgaaacctttagccacaataactttggtcactatccaaaaaattttctggcagaatattgtttgtcgcttcggagtgccgaaggctattacagtggacaacggaacacagtttgatgccgaagctttcaaagagttttgtgaacaaattggcacaaagattcattttgcatcggttaggcatccggagtcaaatggacttgtcgaaagagctaatggcatcataatgacagcaataatgaagttaatcttcaatcagcccaggggaaagtggccagatgaattaatcaaagtggtgtggagccacaacacaacaatgtcaaggtcaacaggctgtacaccattcaaattgttgtttggtgatgaagcaataaccccagaagaagctaaagcgggatcaataagaacagtggcttcgccggaggacgaagctgattattttgtggcaaaagatgctatagaagggatcaggcttcaggctgtggagaatatcaataaatatcaagccgaaacaataaaatag

SEQ ID NO: 107886 - DNA, 2538 bp, Zea mays
  Clone ID: MRT4577_29889C.1
atggcttcgttcaaagctggagttgctttggctccaaagctcgtactcccgataacaggcagttcatgctcaaagccagctaacaagaagcagaagatggaggcacagagaagggtacagcatgtaggggtgcaaggacccttcatcaagtcaagatggtcccacatcccgattaccttctcccaagaggatcttcagctcaaggattaccctcacaatgatgctatggttatttcttgtgttatcaaaggatttctggtccacaatgttctggttgacacaggcagtgcagcggatattatatttgctaaggccttcagacagatgcaagagcccgaagataagatccatgacgccacacatcccctttgtggcttcggaggaaggcagattgtagcatttggcaagatcacgatgccagtgaccttcggatttatcaacaatacaaggactgaacaagttgtgtttgatattgttgacatggagtacccttacaacgcaatcattggtcgtggtactctcaatgcttttgaagcaattcttcatccagcatatctttgcatgaagataccttcagatcaagggcctattgctattcatggaagtcaagaagctgctagtaaggctgaaggaaactggacagattcaaaagcaatccataacatagatggagccgacgcttgtgagcaatacaagtacagaagggagaaagctgcctcggctgatcagccgaagcccatgctcttatgtgatatagcagagcagaaggtgctattgggatctcaattgtctgaggagcaggagaaaaccctgataaggtttctgttcaacaacaaagatgtctttgcatggtcagctaatgatctctttggtgtcaacagggatgttattgaacactcgattaatgttgatccatcctttagacctagaaagcagaggcttcggaagatgtctgatgacaaggccggaggtgctcggaatgaagtgaaaagactcctcagcgccggagtcatcacagaagtgaaatacccagaatggctagctaacactgttatggtgaagaaagccaatggtaaatggagaatgtgcattgattttactaatctcaacaaggcttgtccgaaggatgaatttccattaccaaggatagattctctgatgacgaaagaagacgagccaaaaaccagtttcatcacccccagtggtacatattgttaccttcggatgcctgaggggctcaagaatgctggaggaagcttcagcagaatgacagcaaaggagacattcgctaattttaggcaagctggtctgaagctgaatccggaaaaatgtgtcttcagggtaaagaaggggaaattccttggttgtttggtttcaacaaaagggatcgaagctaatccaaataaaatcgaagctatccttcggatggagccgccaagcacaaagaaaggggctcaacgactgacaggaagactggcatctttaaatcggtttatatctagatcggcagagagaaatttaccattctttgaagtgctgaaatcagccgaagtttttcaatggggatcagctcagcaaaaagccttcgaagaactaaaacagtatttgatagatttaacaactctaaccccactagcgccaggggctcctctactgctgtatgtggcagcttcgcactctgaaggcaatttcctttcagatgacgaagcttatcataagagaatagtggcaagagcccgtccttatgtaataatagaaggggagttatacaagcatggagtctgttctccattactcaaatgtttatccagagctgaaggtatagagttgatgaaagaaatacatgcaggcctgtgtggatctcacatcggatctaggcctttgttgggtaaagtttttcgtcaaggattctattggccgaaggcagcttcagatgcagcagaattagtccaaaaatgcgaaggttgtcaaaaatgtgcaagagatcaaaaacaaccttcgtctctaactcaattaatacagcccacttggccattgcaaagatggggccttgatttgctaggcccacttccaccagcacaagggaatttaagatatgttgtagtggcagtagaatatttttctaaatggattgaggcgaagcctttagccacaataacttcggtcactgttcaaaagtttttctggcaaaatattgtgtgtcgtttcggagtgccaaaggccattaccgtggacaatggaacacagtttgatgctgaagcttttagagagttttgtgaacaaattggcacgaagatccattttgcatcagttcggcatctagagtcaaatggtcttgtcaaaagagctaatggcattataatgacaggaataatgaagttaatcttcaaccagcccagggggaagtggccggacaaattaatcaaagtggtgtggagccacaacacaacaatatcaaggtcaacaggttttacaccattcaaattgctgtttggtgacgaagcaataacccagaagaagctaaagcgggatcaataa

SEQ ID NO: 107887 - DNA, 302 bp, Zea mays
  unsure (1)..(302): unsure at all n locations
  Clone ID: MRT4577_2988C.1
tcccgagcagccgccctttttttttttttttttttacnaaggtcagaaaaaactgcnnctcccagaacaaaaaagancagggggggggtcataggaaggttttttgttccccaccaccccaaataaacggaacacatgcccgaacaactactacccataacaaaacatgtacacacagggcaactacgtacaagaacgacaccagcaataaattgagtaggagcgtaacgtactaagaagaacaacaacacattaaatcccataggtggcacaaccagacaaatggtctataacgagctagg

SEQ ID NO: 107888 - DNA, 784 bp, Zea mays
  Clone ID: MRT4577_29890C.1
atcatagttatcatacctgaaaaaaagaatcttctacggtattctggttgttagttcaaaataacatagattatataatctggacagattataatccaaaataaacatgaccttagtgttcataaatcataatagatgcagagcagagtataacgaaaacatattgcatatgctcaggcaccttttgtggctttatgttactctttctcagggtattttggatctatagtaggttgacacagtgccatgcctgccatgtgcaacgcaacttcttttcagcttctactccgcattctgaacctgcgacggtacaatgggcgtatcctttttgttccagcaccaggatacgaagaagttggtgatcctgtggaccaagctaccggttacgaaacaaacgggtttagcacgggatttcaagacgacggaagaaccggcagtaatggtgagacgtgtggctatgtgggcccgtcgatcaaagaagcaagctggtcttagatggagatcactggatgggccattcgtttcagtctggctcggcaatgttcctttcgctagcgaagatgccatggcagcaccaaaagctgagtttgcggatggctacttggatgctgctataatcaaggattgtcctcggtgggatgtcctcgggctcgtgttccagatgaaggacggcagctacgtgaactcgccatgcgtggagtacttcaaggtgaaggcgatccggatcgagccgggccttggcgctttgaccaccagcaccgacgggatcatctactccgacggg

SEQ ID NO: 107889 - DNA, 3480 bp, Zea mays
  Clone ID: MRT4577_29891C.1
atggccagagtgcgatcagctgcaagggtgtctcgcgagggagaagaaatcgaggctactgaaacagcaccaatttcaaaagtgatggaacgatctggtctagttgtgagagagggagctgctgacgaaggtgctcttgatgccgaagctgagcaaactgttgttgaggaagaaaatgttgatgagagcgaagaagattatagtatcttgatcccgacaaagcctagtcacctagattttgaaaaatctactgtgggctattttggagaagctgaaagcaaacttgtccgatttgccagagaagatactaccccagcatcgaagaatgatgaagtagtggtttttaggagcttctttagagcaggactggatacgaaggcaccagtccttagctactatacaaagtggccaaccggctggaaaaatgaatggttttatattaaggctgatgagaaaaagagggggaaactgatgacgatggtcatgagcccgctatctttaaacttcggaatgacacggctcctgttgggggtatgcttcatcgccgaagatcctggacccttcatcaagtcaaaatggtcccacataccaattaccttctcccaagaggaccttcagctcaaggattaccctcacaatgatgctatggtcatatcttgtgtcatgaagggatttctagtccacaatgttctggttgatacaggcagtgcagtggatatcatatttgctaaggcctttagacagatgcaagagccaaaggataagatccatgatgctacacaccccctttgtggtttcggaggaaggcagattgtagcacttggcaagatcacgatgccagtgaccttcggatttgtccacaatacaagaactgaacaggttgtgtttgatattgttgacatggaatacccctacaatgcaatcattggtcgtggaacactcaacgcattcgaagcaattcttcatccagcatatctatgcatgaagataccttcggatcaagggcctattgctattcatggaagtcaggaagctgccagaaaggctgaaggaaattggatagactcaaaagcaatccacaatatagatggagtcgaagcttgtgaacagtataagtacagaagagagaaggctgctttggctgatcagccgaagcccatgcttctatgtgaagacatagcagagcagaagaaggaagatgagccaaagaccagcttcataacccccagtggtacatattgttatcttcggatgcctgaggggctcaagaatgctggaggaagcttcagcaggatgacagccaaggttcttcattctcagataggcagaaatgtactaacatatgttgatgatatcatagtgaagagcacgaagcaagaaaaccacattactgatttgcaggaaacatttgctaattttaggcaagctggcctgaaattaaatccagaaaaatgtgtcttcggagtgaagaagggcaagttccttggctgtctagtttcaatgaaggggatcgaagccaacccaagcaagatcgaagctatccttctaatggagccgtcaagcataaagaagggggcccaatggctgacaggaagtctggcatctttgaatcgatttatatctagatcaacagaaagaaatttaccattctttgaagtactaaagtcagctgaagtttttcaatggggtccaactcaacagaaagttttcgaagagctgaagcaatacctgattgatttaacaacattaactccacccgtgctaggggctccattgctattgtatgtagcagctttgcactctgtacccctgaaggatatcatgaggaatagagaagctactggaaggattggaaagtgggccgtggagcttaatgaattcactattgactacgtgcacaggtcttcaattcaatcccaagcgctagcagatttcatcgctgattggacgccaggggctcacgaagagggaacaagcaaagatgccgaagcttggacagtgttttgcgatggttcttggggagccttcggtgcaggagcagctgcggtcctagtagcaccttcaaaagtcaaaacatgttatgcagtcaaactagatttcagttgcacaaataatattgctgagtacgaagcactcctattggggcttcagaaactaaggccaatgggaataagaagggccatcctaaagactgattctcaagttattgctggccacgtggacaaaagtagcaaggcacgagatccgaagcttgaaagatatctggatacagttcgaaggttggaggcttccttcgaaggtttttctgtcaagaatattctaagaggtgaaaatgagcatgcagatttgctagccaaatcagcagctcaggggctccccttaccctcggaagtattttttgaaacaataaaagcaccttcggttgagctcatggagaaagcagtgcttactatttctccagtacacagtgaagactggagaactgaaataatatctttcctccaaggcaattgtctttcatgtgacgaagcttataacaagagaatggtggcaagaacaagaccatatgtgataatagaaggggaattgtataaacatggagtttgttcaccactcctcaagtgtttatcaagaactgaaggtatggaattaatgaaagagatacatgcaggtctgtgtggatctcacattggatctaggcccttgttgggaaaagtttttcaacaaggattttactggtcgaatgcagcttcggatgcagcagaattagtccaaaaatgtgaaggctgtcaaaaatgtgcaagagaccagaagcaaccttcatctctcactcagttaatacagcccacttggtcgttgcaaaggtggggcctcgatttgctaggcccacttccaccagcacaaagaaatctaaaatatgttgtggtggcggtagagtatttttccaagtggattgaggcgaagcctttagccacaataacttcggtcaccgtccagaaattcttctggcaaaacattgtttgtcgcttcggagtgccgaaggctattactgtagacaacggaacacagtttgatgctgaagctttcaaggaattttgtgaacaaattggcacaaagatttattttgcattggtcagacatccggagtcaaatggacttgttgaaagagctaatggcattataatgacgggaataatgaagttaatcttcaatcagcccagaggaaagtggccagatgaattgatcaaagtggtctggagccacaacacaacaatatcaaggtcaacaggttttacaccattcaaactattgtttggtgacgaagcaataaccctagaagaagctaaggcaggatcaataagaacagtggcttcggcagaggacaaagctgattattctgtggcaaaagatgctatagaagggatcaggcttcaggccgtggagaatatcaataaataccaagccgaaacaataaaatga

SEQ ID NO: 107890 - DNA, 2069 bp, Zea mays
  Clone ID: MRT4577_29892C.1
aaaaaaaaaaaaaaaaaaaaaaaatgctaaaaaaaaaaaaaaaaaaaaaaaaaggtcgcgttccatcgattctccacgagcggatagcggcgtacagatcttttcgtgctcgtcttcgcgtcggtgtggctggccccccgtgagaagtcaaaatctcacagcatattgattgggctgattgattccgtgggcgggaatcggggatctggcattctcgcgcccaaaaggtcgcagctttctttcgtgtcgccagccggtgcgcggtcgacgacgcagagcgtggagggtgtcccgctagtagctcctcgacgacgacggtgacgggaggccgggggttgaccatggtggcggcggcggacctggaggcggcggagcgggtggtggcggagctccgcgaggcgtgcgcggcgcggctcgacgaggtggcggcggcgatggaggcggagatgcgcgccggactgcgcgaggagggcggcagcaagatcaagatgatcgtctccttcgtcgacaacctccccacggggaacgaagagggcgtcttctacgccttggaccttggcggaacgaacttccgcgtgctgcgcgtgcagctcgccgggaaggacaggcgtgtggccaagcgagagtccaaggaggtgtccatccctcctcacctcatgtcaggcaacgcatcggagctgtttggcttcatcgcctccgcgctagccaagtacgtcgccgcggcgggcgaaggggacggcaggcagagagagctcgggttcaccttctctttccccgtgcgccagacgtcgatcgcgtcaggcacgctcatcaagtggaccaaggcgttttcggtcgacgacgctgttggtgaggatgtcgtcgccgagctgcagacggccatggagaagcaaggcgtcgacatgcgtgtggcggcactgatcaacgatacggtcgggacgctggctgcgggccggtacaacgatgaggacgtcgtcgtcggtgtgatactaggcactggctccaacgccgcgtacgtcgaagaggccagtgccatacccaagctcaagctggagggcggcgaattgcccaagtcagggaacatggtgataaacacagaatggggtaacttctactcgccctgcctccccatcacggagtatgaccaggccttggatgaggagagcttaaacccaggggagcagatcttcgagaagctggtttcgggcatgtatctcggcgagattgtgaggcgggtgctgcttaaaatcgcgtcgcagtcttccatcttgggcgatgtcagccacacgaacctcaaaactcgcttcagtcttaggactccggacatctccgcgatgcaccatgacggcacgcctgacctgagagtcgtggcggagaagctggccgacaacctcagggtcagggacacgtccttggacacgaggaagatggtggtcgagatctgcgacatcgtcaccgggaggtctgcccggctggccgcggcggggatcgtcgggatcctcaggaagatcggtcgagcggcgccaggcgacgagcgccggtcggtcgtcgccatcgacggcggcctgttcgagcactacgccgagttcaggaagcgcctggaggccacgctggtggagctgctcggggaggaggcgtctaggctggtggaggtcaagctcaccaaggacgggtctggcctcggagccgccctcattgcagctgcccactcgcagtactgaacgcccaacggccgtgtgtgtcggtgtgcaactcgtgctgaattcctgtacgttttcaagaacaagtttgctcggaatctgccaacaagcaagtgctctaatggaaagttgctatgcggaatcctagtgagttcagggtttccaatgtttttttttttcctagagggatgggggatgtgacttcagctttccaggcagttgagacttaattgagatggagcagctgtgcctctggttcatttcccgaaaggctccaggagagaggcccagaggtccaaaacaaaatgatataagctccactttgttttaattcgagattaggcaaactaaagatattctcagggcaat

SEQ ID NO: 107891 - DNA, 663 bp, Zea mays
  Clone ID: MRT4577_29893C.1
gggtacctcgaggccggccgggaggtggtccattgctctcggctactccatgcatactcctcgctctagcctacgagtaagctaccaacaatggggcacgacaacggacgctgcactaccgcggcccttcttccgcgatatctatagctcaaaacagcgtccaccttatttggccactgtaatggactccgtggcgcacagccgaaggcataaccggtagctgcagggcagatgacaatggcgatcgtctcatatgatcttgcatccccctcataactaaaaggtaaacaggggagcgaatgaggctacgaacagccggaacaggggcataacccagataacatggatggcgtcgtgcacagagacttgctaaatgctggtcgacctctgcttggtagtgtgaggataagatacatgccatatgtgctgtagccaacagtcgaagctgatctctccgccgcacttgtactacgacaagaacgcgtattgcttgctgactgaccacaaatgaggcgaggcagatgacattacagacacactacgcgcagagactccattgagaagatattcataagatctgcagaagaaatcacaacgcgatgttccacagcgacactctgttcacagactagtgctgctagacgtgtattgtctactatgcgc

SEQ ID NO: 107892 - DNA, 350 bp, Zea mays
  Clone ID: MRT4577_29894C.1
cggacgcgtgggcggacgcgtggggaaaattgtcaaacttcttaaattgcgaggagaaaggaaggcggagaaaaagcagaaggcaccatctagtagttcagtaaatgccgagaacgatgatgatgtcctgggtttagtaagagaaattaacttgagcaaccaagaagatttggaggaattgcaaaagggcaagcctaagaagcgcctgacagatacaaaaaatagtaacaagaagccacttgatttttcttcacctaaacgcaaaagatcaatttctaagagtagaccacattcagcataaggtagtaaaaacagtgatgaccgtctaatacatactcctaacacagaga

SEQ ID NO: 107893 - DNA, 1239 bp, Zea mays
  Clone ID: MRT4577_29895C.1
atggcttcgttcaacaaccaagctgaagctgcttcggctacgaagctgatgctcccgataacaggcggttcatgctcagagccagccaacaagaagcagaagaaggaggctcagagaagggaggaccttcagctcaaggattaccctcataatgatgctatggtcatttcttgtgtcatcaagggatttcgggtccaccatgttctggttgatacaggcagtgcagcggattttatatttaccaaggccttcagacaaatgcaagagccagaggataagattcatgatgctacacaccctctttgtggcttcggaagaaggcagatcgtagcactcggcaagatcacgatgccagtgaccttcggatttgtcaacaatacaaggactgagcaagttgtgtttgatattgtcgacatggagtacccctacaatgcaatcattggtggtgggacactcaatgattttgaagcaattcttcatccagcatatctatgcatgaagataccttcggatcaagggcctattgctattcatggaagccaggaagctgccagaaaggctgaaggaaactggacagattcaaaagcaatccataatatagatggagccgaagcttgtgagcagtataagtacagaaggaagaaggctgcttcggtcgatcagccgaagcccatgcttctatttgaagatatagcagagcagaagaggcttcggaaaatgtctgatgacaaagccgaaggtgctcggaatgaagtgaaaagacttcttagtgctggagtcatcaaagaagtaaaatacccagaatggctagccaacaacactgttatggtgaagaaggccaatggtaaatggagaatgtgcattgattttactgatctcaacaaggcttgtccaaaggatgagttcccattaccgagaatagattctctagtagatgcagcagcttcgtcagagttcatgagtctactagattgttattcaggctaccaccaaatctggatgaagaaggaagatgagccaaaaaccagcttcataacccccagtggtacatattgttatcttcagatgcctgaggggctcaagaatgctggaggaagcttcagtagaatgactgccaaagtccttcactctcagataggcagaaatgtgctaacatatgttgatgatatcatagtaaagagcacgaagcaggaaaatcacattgctgatctgcaggaaacatttgctaattttaggtaa

SEQ ID NO: 107894 - DNA, 560 bp, Zea mays
  Clone ID: MRT4577_29896C.1
gaagcacttcttttggggcttcggaaactaagggcaatgggaataagaagggccatcctaaagactgattctcaagtcattgctagccatgtggataagagcagcaaggcacgagatccgaagcttgaaaaatatctggatgcagtctgaaggttggaagcttccttcgaaggtttttccgtcaaaaatattcctagaggtgaaaatgagcatgcagatttgctagccaaatcagcggctcagggctccccctaccctccgaagtattttttgaagcaataaaagcaccttcggttgagctcatggagagagcagtgcttactatttctccagtacaaagtgaagactggagaactgaaataatatctttccttcaagacaattgtctttcaagtgacaaagcttataacaaaagaatggaggcaagaacaagaccatatgtgataatagaaggggaattgtataaacatggagtttgttcaccactcctcaaatgtttatcaagaaccgaaggtatggaattaatgaaagagatcatgcaggtttgtgtagatctcaca

SEQ ID NO: 107895 - DNA, 657 bp, Zea mays
  Clone ID: MRT4577_29897C.1
ggccggccgggacgccatatcaaagctgtggaagtcatctccactgtctaactgcgaattccgtacaacatatgttgcggatatgatgaagggggagattatctagtgccactgttccaaatgccgcgtactctactgccacaggcttgaatctaaatatggtaggacaggacccctataaccacgcaatggagctcaccggattctatgaacatgccagatacaaccgggggtacatacgctgcatggagaggtgtcacacgcagagccagagggcaaagctccttgctgctcggatgcagagccacaagatttaggtccggcatgagctcaacagaaaacttgatgagaaccgcacatgagacgcaaagacaattccaaggattggatttagtacatttcccttgaccattgtaccatgaggtaagtctcatgaggttctgattcttagaactatataggtagatatggccatgtacgctgagctggccatggatgatgcagctggtgactcgacgcaggacgatctgaccgctgatacgcccgtactgatgggctacgtgccaataactcgcggagcgaagcgctctgaagaggttggggagcccccagctccgactattgctcccgctagcgatggcaaattgcgcccttggc

SEQ ID NO: 107896 - DNA, 705 bp, Zea mays
  Clone ID: MRT4577_29898C.1
ttaatcgcacccatcaggccttagcagctttatgttgatgggggttaccagctgagaattaggagtcttgagggtacccctaatcatggtccccgacactgctgcatccactagagaatctatccttgataatggaaactcatccttcggacaagccttgttgagatcagtaaaatcaatgcacattctccatttgccattggccttcttcaccataactgtgttagctagccattctgggtattttacttctctgatgactctagcactaagaagtcttttcacttcgttccgagcaccttcggcttttgtcatcagacattttccaaagcctctgctttctaggtaagcttcggctccatctatattgtggattgcttttgaatctgtccagtttccttcggcctttctggcagcttccagactaccatgaatagcaataggcccttgatctgaaggtatcttcatgcaaagatatgctggatgcagaattgcttcaaaagcattgactgtcccacgaccaatgattgcattgtaggggtactccatgtcgacaatatcaaacataacttgctcagtccttgtattgttgacatatccaaaggtcactggcatcgtgatcttgccgagcgctacaatctgccttcctccgaagccaccaagagggtgtgtagcaccatgaatcttatcctctggctcttgcat

SEQ ID NO: 107897 - DNA, 514 bp, Zea mays
  unsure (1)..(514): unsure at all n locations
  Clone ID: MRT4577_29899C.1
tggagaatctcggccttagataatggtgccctcatagagaagtgtgttttctagaaataatcaatatattgattgagatttatctcaaaaaaaaaagtgggataccattagaaagaccagccttatggaaggaggctgctgagagaggtntaattggggagggggggggtatgccgnatcatgcgagggtccggcttccgattcaacagggtgcgtgggtgcactagggtgcatttgcgaatgcagtacatggacttctttatgtaaagtattgcattagacctgctggttgttgatagttgagctaagttccttgactggggcttgagcccttggatacttagcagaagccaacagatgggactgaactgccctagttagcgcctagtcctgatcagcaagctgatcctgcaggtggcggatgtcgcttcttgattnatttattgtatggtgatccgtaacccatattttggttctgtgtttgaattgcgcttggaagttgatttactcgtgc

SEQ ID NO: 107898 - DNA, 333 bp, Zea mays
  Clone ID: MRT4577_2989C.1
tttttattttttttttttttttttttttttttttgggggttttggaaaaaaaaattaaatccggcacgggacggacatgaccgggagcccgtttcacagatgaacatgaaccccaggagggaccatggatcgattatggggggtgcagttgacaggatcttatttagaccctgctattaaatatatttatacccctcggcggggtggtccttttaacttttgggcgccatttccgggccgggcgggccggtttaattgcaactgcagaaggagcaaccccaattggggccccaattgcaggtgttggaattccaacccccgcccttggggggc

SEQ ID NO: 107899 - DNA, 326 bp, Zea mays
  unsure (1)..(326): unsure at all n locations
  Clone ID: MRT4577_298C.1
tgcttcaaatacccacagtccacagcaagaaccgaagatgttcggaaacatggtgagagatcccnatcatcggcgacctgacgggcagcaacaagaatgcgcacctcaagggcaacctggtgctcatgcgcaagaccgtgctcggcttcgactgtactagcatcgtcgtctttctcatggacttccttattcttgtttctctaattttattttttttctatttatattctttattctcaaattattaattttttatatttcttattccttttctttataattaagctatttagcttgagtttttttatcataattatttccttttt

SEQ ID NO: 107900 - DNA, 363 bp, Zea mays
  Clone ID: MRT4577_29900C.1
tttagactatactttgggtgcgagctctattccacattctcaagatataaggcgcgcaaaaatgtagcatatgctgaacttggaactctagcgcatccttatcacgcctataactgaagccaagggacatgcgatcgcaattcctgggggacttccaataccacattgacaagatataaggaggccaaaatgtacatatctgaatggcgaatattgcggttcctattaaaggtatcctcaagccaaaggaaatgacatccgcattcctctacgtatcccaattccacattttcatgacctacggagggctaaatgttcatatatgaattggcattatcagcatgattactaggcctatcctga

SEQ ID NO: 107901 - DNA, 1800 bp, Zea mays
  Clone ID: MRT4577_29901C.1
atggctggggacagcgtgcccgtgagcacgccccgtgcgaggaggagtcatacacttgggatttatgtggacagacgtgtgaaagccacagattcagttttgcatttgagaacaagtccccaacattggcgcccacctccggtgaactcacttccactgattgagctgatggcttcgttcaacaatgaagctgaagtagcttcggctacgaagatggtgctcccgataacaggcggttcatgttcagaaccggccaacaagaagcagaagaaggaggctcagagaagggtgcaacatgttggggtgcagggacccttcatcaagttaaaatggtctcatatcccaatcaccttctcccaggaggaccttcagctcaaggattaccctcacaatgatgctatggttatatcttgtgtcatcaagggatttatggtccacaatgttctggttgatacagacagtgcagcggatatcatatttgttaaggtcttcagacagatgcaagagccagaggataagattcatgatgctacacaccctctttgtggcttcagaggaaggcagatcgtagcacttggcaagatcacaatgtcagtgaccttcggatttgtccacaacacaaggactgaacaagttgtgtttgatattgttgacatagaatacccctacaatgcaattattggatgtgggccccttaatgctttcgaagcaattcttcatccagcatacctatgcatgaagatacctttggaacaagggcctattgcaattcatggaagtcgagaagctggcgggaaggctgaggaaaattggacagactcaaaagccatccacaatatagatggagccgaagcctgtgagcagtacaagtacagaagagagaaggctgcttcggctgatcagccaaagcccatgcttctgtgtgaagacatagcagagcagaaggtactgctggggtctcaattatctaaagagcaggaaaaaactttgataagatttttattcaacaacaaagatgtttttgcatggtcggacaatgatctctgtggtgtcaacagggatgtcattgaacattcactcaatgtcgatccatccttcaggcccagaaagcaaaggcttcaaaaaatgtctgatgataaagccgaaggtgctcggaatgaaataaaaagacttctcagtgctggtgtcatcagagaagtgaaatatccagagtggctagccaatactattatggtgaagaatgctaatggcaaatggagaatgtgtattgatttcacagatctcaacaaggcatgtccgaaggacgaattttcattaccaaggatatactctcttgtggatgcagcagcttctccagaacttatgagtcttctggattgctactcaggatatcatcaaatatggatgaagaaggaggatgagtcgaagactagcttcataactcctagtggaacctattgctatcttcggatgcctgaggggctcaaaaatgttggaggcagttttagcaggatgacggccaagtgtgtctttggagtgaagaaggcttcgcactctgcagtgagtgcggcgcttgtgcaggataaattggaaggacaaatcaaaaagaagcttcgacattattttcaagcattccatataattgttccttcatcacagtctctgaaggatatcatgaggaacatagaagctactggaagaattggaaagtgggctgcggaactcaacgaattcagcattgattatgtgcatagatcctcaattcagtcccaggcattagcagacttcatcactgattag

SEQ ID NO: 107902 - DNA, 191 bp, Zea mays
  unsure (1)..(191): unsure at all n locations
  Clone ID: MRT4577_29902C.1
caaatccaacacggcgtgctntnncgcacattacaaggcacggtctccatgctctactttagntccaaacaatgttcctgccttngagacaaatattgaacctgcatttcatatttcgnccttnggcgactttnaanacattgctgncncatcaccaatttttgaatcagaccnaatttaatttanaaaag

SEQ ID NO: 107903 - DNA, 567 bp, Zea mays
  Clone ID: MRT4577_29903C.1
cgtaagttaaaggcaatggggataagaagggcggtccttaaaactgattcccaggttatttctagtcatgttgacaaaagttgtagagcaagagacccaaagcttgagaaatacgtggatacagttcgaaggcttgaagcttctttcgaagggttttttgtcaagaatattccacgaggagaaaatgagcacactgatctgctagccaagtcagcggcacaggggctgcctttaccttcagaagtattctttgagacaataagagcaccttcggtggaacttcttgaaagagcagcactcaatatatctcctgttcatagtgaagattggagaaccgagattatatcttttctccaaggcaactgcctttcagatgacgaagcttatgataagagaatagaggcaagagctcgaccatatgtaataatagaaggggaattatacaaacatggagtctgttctccactgctcaagtgtctatccagagctgaaggtatagaattgatgaaggaagtacatgcaggattgtgtggatctcacattgaatctagagtcgacctgcaggca

SEQ ID NO: 107904 - DNA, 2709 bp, Zea mays
  Clone ID: MRT4577_29904C.1
atggcttcgttcaacaaccaagctagagctgcttcggctccaaagctggtactcccgataacaggcggttcatgctcagagccagctaacaagaagcagaagaaggaggcacagagaagggtacaacatgtcggggtgcaaggacccttcatcaagtcaagatggtcccacatcccaattaccttctctcaagaggaccttcagctcaaggattaccctcacaatgatgctatggttatttcttgtgttatcaaaggatttctggtccataatgttctagttgatacaggcagtgcagcggatattatatttgctaaggccttcaggcagatgcaagagcccgaagataagatccatgatgctacacatcccatttgtggcttcggaggaaggcagattgtagcgctcggcaagatcacgatgccagtgaccttcggatttgtcaacaatacaaggactgaacaagttgtgtttgatattgttgacatggaatacccttacaatgcaatcattggtcgtgggacactcaatgcttttgaagcaattcttcatccaacatatctttgcatgaaaataccttcggaccaagggcctattgctattcatggaagtcaggaagctgccagaaaggccgaaggaaactggacaggttcaaaagcaatccataacatagatagagccgaagcttgtgagcaattcaagtacagaagggagaaggctgcttcggctgatcagtcgaagcccatgctcttatgtgaagatatagcagagcagagggtgctgctgggatctcaagtgtctgaaaagcaggagaaaaccctaataaggttcctgttcaataacaaagatgttttcgcatggtcagctaatgatctctgtggtgtcaacagggatgttattgaacactcgctcaatgttgatccatccttcagacccagaaagcagaggcttcggaagatgtctgatgacaaagccgaaggtgctcgaaatgaagtgaaaagacttctcagcgctggagtcatcagggaagtaaaatacccagaatggctagctaacactgttatggtgaagaaggccaatggtaaatggagaatgtgcattgattttactgatctcaacaaggcttgtccgaaggatgaatttccattgccaagaatagtgtggcagaacctcccaagttattgggcccacatgcacctgtccttgtctcaaagacctcagacagctatgcatgtgcactaaataacttaacaggatccgtccgattgacccaaggacatcggataaaccacttacaaccagaaccgcgggattaagtaaacacaaatcacacacaccaatatctttgcagcggaaatcttattaccaaattttacaagttacatcaagttttacaatgtaaatgatcggagtgattacaaaaagtgattcaaagaagtaactttgaactgttataaattatttgtagttttgaaatatatgctagcttaagtgaccatcctcaataagaagtatagaagagttacttagacttataagaaggccgagcccaccggcacttaacaccatcatcaacagcacaaaactataacctgagtaacactaggttagtgtttgttagccgaccacatgacgagcatccattggcttggcactcgttcagatccatcttccggttcgttcatcagcatcatcctgcggattagcccgcgcttggtatcgacttgactcttttccttcgtcttacttgattaattatcgtacatcataagatgcacaatgcacatgtatgagcataaagtaaccggatgatacaaaaaagagaatcaaatatttagcggcaagacatcgatacaatcctacgaaagcactagacatctataactcactaaacacaacaatcacgatttttctagttttaccagatttaactagcgggaataatagatcagcttaccctgatcgaatcgacccgataaccgcgagggcgacgacggcttggcgaggaggtgagcgagacgtcgcagcacgcggagtgaactcaggacgatatcgagagcgccgatgctgccgtagcgagatcgagacaaggacgaggatgacaatcaggtgtagcgagacaacagagaatagatggcatagtagacgtctccacggcggcatcatagtaccactgtgaggtctagtagtagctgacaacgctggcgagttccacaagccggagcgtgcacgacatcaaaacggatgagcacgtgacctggtgacccagcacaggcacacacgaaaccgagctccatggccaagcgcttgagtcggtgagcgtgcagccgtggaaaagaaacgacgactggaggcgctgcctggcgaaggaaagaacgcgcccgactttggctagaaccagcgacacgatggcttgaagactgagcgaggcgagcaacgtgttggagttgctggggagctcgcgcgtctgggaaaatctaacgtcgacgagcaggagcgagcgttcctggtgctggagcagcccggccagcagtacaaagcgcgcagtggtgcagtggtgagatgggtggcgtgggtgattcccagggtgttcaacgcatcttgtgaaggaagtttccaggagctgaatacgtgggaaataaatgacgtgaatgagatgcagaggtggcgtgaggaagagcttctactttttcatcttccgcaggagtc

SEQ ID NO: 107905 - DNA, 121 bp, Zea mays
  Clone ID: MRT4577_29905C.1
ctcactcttcggccgactgctacaagacgtaatgctgcgctgccactgcgtgaacatgtctgcgcaacgcaccatggctcataggataacactgccgaggatggatcttgctccagatgga

SEQ ID NO: 107906 - DNA, 2952 bp, Zea mays
  Clone ID: MRT4577_29906C.1
atggttatatcttgtgtcattaagggatttctggtccacaatgttctcgttgatacagacagtgcagcagatatcatatttgctaaagccttcagacagatgcaagagccagaggacaagattcatgatgctacacaccctctttgtggcttcggaggaaggcagatcgtagcacttggcaagatcacgatgctagtgaccttcggatttgtccacaacacaaggactgaacaggttgtgttcgatattgttgacatggaatacccctacaatgcaatcattggtcgtgggacacttaatgctttcgaagcaattcttcatccagcaaacatatgcatgaagatacctttggaacaagggcctattgcaatttatggaagtcaggaagctgccggaaaggctgagggaaattggacagactcaaaagccatccacaatatagatggagctgaagcttgtgagcagtacaaggatgtcattgaacattcactcaatgtcgatccatcctttaggcccagaaagcaaaggcttcagaaaatgtcttatgataaagtcgaaggtgctcgaaatgaagtaaaaagacttctcagtgctggtgtcatcagagaagtaaaatattcagagtggctagccaatactgttatggtgaagaaggccaatggcaaatggagaatgtgtattgatttcacagatcttaacaaggcttgtccgaaggacgaatttccattaccaaggatagactctcttgtggatgcagcagcttcgtcagaacttatgagtcttctggattgctactcaggatatcatcaaatatggatgaagaaggaggatgagtcgaagactagcttcataactcccagtggaacctattgctatcttcggatgcctgaggggctcaaaaatgctggaggcagtttcagcaggatgacagccaaggtccttcattcccagataggcagaaatgtgctaacatatgttgatgatatcatagtaaaaagcacgaagcaagaaaatcatatcattgatctgcaagaaacatttgctaatttcagacaagctggcctgaaattaaatcctgaaaagtgtgtctttggagtgaagaagggtaagttccttggctgtctggtttcaacgaaggggattgaagctaacccaagcaagatcgaagccatccttcgaatggaaccgccaagcacaaagaagggggcccaacggttggcaggaagactggcttcattgaatagatttatatctagatcagcagaaagaaacttgccattctttgaaatactaaaatcagccgaagtctttcaatggggcccagctcagcagaaagccttcgaagagctgaagcaatacttgattgatataacaacattaactccacccacgccaggggctccgttgctattgtatgtggcagcttcgcactctgcagtaagtgcggcgcttgtgcaggagaaattggaaggacaaataaaaaagcaagccccagtatactttgtctccgaagttctaagcttatcaaagaaaaattatacagaattggagaaggtgttgtatgctgtcttaatggcctccaggaagcttcggcattattttcaagcattccatataattgttccttcatcacagcctctgaaggatatcatgagaaacagagaagctactggaaggattggaaagtgggctgcggaactcaacgaatttagcattgattatgtgcatagatcctcaattcagtcccaggcgttagcagacttcatcgctgactggacgccagtggctcaggaagaagaagcaaataaagatgccgaagcttggatagtgttctgcgacggttcctggggaaccttcggggcaggtgcggctgctgtcttagtcgcaccttccaaagtcagaacatgctatgcaataaagcttgatttcagctgcacaaataatattgctgaatacgaagctttgcttttggggcttcggaagttaaaggcaatggggataagaagggcggtccttaaaactgattcccaagttatttctggtcatgttgataagagttgcagggcaaatgacccaaagtttgagaaatacctagacacagttcgaaggcttgaagcttctttcgaagggttttctgtcaagaatattccacgaggagaaaacgagcacgctgatctgctagccaagtcagcggcacagaggctgcctctaccttcgaaagtattctttgagacaataagagcaccttcagtagaacttcttgaaagagcagtgctcaatatatctcctattcatagtgaagattggaggactgagattatatcttttctccaagctttcaaggaattctgtaatcaaatcggcacgaagattcactttgcgtcagtcagacatccagagtcaaatggacttgtcgaaagagcaaatggtattataatgacaggaataatgaagttaatttttaatcaacccagaggaaagtggctagaagaattaattaaagtggtgtggagccacaatagaactgtatcaagatcaacaggttttacgccattcaagttattgtttggtgacgaagctataaccccagaagaagttaaagcggggtcaataagaacaacagcttcgattgaagacgaagctgattatcatgtggcaaaagacactatagacggggtcagacttcaggctgtggagaatataaataaatatcaagccgaaacaataaaatggcgcgacagaaaagtccgactgaaaaatatcaagccagggcatttggtgcttcagagagtggctaatccggacacagtaggcaaactacagctgaagtgggaaggacattttttggtagtatcttcgtcaaggcccggttcttacagattaaaggatatggatggcaatgacattcctagatcttggaacgcggatgagcttcgatggtattatgtatag

SEQ ID NO: 107907 - DNA, 273 bp, Zea mays
  unsure (1)..(273): unsure at all n locations
  Clone ID: MRT4577_29907C.1
caggaccggctcgtaattcccggttttacccacccgggctcaggaacgcgaacaacacanngnnaggggggagtgttaaggacnggagggcaatagctacccggngggggcaaggggccacgaacggcacgcccggaccgacaaaggcccaagccaccgaagaaggccgaccggaacaagaagccccagcaccaacaccggncagcacagcacggggaagaggccccaccacaggaccagccccaggaggccaccacgcacagcccgcagaaa

SEQ ID NO: 107908 - DNA, 233 bp, Zea mays
  Clone ID: MRT4577_29908C.1
ccaccccttcatctaccgcctccgttctatataccgcctccgttctatctgccgccacaacaacaaccacaaccatggcaataccccactcaaccaccccagctaaacccgtgccaacagttcagatcctgccgcgtcaacaacctcagcaaccccttcctgggccattgcacccacttcctgaagcaccaatgcaaccccgctgtgacaccctacagctcaccacaatgcca

SEQ ID NO: 107909 - DNA, 298 bp, Zea mays
  Clone ID: MRT4577_29909C.1
cgcagcgcacttgtgccaaattcggcatctgagaccagatacctgcgggtgctgtagtcatggccttaagctgcgaactgcatgaccggcacgatgagtctcaagtacgtgtgtcccgcgtatagccacgacaggcaggggcagtggatgacgtaatagttgaatgaaacgagggggctggtatcggctttgattggctcgcgtgctacacctgatgaagacaatctgcgtcatcgtcgccacatgagctccatgagcaacagcagtgtatagttgtagcgaaagagtgcgacagaag

SEQ ID NO: 107910 - DNA, 451 bp, Zea mays
  Clone ID: MRT4577_2990C.1
attcttagaggcgaaacgagtaatcgtctcattctttgtttgcacataattatctttcagcaatgaaatgcaataggtgagccttccatattgcttataaaataataattacgcaaactcacaaatttaacacatccttggtgaacagaaatccagatcacatcacatagttttttgttgtctgccctaccaatctatttcttattttcaagagactttattctcaccactgctaattacacacttgaccccctccggtacttatttgccacgcttccctgctccgaacaaaagtctacgtttgcttcggccggtgttgacccgggcttataatctcgtctcgagtattacccatacgcacccgctctgatgagcatgctacgctatgcgtttactgagccctgatgattatccctaccttgtccatcgtacaaacgctggagcaccttgg

SEQ ID NO: 107911 - DNA, 201 bp, Zea mays
  unsure (1)..(201): unsure at all n locations
  Clone ID: MRT4577_29910C.1
cgcatagttcaatattcttttcctgtcaggnccgtttttgttaannagtacttgtgttaggccagccccaaatcatataactcccttgtaattctataactatataaacaactgcataacttatttcagaccaattttttaacccacacctcacattcaaacaatattgcccatctctatccatccactttacaaacatac

SEQ ID NO: 107912 - DNA, 492 bp, Zea mays
  Clone ID: MRT4577_29911C.1
atggtggaatcgttgcccacaaagagaggatgtgaggggtgtggtggatgggagtggaataacgagctagcggtaggagtggtgtggaaagagcctccggagtcgaccacacagtcggtgggtgagggggagggtggtgaggccacgagggagggcggtcgcgccagtggccgggacagcgacggcgtcgctgggaaatctgtgagcgagggagaggtcactggcgggcgcagcaatcatggtgggaaggaggtcggtcatggcatattgtggggtgaagctctgcacgccgggaaggggaccggtgaccacggatgtgtcgaagagagctgcagcagcagacgggagggggacatagccaatgacaatggcatggcagcccgtgtcagtggtgtctacgagcctgatcggcatgggttgggtgttgtcgctgtagggggccatggaaagaatctaggccgcgccatggcagccatggccgctaggaaatag

SEQ ID NO: 107913 - DNA, 829 bp, Zea mays
  unsure (1)..(829): unsure at all n locations
  Clone ID: MRT4577_29913C.1
ttgggtacctcgaggccggccgggttgtagatatcaaaaagttatgcaactttatagttggtcacatttttaaataaaatagtactaataaaatggtatagtatagtgtgctgtgtgactaaagaaatcaaagacttctctaaacctgaaataaaatggtactgattaaggtggtagtctgattggtgaatacccatggaaacccatacctatacaaatccatctataaccatgggtatccactattttgacccgcaatataaaataaactcacccaacccaacccgttaataattaaaactcatcacaacccaccaaaataaaatcatttcttaaacccacctaaaatacccatttacacccacgccatttgcaggtttacggcggagaacgaggtctttgtctttcctagcatctgctacagggttgggccgttgggggttgtgagcatgtacggcaggaaggagagatacataatggacaagcgttggcctgggctttacatgtgctaggaagcacaaatgggccatgagcccatgaccaaagactcgtgattctgtcttacctgattcgatgggtacgaaaatcattcatcgtgttctatcaaaactgcgctccttccaaactcaaacgcgcggtaaactactacaagtgttagcatgctgctcactcgttgcctcgttggttccattccatgcatccaccaccagggcatgttcctgctgacgcttacggccggcgcggacagcctgcacccgcgggaatgcggcgtgggcgaggcctgnnagaaggcgacgtcgaaccagttcgcggtgctcttcgtcgcctt

SEQ ID NO: 107914 - DNA, 271 bp, Zea mays
  Clone ID: MRT4577_29914C.1
ctcacgcgctacgtgcctatcaagagtgcgaatgatacatactgtgatactcaagggctggggctcaattgtacgcacattcagtagagccgtattggagctctatggaacattataaatggcactgtgtccagagagcctaatgtacgcagcttccttacacgaccatgccaaggatggactaagcccatgtgcatcgtaaggcatacctactgtgatcaataccacactaccgatgcagttatgaccgtgcctgtcaagctcgatacta

SEQ ID NO: 107915 - DNA, 1996 bp, Zea mays
  Clone ID: MRT4577_29915C.1
ccacgaaatggaaatggtcacttccaaattgcacgagctggaattatatactcttctgatcttcttcaccgtctctttatagcgtgatatgcgtttctggcttcttgcttacgtgaaggattattagtaaggcgcgtgatggcgctctcagcttccccggctcaggaagaactgctgcagcctgctgggaggccgttgaggaagcagcttgctgcagccgcgaggagcatcaactggagctatgccctcttctggtccatttcaagcactcaacgacctcgggtgctgacgtggacggacgggttctacaatggcgaggtgaagacgcgtaagatctcccactccgtggagctgacagccgaccagctgctcatgcagaggagcgagcagctccgggagctctacgaggccctccggtccggcgagtgcgaccgccgcggcgcgcggccggtgggctcgctgtcgccggaggacctcggggacaccgagtggtactacgtgatctgcatgacctacgccttcctgccgggccaaggcttgcccggcaggagttccgcgagcaacgagcatgtctggctgtgcaacgcgcacctcgccggcagcaaggacttcccccgcgcgctcctggccaagagcgcgtccattcagacaatcgtctgcatcccgctcatgggtggcgtgcttgagcttggtactactgataaggtgccggaggacccggacttggtcagccgagcaaccgtagcattctgggagccgcaatgtccgacatactcgaaagagccgagctccaacccgtcagcatacgaaaccggggaagccgcatacatagtcgtgttggaggacctcgatcacaatgccatggacatggagacggtgactgccgccgccgggagacacggaaccggacaggagctaggagaagtcgagagcccgtcaaatgcaagcctggagcacatcaccaaggggatcgacgagttctacagcctctgcgaggaaatggacgtgcagccgctagaggatgcctggataatggacgggtctaatttcgaagtcccgtcgtcagcgctcccggtggatggctcaagcgcacccgctgatggttctcgcgcgacaagtttcgtggtttggacgaggtcatcgcactcctgctcgggtgaagcggcggtgccggtcatcgaagagccgcagaaattgctgaagaaagcgttggccggcggcggtgcttgggcgaacacgaactgcggtggcgggggcacgacggtaacagcccaggaaaacggcgccaagaaccacgtcatgtcagagcgaaagcgccgggagaagctcaacgagatgttcctcgttctcaagtcgttggttccctccattcacaaggtggacaaagcatccatcctcgccgaaacgatagcctatctaaaggagcttcaacgaagggtacaagaactggaatccaggaggcaaggtggcagtgggtgtgtcagcaagaaagtctgtgtgggctccaactccaagaggaagagcccagagttcgccggtggcgcgaaggagcacccctgggtcctccccatggacggcaccagcaacgtcaccgtcaccgtctcggacacgaacgtgctcctggaggtgcaatgccggtgggagaagctcctgatgacacgggtgttcgacgccatcaagagcctccatttggacgctctctcggttcaggcttcggcaccagatggcttcatgaggctcaagataggagctcagtttgcaggctccggcgccgtcgtgcccggaatgatcagccaatctcttcgtaaagctatagggaagcgatgaaagggcgctacatgtgaagcttaattaatggaagcaaacttgtatttcttgtgcaaaagcttactatatatttctgcaaaacctggtgtgccttgttttgattttcagtcgccaattgtgcccttgtttttatcaagtgatgatctacaaaatatataaggaatctttg

SEQ ID NO: 107916 - DNA, 214 bp, Zea mays
  Clone ID: MRT4577_29916C.1
tttacgtccaggagcttggggcggaaatgctccaatggttaacgggctgcgctcatattatccttaaagcatagtggtgtcacggatcagcagattgcattagtgaaggcgaacccaaggcactagccagaaacaaggtgatataccaaggaatgaaaagcggtccagtcatctgatttggagggccgttccactgaactctccatatagacct

SEQ ID NO: 107917 - DNA, 605 bp, Zea mays
  Clone ID: MRT4577_29917C.1
cctccctctagccgccgccagcccagccctctcctccctcaagccgccgccggcccttccccttgccccgaccgccgccccctgcccctctgcctccgcgcgccgcccggtggaccctccagtcgcgccgggtcgcgcccctgcgcccacgccgccgccgcatcccctgcaccgacccgcgcctccttccgcgccaaggtgcgacctccatcgtggccgccgtgcaggagcgcgtgctgggggaagatcttcgcccgcaacgcccaccgctcccctgcttcgacggagcgcgcgccggcggtgtgttcccctccggcctctcgccagtcaccgcgcgccctcgcccctttggcctctgtgttcgtactgcgctcggcagaaacctcttgctcctgggggcgaacgcgccgccgcctccgacagccccctccagccgcgtcaaatcagcgccctcctctgctgcgccagctgtctcccgccgcaaggacgaagccctgtattcccttatcgctgcgtgcttgcccttctccaactctcctctgcctgcaccgccgcggtccacctcgtcgaggactggtcggacgctgggcgaacgctgggtcgac

SEQ ID NO: 107918 - DNA, 286 bp, Zea mays
  Clone ID: MRT4577_29918C.1
cgcacgagacctgtaagagagtgtcatcgtggcaacataggaacaacatgagagcatcataactaatcaatggtgaagtacctaacagtgagcatatgctgtatttgcattaagcacaatatattgcttagaagaccattttgcatgactgacctgtcttcactccagcaactaaaattttcttttgaaggagctggatgagtacattcgagtctgtgactacagatatggatgagatgttctacttgtcttgcactgcacaacattcccaactgacaaaatgcga

SEQ ID NO: 107919 - DNA, 221 bp, Zea mays
  Clone ID: MRT4577_29919C.1
taccatttctcttctccaccccatagcacctttactctaaaactcttgttgtagcaactctgctccatactttatattgtttcttataaccattcgcaattgccctataataactcaaaacttcattactaactttcttttttttatttttcacagtatcataaaatttactacaacaaattattctgcatctccaaaaactctataaatcttacacccct

SEQ ID NO: 107920 - DNA, 5101 bp, Zea mays
  Clone ID: MRT4577_2991C.1
atgattcaagtttcacaagatcacctattcaccctccctctaggtgctctcatcgtcaacgagcccaaggatgacaagcctaccgacttgggctcgggccacaaacgcaaagatgggaagaagaagaagacaaggcgcatcaaggagatcgtctactacgacgacaacgatgagttcacttcttcccaaaaggacaacggcgacaatgactacgacaaaagaaagatggttaattcgaacttttcttttgactactctcgtattccgcaaagtacaaatgctcatttgctttccatccctctcggcaaacctccacactttgatggggaggactacagattttggagtcacaaaatgtgtagtcacctgttctctctccatccaagtatatgggagattgttgagaatggaatgaaatttgatagctcggatagtcctatattcattaatgaacagattcataagaatgcacaagctactactgtgttgttagcctctttgtgcagggacgagtaccataaggtgagcggcttggacaatgccaagcagatctgggacaccctcaagatctctcatgaggggaatgatgtaaccttgctcaccaagatggagttggtagagggcgagctcgggagatttgcaatgataaggggcgaggagccaacccaaacatacaaccggctcaagaccctcatcaacaaaataaggagctacggaagcacgcgttggacggaccacgacgtcgttcgcctaatgctaaggtcttttactgtacttgatccacatttggtgaacaatatctgtgaaaatcctaggtacaccaagatgtcacccgaagaagttcttgggaaattcgtgagcgggcgaatgatgatcaaggaggcgagatatgtcgacgacgcgttgaacggtccaatccatgagcctcaacccattgctctcaaagcaacgaggagcaaggaggcactacctagcaaggtggcacaagttgaagcggcagggctaaatgatgaagagatggctctcatcatcaagcgcttcaagacggcgctaaagggtcacaaggggcaaccgagcaagaccaagacaaaggggaagcgctcatgcttcaagtgtggtaagattggtcattttatcgctaactgccccgataatgatagtgaccaggaacaggggaacaagagggagaagaagaaggcatataaaaaggctaagggcgaggcacaccttggcaaggaatgggactcgcattgttcgtcatccgactccgacgatgaaagactcgccgccaccgccttcaacaagtcatccctcttccccaacgagcggcatacatgcctcatggcgaaggagaagaaggtatgtaatcgaaacaatgccgcttatgaatcttctagtgatgatgagtctagtgatgaagaaataaattactctagtttgttcaagggactggatagaaataaagtagataagattaatgaattgattgatgccttgaatgaaaaggatagacttttagaaaaacaagaggaccttttatatgaagagcatgacaaatttgtagaggcacaaaaatctcatgctttagaagttaaaagaaatgaaatgctttcttgtgaactatcttcttgccatgagacaatttctagcttaaggagcataaatgatagtttgaatgctaagttagaaatagctagtaaatctaactcttgtgtagaacatgttatgatttgcaataggtgtaaagattttgacactgatgcttgtagtgaacacctagtttcaatttccaaactgaatgatgaattggctagtcttaatgcccaacttaagactagcaagagtgattttgataaactaaaatttgcaagggatgcctacacgattggtaggcacccctcaattaaggatggacttggctttaagagggaagccaagaacttaacgagccataaggcacccatctccatcaaggagaaagggaaggcccctatggcaaaaagtgctaaaaagaaccatgcttttatgtaccattatagaagacagtcctataggagttgtaatgcttatgatgcttttgactctcatgccatgtgtgcttctagttcttcctatatgcatggtagagatatgtataggagatatgttgttcatatgcctaggagaaatgttgttaatattcctaggaaagttgatgaaccttctacaatatatcatgcttgcaatgcttcatttgccatttgtagaaagaataagaaggtttatgcatccgggggttcaagctggattatcgacagcggatgcacaaaccatatgacgggggataagaatggatcctaaggggaagggaattgtgatcaacgacaaggagaaggagtccttcgtcaacgagccaagggatgacaagtcaaatgactcgggctcgggccacaagcgaaaagatgggaagaagaagaagacaagacgcatcaaggagatcgtctactacgacagcgatgagtcctcttcttcccaaaaggacgacgaccacgacaaacaaaagacggttaactcaaacttttcttttgattattcgcgcattccatatagctcaaatgctcatttgctccccattccacttggcaagcctcctcactttgatggagaggactacggattttggagtcacaaaatgcgtactcacctattttctctccatccaagcatttgggagattgtggaaaatggaatgaaatttgatagctcggatagcccttcattcattaatgagcaaatccataagaatgcacaagctaccactgttcttctagcttcattgtgcagggatgaatataacaaagtgagcggcttggataacgccaagcagatctgggacactctcaagatctctcatgaaggaaatgacgttaccttgctcaccaaaacggagttggtggaaggcgagcttggacggttcgcgatgataaggggcgaggagccaactcagacatacaaccggctcaagacccttatcaacaaaataaggagctacggaagcacgcgatggacggaccacgacgtcgtccgactaatgctcaggtcctttaccgttcttgatcctcatttggtgaataatattcgtgagaatcccaggtacaccaaaatgtcgcccgaagaagtcctaggaaaattcgtcagcgggcgaatgatgatcaaggaggcaaggtatgtggacgacgcattgaatggaccgatcaacgagccgcaaccttttgctctcaacgccacaaggagcaaggaggcactacctagcaaggtggcgcaaattgaggcagtcggtcttaatgatgaagaaatggccctcatcatcaagagattcaagacggtgctaaagggtcgcaatggacagccgagcaagactaagaccaaggggaagcgatcatgcttcaaatgcggtaagcttggtcattttattgctaactgtcctgataatgagagtgaccaggaaaaggggaacaaaagggaaaagaagaagcattacaagaaggcaaagggcgaggcgcatctaggcaaggagtgggactcggattgctcctcttccgactccgacaatgaaggactcgccgccaccgccttcaacaaatcggccctcttccccaacgagcgtcacacgtgtctcatggctaaggagaagaaagtaagtactcgaaactctactcatgcttcttctagtggtgatgattctagtgacgatgatgaaatagactattctagtttatttaaaggtctagatagaattacgattggcaaaattaatgaattaattgatgcattgaatgagaaggataaactcttagagaaacaagaggatttattgtatgaagagcatgataaatttttagaagctcaaaaatctcatgctctagaagttaaaagaaatgaaatgcttacttgtgaattatcttcatgccatgagacaatttcaaaattaaagagcattaacgatgagttgaatgctaagatagaaatagctagtaaatcaacaacttgtgtagaaaatgttgttatttgcaatagatgtaaagactttgatattgatgcctgtagtgaacacatagcttctattgcaaagttaaataatgaagtggctagtcttaatgcccaacttaagactagcaaaagtgattttgaaaaactaaaatttgctagggatgcctacacggttggtagacacccctcaattaaggatggacttggcttcaagagggaagccaagaacttaacaagccataaggctcccatttccgccaaggagaaagggaaggcccctatggctactagtgctaaaaggaaccatgcctttttgtatcatgataaaagacaaactagaaatagaagttatgatgcttttgattcatatgtttatgattctcatgccatgtttgctcctagttcttcttatgtgtatgatagaaatattactaggagaaatgttgttcctaaaagaaatgttgcaaatgttcataaaaaggtttatgcatccggaggttcaagctggattatcgacagcggatgcacaaaccatatgacgggggagaagaagatgttcacctcctacgtcaagaataaagattcccaagattcaattatattcggtgatgggaatcaaggcaaggtaaaagggttagatgtgtctgtctttagaagaagtgatggttcactagcttttaagggtgtattagacagcaaactttatttagttgattttgcaaaagaagaggccggtctagatgcatgcttaatagctaagactagcatgggctggctgtggcatcgccgcttagcacatgtggggatgaagaaccttcacaagcttctaaagggagaacacgtgataggtctaactaatgttcaattcgaaaaagatagaccttgtgcagcttgtcaagcagggaaacaggtgggaggctctcatcacaccaaaaatgtgatgacgacatcaagacccttggagatgctacatatggacctcttcggacccgtcgcctatctgagcataggaggaagaaaagtccgaaacccaagggactctcaaacgcttcctcaggagagctcaaaatga

SEQ ID NO: 107921 - DNA, 212 bp, Zea mays
  Clone ID: MRT4577_29920C.1
cgtcacgagactcctagcgacggagagagtgatgttagatcacgcgcgtgttggcgagatacgtcgttcgagagctgcccgcaagtattagatcgcttcagttccttgcggctcccggcttgtgtcgtcggcatccttgtctgctcggccctcttctcgccgcgcgctggctggctcaacagcggcagccagtgcggtgtcgacggggtgag

SEQ ID NO: 107922 - DNA, 1102 bp, Zea mays
  Clone ID: MRT4577_29921C.1
cggccgggacccgccgcgcttgctgtcgttcccgtgcggccgtgtcccccttcctttcctgttttcccctcctcttcctttcccccccacccccactactctctctcgccccaaaaccagatcgccacgacaagggcagagggccccggaggggcgcgtagcaatggcggcaggctaccgggccgaggacgattacgattacctcttcaaggtggtcctgatcggcgactccggcgtcggcaagtccaacttgctctcacgcttcacgcgcaacgagttcagcctcgagtccaagtccaccatcggcgtcgagttcgccacccgctctctccaggtcgacggcaaggtcgtcaaggcccagatttgggacaccgccggccaggaacgataccgtgcaatcactagtgcgtattaccgaggcgctgttggggcgttgcttgtatatgacgtcactcgccactcaacctttgagaacgttgagcgttggctgaaggagctgagagaccacacagaccccaatatagttgttatgctggttggcaacaaatctgatctccgccatcttgtagcagttcaaaccgacgaaggaaaagcattcgcagagagggaatcgttgtacttcatggagacctctgcgcttgagtcgaccaacgttgagaatgcatttgcagaagtcctagctcagatctaccgtattgtggacaagagagccgttgaagcaggtgaagatgcagcatctgggcctggcaggggcgagaagataaacataaaggatgacgtctcggcagtgaagaagggtggctgctgctctagctgagctgccgtgctgtaatttttttttgggagttgtgggatgtagcttatgttatggcattttcagcgactggaaattggtagtggcatttagcagcctctattacctagagaggtaattgtcaaactgaaaaaaaaaactgaaggttagatcagtttagagctctgttactgtattgtgtatccggcaataggcatagtattgttttttgttttttttttttttttgctgtgaatctactctaccggtaacatgttaaaacttaaaaaaaaaaaaaaaaaagcggcc

SEQ ID NO: 107923 - DNA, 1592 bp, Zea mays
  Clone ID: MRT4577_29922C.1
atggcttcgttcaacaatcaagctgaagtagcttcggctacgaagctggtgctcccgataacaggcggttcatgctcagaaccggccaacaagaagcagaagaaggaggctcagagaagggtgcatcatgttggggtgcagggacccttcatcaagtcaaaatggtcccacatcccaatcaccttctcccaggaggaccttcaactcaaggattaccctcataatgatgctatggtcatatcttgtgtcatcaagggatttctggtccacaatgttctggttgatacaggcagtgcagcggatatgatatttgctaaggccttcagacagatgcaagagccagaggacaagattcatgatgctacacaccctctttgtggcttcgaaggaaggcagattgtagcacttgacaagatcacaatgccagtgaccttcggctttgtccacaatacaaggactgaacatgttgtgtttgatattgttgacatggaatacccctacaatgcaataattggccgaggaacactcaatgattttgaagcaatacttcatccaacatatctatgcatgaagataccttcggaacaagggcccattgctattcatggaagtcaagtggctgccagaaaggctgaaggaaactggacagactcaaaagcgatccacaatatagatggagccgaggcttgtgaacagtacaagtacagaagagagaaggctgcttcggctgatcagccgaaacccatgcttctatgtgaagacatagcagagcagaaggtattgctgggatctcaactatctgaagagcaggagaaaactttgataaggtttttatttaacaacaaagatgtttttgcttggtcggccaatgatctctgtggtgtcaacagagatgtcattgaacattcactcaatgtcgacccatccttcaggccaagaaagcaaaggctttggaaaatgtctaatgataaagccgaaggtgctcggaatgaagtaaaaagacttctcagtgctggtgttatcagagagaaggccaatggcaaatggggaatgtgtattgatttcacggatctcaacaaggcctgtccgaaggacggatttccattaccaaggatagactcccttgtagacgcagcagcttcttcagaacttatgtgtctgctggattgctactcaggatatcatcaaatatggatgaagaaggaggataagtcgaagaccagcttcataactcccagtggcacctattgttatcttcggatgcctgaggggctcaagaatgctggaggaagtttcagcagaatgacagtcaaggtccttcattctcagataggcagaaatgtgctaacatacgttgatgatatcatagtaaaaagcacgaagcaagaaaatcatatcactgatctacaagaaacatttgctaatttcaggcaagctggcctgaaattaaatcctgaaaaatgtgtctttggagtaaagaagggtaagttccttggctatctagtttcaacgaaggggattgaagctaacccaaacaagatcgaagctatccttcgaatggagccgccaagcacaaagaagggggctcaacg

SEQ ID NO: 107924 - DNA, 1120 bp, Zea mays
  Clone ID: MRT4577_29923C.1
atgatgaagggacccttcatcaagtcaaaatggtcccacatcccaatcaccttctcccaggaggaccttcagctcaaggattatcctcataatgatgctatggtcatgtcttgtgtcatcaaaggatttttggtccataatgttttggttgatacaggcagtatagccgacatcatattcgctaaggccttcagacagatgcaagagccagaggacaagattcatgatgctacacaccctctttgtggcttcggaggaaggcagatcgtagcacttggcaagatcacaatgccagtgaccttcagatttgtccacaacacaaggactgaacaggttgtgtttgatattgttgacatggaatacccctacaatgcaatcattggtcgtgggacactcaacgctttcgaagcaatacttcatccagcatatctatgcatgaagataccttcggaacaaggacccatttctattcatggcagtcaggaagctgctagaaaggctgaaggaaactggacagattcaaaagcaatccacaacatagatggaaatgaagcttgtgaacagtacaagtacagaagagagaaggctgcttcggctgatcagccgaagcctatgcttctgtgtgaagatatagcagagcagaaggtattgctgggttctcagttatctgaagagcaggagaaaaccttgataaggtttttattcaacaacaaagatgtgtttgcttggtcagctaatgatctttgcggtgtcaatagagatgtcattgagcattcactcaatgtggatccatctttcaggccaagaaaacaaaggcttcagaaaatgtccgatgacaaagctgaaggtgctcgaaatgaagtgaagagacttcttagtgctggtgttatcaaggaagtcaaatacccagagtggctagctaacactgttatggtgaagaaggcaaatgatcttaacaaggcttgtccaaaggatgagttcccattaccaagaatagattctctagtagatgcagcagcttcatcagagcttatgagtttactagattgctacttaggctaccaccaaatctggatgaagaaggaagatgagccgaagaccagcttcataacccctagtg

SEQ ID NO: 107925 - DNA, 119 bp, Zea mays
  Clone ID: MRT4577_29924C.1
gataatactatgggtaggcgcatgtctgcctctgggtactaatcaagcaagtacgagatgtgcactgcatccatggcaagcaaagactcggcggcgaagatgcgcgtcgtgaacatggt

SEQ ID NO: 107926 - DNA, 1194 bp, Zea mays
  Clone ID: MRT4577_29925C.1
atggggataagaagggcggtcctcaaaactgattcccaagttatttctggccttgttgacaaaagttgcaaagcaagatatccgaagcttgaaaaatatttggatacagttcgaagacttgaagcctcctttgaagggttttctgctaagaatattccacgaggagaaaatgaacatgctgatctactggccaagtcagcggcacaggggctgccattaccttcggaagttttatttgaaacaataaaagcacctttggttgaccttctggaaagagtagtgctcaatatatctcctgtttataacgaagattggagaactgagatcatgtcttttctccagggcaatttccttttagatgacgaagcttatcaaaagagaatagcggcaagagcccgtccatatgtaataatagaaggggagttatacaagcatggagtctgttctccattactcaaatgtttatccagaactgaagcaataaccccagaagaagctaaagcgggatcaataagaacaatggcttcggcagaagacgaagctgattattctgtggcaaaagatgctatagaagggatcaagcttcaggttgtagagaatatcaataaatatcaagccgaaacaataaaatggtgtgacagaaaggttcggttaaaaaatattaagccaggacacttggtactttggagagttgccaacccagacacagtaggcaagctacaattgaaatgggaagggcctttcctggtagtatcttcgtcaagacccggttcctacaggctgaaagatatggatggcagcgacattcctagatcttggaatgcggatgagcttcgacgctctacaagagcagtatcccccgaagatgtaaatgtaaaaaatgggcatgcaccatcgagtgcaacgagaaaaagaaaaaaacacggagaagctcgaaagacgtccctaaggggatgcagagcacgacgaagctgcaaaaagccgttcctaagggagcgcagccttcagcttcggcttggtcaacctgtatgtaagtattataagctaaattcaaaattcaaaggaaaagccagatttcaggaacgcagcagcggtgccccgagaagctaccagggcacaaaagtcgccgtgtccagcaataacatcatcgaggtcatcaatctcaccttcgatgtgttcgaaggctcctggtag

SEQ ID NO: 107927 - DNA, 1866 bp, Zea mays
  Clone ID: MRT4577_29926C.1
atggctttgttcaacaaccaagctagagctgcttcggcttcgaagctggtacttccaataacaggcggttcatgctcagagctggtcaacaagaagcagaagaaggaggcacagagaagggtacatcatgttggggtgcaaggacccttcatcaagtctagatggtcccacatcccaattaccttctcccaagaggacgttcagctcaaggattaccctcacaatgatgctatggttatttcttgtgttatcaaaggatttctggttcacaatgttctggttgatacaggcagtgtagcagatattatatttgctaaggtcttcagacggatggaagagccagaggataagattcatgatgctacacaccctctttatggcttcggaggaaggcagattgtagcgctcggcaagatcacgatgccagtgaccttcagatttgtcaacaatacaaggactgaacaagttgtgtttgatattgtcgacatggagtatccctacaatataatcattggtcgtgggacactcaatgcttttgaagcaattcttcttccagcatatctttgcatgaagataccttcggatcaagggcctattgctattcatggaagtcaggaagctgccagaaaggctgaaggaaactggacagaatcaaaagcaatccataatatagatggagctgaagcttatgtcttcgcatggtcagccaacgatctctgtggtgtcaacaaggatgtcattgagcactcgctcaatgttgatccatccttcagacccagaaagcagaggcttcggaaaatgtctgatggcaaagccgaaggtgctcggaacgaagtgaaaagacatcttagtgctggggtcattagagaagtaaagtacccagaatggttagccaaaactgttatggtgaagaaggccaatggtaaatggagaatgtgcattgattatactgatctcaataaggcctgtccgaaggatgagtttctgttaccaagactagattctctagtagatgcagcagcttcgtcagagctcatgagtctattagactgttattcaagctaccatcaaatctggatgaagaaagaaggtgagccaaaaaccagcttcataacccccagtggtacatattgttatcttcagatgcctgaggggctcaagaatgctggaggaagcttcaacagaatgacagtgaaagtccttcattctcagataggcaggaatgtgctaacatatgttgatgatatcatagtaaaaagcacgaagcaagagaatcacattgttgatctgcaggaaacatttgctaactttaggcaagctggcctgaagttgaatccagaaaaatgtgtcttcggagtaaagaagggcaaattccttgcttgtctagtttcaacaaaagggatcgaagctaatcgaaacaaaattgaagccattcttcggatggagctgccaagcacaaagaagggggctcagcagctgataggaagattggcatctttgaatcgatttatatctagatcagcagagagaaatttaccattatttgaagtgctgaagttagacgaagtctttcaatggggatcagctcagcagaaagccttcgaagagctaaagcagtatctaatagatctaacgacgctaactccacgagcgccaggggctcctctactgctgtatgtggcagcttcgcactctgcagtaagtgcggcgtttgtccaggagaagcttgaaggacaaactaaaaagcaacccccagtatactttgtctccgaagttctcagtttatcaaagaaaaactatacagaattggagaagctgctatatgatgtcttaatggcctccaggaagcttcgacaccgaagttag

SEQ ID NO: 107928 - DNA, 247 bp, Zea mays
  unsure (1)..(247): unsure at all n locations
  Clone ID: MRT4577_29927C.1
ttatatttttttttttttttttttttttatttgggttttttttaaatatagggggactgaacaaancctaacaacaacaaacctcacggaaccacttccacaaggaggactctcctattaacacaataccccgcaagtgaaaaccacacttaacggaaccgaacggggaaactcaaaaaactagggcaaaaaccggacgttcttatttgaaacacaactaaaatggagatactgtttgaaatgccct

SEQ ID NO: 107929 - DNA, 2137 bp, Zea mays
  Clone ID: MRT4577_29928C.1
atggcttcgtccaacaaccaagctggagttgcttcggctccgaagctagtactcccgataacaggcggttcatgttcagagccagctaacaagaagcagaagaaggaggcacagagaagggtacagcatgtcggggtgcaaggacccttcatcaagtcaagatggtctcacatcccaattaccttctctcaagaggaccttcagctcaaggattaccctcacaatgatgctatggttattttttgtgttatcaaaagatttctggttcacaatgttctggttgacacaggcagtgcagcggatattatatttgccaaggccttcagacagatgcaagagcccgaagataagatccatgatgctacgcatcccctttgtggcttcggagtaaggcagattgtagcactcggcaagatcacgatgccagtgaccttcggatttatcaacaatacaaggactaaacaagttgtgtttgatattgttgacatggaatacccttacaacacaatcatcggtcgtgggactctcaatgcttttgaagcaattcttcacccagcatatcattgcatgaagataccttcggatcaaggacctattgctattcatggaagtcaagaagctgccagaaaggccgaaggaaactggacagattcaaaagcaatccataatatagatggagctgaagcttgtgagcaatacaagtacagaagggagaaggctgcttcggctgatcagccgaagcccatgtttttatgtgaagatatagcagagcagaaggagaaagccttgacaaagtttctgttcaacaataaagatgtcttcgcatggtcagccaatgatctttgtggtgtgaacagggatgtcattgagcactcgctcaatgttgatccatctttcagacccagaaagcagagacttcggaagatgtctgatgacaaagccgaagttgctcggaacaaagtgaaaagacttcttagtgttggcgtcattagagaagtaaagtacccagaatggttagccaacactgtcatggtgaagaaggccaatggtaaatgtagaatgtgcattgactttactgatctcaataaggcttgtccgaaggaagaatatccattaccaagaatagattctctagtagatgcagcagcttcgtcagagctcatgagtctactagactgttattcaggctaccatcaaatctggatgaagaaagaagatgagccaaaaaccagcttcataacacccagtggtacacatttttatcttcggatgcctgaggggctcaagaacgctggaggaagcttcagcagaatgacagcgaaggcccttcattctcaaataggcagaaacatgctaacatatgttgatgatatcatagtaaaaaacacgaaacaagaaaatcacattgcagatctgcaggagacatttgctaattttaggcaagctggtctgaagctgaatccagaaaaatgtgtcttcggagtaaagaaggggaaattccttggttggttgggtttcaacaaaagggatccgagctaatccaaataaaatcgaagctatccttcggatggagccgccaagcacaaagaaaggggctcaacagctaacaggaagattggcatctttgaatcgatttatatccagatcagcggaaagaaatttaccattctttgaagtgctgaagtcaaccaaagtttttcaatggggatcagcccagcaaaaagccttcgaagagctgaagcagtatctgatagatttaacaaccttaactccaccagcgccaggggctcctgtgctgctgtatgtggcagcttcacactctacagtaagtgcagcgcttgttcaggagaagcttgaaggacaattgaaaaagcaggctccagtatactttgtctctgaagttctcagtttatcaaagaaaaactatacagaattggagaaggtgttgtatgccgtcttaatggcctccaggaagcttcgacattattttcaagcataccatataattgttccttcatcacagcctttgaaggatattatgagaaacagagaagctactggaaggattggaaagtgggctgcggaactcaacgagttcagcattgattatgtgcatagatcttcgattcagtcctag

SEQ ID NO: 107930 - DNA, 577 bp, Zea mays
  Clone ID: MRT4577_29929C.1
aaataatattgttgaatacgaagctttgcttttgggtcttcgaaagttgaaggcaatggggataagtagggcggttctcaaaactgattcccaagttattactggccatgttgacaaaagttgcaaagcaagagatccaaagcttgagaaatatttggatacagttcgaagacttgaagcttccttcgaagggttttctgtcaaaaatatttcacgaggagaaaatgaacgcgctgatctattagccaagtcagcggcacaggggctgccattaccttcggaagtattatttgaaacaataaaagcaccttcggttgaccttcttgaaagagcagtgctcaatatatctcctgtttatagcgaagattggagaactgagatcatgtcttttcttcagggcaatttcatttcagatgacgaagcttatcataagagaatagcggcaatagcccgtccatatgtaataatagaaggggagttatacaagcatggagtctgttctccattactcaaatgtttatccatagctgaaggtatagagttgatgaaagaaaacatacaggcctgtgttggatct

SEQ ID NO: 107931 - DNA, 164 bp, Zea mays
  Clone ID: MRT4577_2992C.1
aatcactggaaggcaacaagcatatttgtttactagcgggagcatttaacttcacatgcgtaatgtataacaaaaagacagccgttcagcttcatacaaacaagaacggtaacacgaggaactcgctgctggtcactaaaaactcgtcaaaattacaaacgagt

SEQ ID NO: 107932 - DNA, 3672 bp, Zea mays
  Clone ID: MRT4577_29930C.1
atggcgcccaagcggaaagcttcgagtttgtccgtcgcagtcattccccccatcgatcccaacagtcagttgcctttcgcaggtaaccatatgtctgttgtctctgaatccgaccttcttcatctcgtttctatcggagttcttcctccgaaggagctctgttcgtggcggatctgccgtggggtcactgttccgacagaagacacccacgaatccgtcatttatgttccttttcttatccgcggacttgctcttcccatttctcctttcttccgcgctctccttgatttctatcacttgaatctgacccatctgaatcccaattccattctgcaagtttctgtttttgttcatttatgcgaagcctttcttggtgttttgcctcactttggcctttggaagtatttgtaccactgtcggcctgggacggccggagggcagcaccagctggtggggggcgtgagcttggagatgcgccgtgggaggaagactgactacctcgacatcccactcaaggacagcatcaaaggatggcgcctggaatggttcatcgtggagaatcatgggaattcccaccccctatggtcagggagacagccggatgttcgcactccgagctggaccaaatcccccacagaccaggaggtggctgaggcaggggctctgctcgctgaagttggattgttgaaagaaaggggtctgactgcagaagatgtgctgctgaaagacagagcatatccggcctatctgtaccgaggcctggctgattcaacccgggtaaccaacagaagaattcctgctgtggacttggtgagccggttcgaaatgatactcagaggcaaggtgtcgaacatcggcgctcctgttgcgtactcagcctggaatctgcctccttccaaggcctttaccagttttgtgtcgaatcctcctgccggtgatagtggtttgggccttagagtgcgaccctctcccgaagaagttaatgctttggttgcctcactggaagaaattcctgacgacgagaggcaggttcattttgaggtgcctttgaatcccagtgatgcggaaataagtgccatgctggatatgttacctgaagattcctctaatgtggcccctgctgaaacaccggtggtagcgcccctcccagaagctagcgaagctttggatattcagaggtctgacagtattcacctgaagcgccctcgccgagccaatcagcccacttctcctgctgaggggcagaaaaagaagaagagacgtcttcatcgagtgtctagcttggatcaggatgtcggtccttctgttcctgctgctgaggaagtgccaatgcctgcctttactgaagctgaaaccaatggtcgtgatctgtccgttgctaaccccaatgggtgtgatcctgctgaagttgaccccaatgggtgtactgtccgtgttgttgataaagatgatgaagaagagtgttgggactgcttcggctccgaagctcgtactcccaataacaggcagttcatgctcaggccagctaacaagaagcagaaggaggaggcacagagaagggatcttcagctcaaggattaccctcacaatgatgttatggttatttcttgtgttatcaaaggatttctggtccacaatgttctggttgacacaggcagtgcagcggatattatatttgctaaggccttcagacagatgcaagagcccgaagataagatccatgacgccacacatcccctttgtggcttcggaggaaggcggattgtagcacttggcaagatcacgatggcagtgaccttcggatttatcaacaacacaaggactgaacaagttgtgtttgatattattgacatggagtacccttacaacgcaatcattggtcgtggtactctcaatgcttttgaagcaattcttcatccagcatacctttgcatgaagataccttcaaatcaagggcctattgctattcatggaactaatgatctctgtggtgtcaacagggatgttattgaacactcgctcaatgttgatccatccttcagacccagaaagcagaggcttcagaagatgtctgatgacaaggccgaaggtgatcggaatgaagtgaaaagactcctcagtgctggagtcatcagagaagtaaaatacccagaatggctagctaacactgttatggtgaagaaagccaatggtaaatggaggatgtgcattgattttactgatctcaacaaggcttgtccgaaggatgaatttccattaccaaggatagattctctggtagacgcagcagcttcgtcagagctcatgagtttactagattgttattcaggctaccatcaaatctggatgaagaaagaagacgagccaaaaaccaatttcatcacccccagtggtacatattgttaccttcggatgcctgaggggctcaagaatgctggaggtagcttcagcagaatgacagcaaaggagacattcgctaattttagacaagctggtctgaagctgaatccagaaaaatgtgtctttggggtaaagaaggggaaattccttggttgtttggtttcaacaaaagggatcgaagctaatccaaataaaatcgaagctatccttcggatggagccgccaagcacaaagaaaggggctcaacggctgacaggaagactagcatctttgaatcgatttatatccagatcggcagagagaaatttaccattctttgaagtactgaagtcagccgaagtttttcaatggggatcagctcagcaaaaagccttcgaagaactgaaacagtatttgatagatttaacaactctaactccaccagcgccaggggctcctctgctgctgtatgtggcagcttcgcactctgcagtaagtgcggcgcttgttcaggagaagcttgaagggcaattgaaaaagcaggctccagtatactttgtttccgaagtactcagtttatcaaagaaaaactatacagaattggagaaggtgctgtatgctgttttaatggcctccaggaagcttcgacattattttcaagcataccatataattgttccttcatcacagcctttgaaggatatcatgagaaatagagaagctactggaaggattggaaagtgggctgtggaactcaatgagttctgcattgattatgtgcatagatcttcgattcagtcccaggcgctagcagatttcattgctgactggacgccaggggctcaggaagaagaagcaagtaaagacgccgaagcttggactgtattctgcgacggttcctggggaaccttcggggcaggtgcagctgccgttttaatcgcaccttccaaagtcagaaaatgctacggagtgaaacttgattttagttgtacaaataatattgccgaatacgaagctttgcttttgggccttcgaaagttgaaggcaatggggataagaagggcggttctcaaaactgattcccaagttatttctggccatgtcgacaaaagttgcaaagcaagagatccgaagcttgagaaatatttggatacagttcgaagacttgaagcttccttcaaagggttttctgtcaagaatattccacgaggagaaaatgagcacgctgattgttgggggccttcgacttccgaaggtcctcaaaaacatgatttgacaatgttttccaagtga

SEQ ID NO: 107933 - DNA, 1461 bp, Zea mays
  Clone ID: MRT4577_29931C.1
atgacgtcggtggttctcagccccctacggaagcaaggagacgtcagcaggatcccagcagcattgacagctgtgcttctacagggcccaggcacttctccgacggccacgttatcgcgtacacagggctctagcacctctctgacggccacgttatcgcgtacacagggctctagcacctctccgacagccacgttggcatgtacacagggctcaggaacttctctgccagacacgttagcgcctagctacacccccattgtacacctggaccctctccttgcatctataaaagatgacgaagcttataataagagaatagaggcaagagcccgaccatatgtgataatagaaggggagttatacaaacgtggagtttgttctccattgctcaaatgtttatccagagctgaaggtatagaattgatgaaggaaatacacgcaggcctgtgtggttctcacatcggatctaggcctttgctaggaaaagtttttcgtcaaggattttattggccgaaggcagcttcggatgcagcagaattagtccaaaaatgcgaaggctgtcaaaaatgtgcaagagatcaaaaacagccttcgtccttgactcaattaatacagcccacttggtcgttgcaaaggtggggcctcgatttgctaggcccacttccaccagcacaaggaaatctaaaatatgttgtggtggcagtggaatatttttctaagtggattgaggcgaaacctttagccacaataacttcggtcactgttcaaaaaaaattttggcaaaatattgtctgtcgctttggagtgccgaaggctattactatggacaacggaacacagtttgatgtcgaagctttcaaagagttttgtgaacaaattggcacgaagattcattttgcatcggttaggcatccggagtcaaatggacttgtcgaaagagctaatggcattataatgacaggaataatgaagttaatcttcaatcagcccaggggaaagtggccagacgaattaatcaaagtggtgtggagccacaacacaacaatgtcaaggtcaacaggctttacaccattcaaattgatgtttggtgacgaagcaataaccccagaagaagctaaagcgggatcaataagaacagtggcttcggcggaggacgaagctgattattctgtggcaaaagatgctatagaagggatcaggcttcaggctatggagaatatcaataaatatcaagccgaaacaataaaatggcgtgacagaaaagttcagttaaaaaatatcaagccaggacacttggtacttcggagagttgccaacccagatacagtaggcaagctacagttaaagtgggaaggaccttttctggtagtatcttcgtcaagacccggttcttgcagattgaaggatatggacggcaacgacattcctagatcttggaatgcggatgagcttcggtga

SEQ ID NO: 107934 - DNA, 477 bp, Zea mays
  unsure (1)..(477): unsure at all n locations
  Clone ID: MRT4577_29932C.1
ggggggggggggtttttttttttttttttttttttttttttttttttttttttttttttttttttttttttttttttttttttttttttttttttttttttttaaaaaaaaaaatcgcccacaaaatttcccccaagggccaacagggggggggggggggttttttcaaacttncaccccatatttaacttaaattttccaccctaacaataacccccacaaagggggcaccaacagtaccaaaaaaaaaacttgcgatccaaaaaaaaaaccctacttatatttccttacaatggccccaaattaaaaaaaaccccaagactttatttttttttcacaatttttgagggggcaaataagcccttttccccggaatcccccttgccaactaaatgtcctttggcataaaggccacacccttaacatggatggcccacaagttggtgtcctaaaacaagcccaacccgtgggtcaacc

SEQ ID NO: 107935 - DNA, 458 bp, Zea mays
  Clone ID: MRT4577_29933C.1
ggccgcttttttttttttttttttgcagcggaaatcttattaccaaattttacatgttacatcaagttttataatgtacatgatcggagtgattacaaaaaatgattcaaaggaataactttaaactgttataaattgtttataagtttgaaatatatgctagctcaagtgatcatcctcaataagaagtatagaagagttacatagacttttaagaaggccgagcccaccggcacttaacaccatcaacagcagcacaaaactataacctgggtaacactaggttagtgtttgttaggcgaccacttgacgagcatccattggcttggcactcgttcagattatctatcttccagttcgttcatcggcatcatcctgcggattagctcgcgcttggtgtcgacttaactctttttcttcgtcttacttgattaattatcgtacctcatgagatgcat

SEQ ID NO: 107936 - DNA, 285 bp, Zea mays
  Clone ID: MRT4577_29934C.1
ggagagcaaccactggcatgcttttaaaatccagggaataattccaggccccacgggcttaatgccaacttgggggaacacaaaggaagggggaactaattcgaacactccccgccttcttatttaaaaaaagaagggggggaacaggaaatcagctccaataatagcccgggacagttttagtttcgacaggataaagcatttaaaacaaggggctcgaacaatatgcgctctcccaaaattacttggccgtaaccagccttacctttggggggttttttgccc

SEQ ID NO: 107937 - DNA, 323 bp, Zea mays
  unsure (1)..(323): unsure at all n locations
  Clone ID: MRT4577_29935C.1
ttcacactaactcttgtgtgccttcatccactncaattattttccaacggcttaataactaccaaagagcgtttaatttaaatacgcgcccgttcccaaaaccatacccantcatatttataaaactttacaaactagttctacttcttttcattttaaccaacctttaactttttttcctcacccttatcaattaaacaatctaattcattccctaatataataaaactttaaccacttccatctcactaatttcctaaatttaaataacaatttcaatctatatctcaattttctaacctatttctcattccatttaatcc

SEQ ID NO: 107938 - DNA, 159 bp, Zea mays
  Clone ID: MRT4577_29936C.1
aagacgactcacgcctccggtactctccaacaacagctacaataagccgccgattttttaaaagacgcggacgtcacacaaaatctgccaccacgaccacactcctgaaaatatcccaagcagttcttatttttcttcatgcaacatacctcctaccat

SEQ ID NO: 107939 - DNA, 657 bp, Zea mays
  Clone ID: MRT4577_29937C.1
accccgaaatgcgctgccgcccagcacggctgtgcctccgagcacgttatccctcatgctccatcactaatgactgacttttaacggaatgatgagggacagaaaatgtttacatcatcaaactgattaaccaagcatgggaggttgcataccgagctcggaggatatggagagcgtgtgtaacactgtatatgtggatgacctcactgccaaagagcgctaccttctgtgtgacgcgtacaagaatgtgatcgaggctatgcgcgctacatgcatcataggagatgccattcgaacaaaaggaggagtaccctatgaacaaagagcactgtgaatgttatccctacaatatcatagtcgaggatcgcaggcatgatgctgattcagtatactgtgatggtatccttgaactgcaccgacttccacctacgtgcctatttctactgctggtgacacatgtggcgttccactctcaagaggaagggcagagtatcacgagtatctggcgcaatttacgactcttgctcagaggcaggaatctgctgtgagcccatggtggtctataaggatgatcagcacattgctgtagcctgactgtcacctacccatctcgacaggctgtgacttgcacctaaatatacagtgatctattgtgag

SEQ ID NO: 107940 - DNA, 342 bp, Zea mays
  Clone ID: MRT4577_29938C.1
ggccgtcgaatagttctttccttctgctttggaaaaaggaacgatccgcagcagagaacatcgacttaaacaagcaaccggaccgagatgtttccttgctgccttgcccacttttgtcggtcaaaaaaactaaaaacgaaaaacaaaatgtataattttctcaacaaatctggaaaaacataaaaaaatgtactagcttttttctgcgcgccaacttgtaccggttacaaacacgacacgcgcagggaccagacccgcacctggccgttgaagttcgggctggacacccttcacttcttgttggcgccgccgccgtttacaccgcctgcccgggaccgtttt

SEQ ID NO: 107941 - DNA, 593 bp, Zea mays
  unsure (1)..(593): unsure at all n locations
  Clone ID: MRT4577_29939C.1
gcacacgcttcgaccccggcggccgcttgcggcgcgtcgccacctacctcgcccttcgttccgctgctcaggtccccgctccccagtccagcacagggaggggggcaatggaaggaccatctgattctgacggccaagtgatcccgtccaccgcaggagaccctcacctcaacagctcggccgcgcccacggacgccgccggcagcggctcgcagcacgtggcgacgctccggaagctgctgttccggaggatgctggtcggggtgaacgacggccgctacttcctggggctgttccactgcgtcgacaagcaggggaacataatcctgcaggacgcggtggagtaccgcagcgcgcgccgctcctccccgtcgggcccaagggaagagcggngcctcggnntcatcctgatcccggcgncctgccgctcctcctgccatgtcgactgcttcatcgaagagcagatggccctgctgtccctgtgcaagtgaaggatgcttctgaattttctttcttcttctggtttctcaagctgtgtaacttggatgaatctgtgcttggagagtggagacctttctgtgactgttatttat

SEQ ID NO: 107942 - DNA, 283 bp, Zea mays
  Clone ID: MRT4577_2993C.1
aggttgtgggtttgggggataaagggcagggatatggcacacacacaaccaaacaaaccatatgcaaggaaccaaaccaggggcagggggctcccttggatggtcgaggcccaaccagctcccggaaagggagtcccccagccaagcgacagaagaaccccaaattgagcgataaagcgcggaccccctagacgggcgagccgcacgcagggccagacggccatcaccgcccgccatcaagcgaaaccatcccgggagcgaaaaaaggagtccccaaacgcaa

SEQ ID NO: 107943 - DNA, 1232 bp, Zea mays
  Clone ID: MRT4577_29940C.1
ggtaccctcgggtcctgcctcagccccggatcccgaaggatcttctcgcgcccgagcaggaccaccggatctgttgccgaccgtcgacttccacaaatcgtccccaagccaagccaccatcagaagttgctcctgccaagaagggtcatgaccacattcgataggcttactgtgttgtattcatgacctgctacacctgtcgccaggctcctgtctccatgggtctcctctcaaacagttcaaccctcagatccgttccttgtctggattaggaaggagagcctcaaggtgggggatcacatctactcttggaaggcagcgtgagtctacgcgcatcacggtgaggttgtggatgctaaagttattcatctggactataataatatccgcatatttttgtcacttaaagatgtaaaggtgatggtggagacaacacttggcaaagaagagttgaaagacgcagtttttatgtgcactaatagggttagctaggatctccatgatgtgcatttgatgggggactaatttatcaggttgctagcaggtttggaacagcatacagtaagttaaatgggtttgttcaattgacagaacaaaggcaattatctcacattctactacgtggaacaagaaatagcctttctagaggagcggtagcaggaactgtgaatcctggtggtggttatttttgattgctggcatctgactgtttaggaagcagaaaatgagagaagtcataccactctcatgtccagaaggttcggtccaacttagtatggaacatactatatttttcttcctataaatgtcatattctcctcgcgaaaaatgtgttattttggcaaacacaatagtatgttttttgtcaacttgtaatggcttttcaattaaatatctttacaggcaaggtttcacaagccgagggaatgaaggttgacagatccacaaggttctcatatgaagaactttctggtgctataaacaactttagtatggaccataaaattaggcatggagattttgggtctgtttagggagtgtctgaatgcactagagttaatagttagtggctaattctactgagcttagaggcgaggtcagctcaaccttttctcactgtgtaacatggataagcaatgtagttggtgcatatgcactcgaaagttcaataatcaactaatgtctatgaccccgtaaataaactaaataaaaggaagtaatccatctgcgtt

SEQ ID NO: 107944 - DNA, 655 bp, Zea mays
  unsure (1)..(655): unsure at all n locations
  Clone ID: MRT4577_29941C.1
tcttgngaagcagcgtgcgtctacgtgggttcaggttgtggatgctaaagttattcatctggactataataatatccgcatatttttgtcacttaaagatgtaaaggtaatggatcatttccttttataaagatttttgagcatgtcaagcctccctattttcctgtgtgggcacatgttactttgccacttgcatcaccttttggtctgtagtttcatccaagtatatcagagactgcacactacgctttagacagctttccacatgtgatgctgatgtgcaggtgatggtggagacaacacttggcaaagaagagttgaaagacgcagtttttatgtgcactaatagggttagctaggatctccatgatgtgcatttgatgggggactaatttatcaggttgctagcaggtttggaacagcatacagtaagttaaatggtttgttcaattgacagaaacaaaggcaattatctcacattctactacgtggaacaagaaatagcctttctagaggagcggtagcaggaactgtgatatcctgtgttgtttattttgattgctggcatctgactgtttaggaagcagaaaatgagagagtcataccactctcatgtccagaaggttcggtccaacttagtatggaacatactata

SEQ ID NO: 107945 - DNA, 262 bp, Zea mays
  Clone ID: MRT4577_29942C.1
gggggggaacaaaaaccttgctcatttttttttgggttggtttaatagggggggcaaacaaggggaacaccgggggtcccaccccctaatccaaggggggaacggcccctaacccggggcccgaagcgaccggtacccccatccttttgatggataagataccccggccgaagccgggaggggcccacacattagtcccttcagccgccgccgccgccgccgtaaccgccaccaccacccttgggccgaccggggtagccgc

SEQ ID NO: 107946 - DNA, 778 bp, Zea mays
  Clone ID: MRT4577_29943C.1
ctcgaggccggccgggaacccttcccgcctgtctctcctcctccagagctcttcgccaccggccaccgccaccctcgatcacgccgtccgtcgaggtaaagatagtctccacgcccctttccctccgccctaatcctccgtacctctccgccgcgtcgtccgtcgaggtaaggccacatggagaggcccatcgtgctcaacgatgcgctcaagtccatgtacaacgctgataagatcggcaagaggcaggacatgatcagggcgtcgtccaaggtcatcatcaagttcctgacggctgtgcagcgccacggtctacattggagaggtcgagcacgttgatgaccaccgatcgggcaagatcgcggtcgaactcaacgctaggctgaacaagtgcggcgtcatcagccctcgctttgatatcatacttgaaatacattgatgcatggactgcaacgctgctcccgaccagtgcatgtcggatacatctccctcactacttcggcaggcatcatggaccacgaggatgtccgccggaagaacgcaagaggcaaggttctaggtgtcttctattgaagaagctgagaatctttgttatgacctgactgcctgtcttactctctcagactagagtacctggtattctactttaatatgtctctctcagactagagcgccttcttttacttgaatattggtgactgcattgctctttcactataaaatacgggactgcattgatcgcacaaaaatacattgaaagcgtgcctcgagctcagct

SEQ ID NO: 107947 - DNA, 736 bp, Zea mays
  unsure (1)..(736): unsure at all n locations
  Clone ID: MRT4577_29944C.1
tcgtctgtccctccatctccgtctctcgccccctgctcctcctcgccacccaacgcccacttgtcttcccgtagagctagcagttctcgcgcctcggccatggaggacggccggagtgacgccaaggaggccagcatggtcgagctggccgcgtccttggagaaggtccgccagatcgagggcggcggcgacggcgacaatgtcgatggcaacaagaagctttggggactcctccggctgttcatggcctgcatggtctccggcgggatccagtacggctgggcgctgcagctgtccctcctctcgccctactcccagacacttgggattccccaccagtacgtttccctgacgtggatctgcggtcccatcgctggatttgtggtgcaacccatcgtcggctactacagcgaccggtgcacggccaggatgggccggaggcggcccttcatcctcgtcggatgcatcataatctgcgtctcggtgctgctcatcggcttctctgcggacatcggacgcgcgctcggggacaccaaggagcactgcagcgtgagcacgggccctcgatgggccgccgccgccacctacattgttggcttctggttcctcgacttcgccaacaacaccgtccaggggccggctcgtgccatgatggccgatcttttcgncggggaccatggncccaacgtcgggcaggcagtcttctgcctgtggatggccattggcaacgtcctcg

SEQ ID NO: 107948 - DNA, 107 bp, Zea mays
  Clone ID: MRT4577_29945C.1
agtgcaatctcaacattcaggggagaaagtgctggaagcgccaattaacaaacaaactcatgaaacgtatgttcatgtgccataggcatgttacatgaacctcagtt

SEQ ID NO: 107949 - DNA, 857 bp, Zea mays
  Clone ID: MRT4577_29946C.1
cgtcaatcctcgaacgaaaaatcgacggcaattaaggcgcgatgggtcactcttacggaaagcgagcgggcactcgatatgccttcagcagggactttcgccagaagggcatgatcgccctgaacacctacctgaaggtgtaccacgtcggtgatatcgtcgacatcaaggtcaacggtgccgtccagaagggcatgcccttcaaggtctaccacggcaagactggtgtcatctacaacgtcaccaagagctctgtcggcgtcattgtctacaagaaggtcaagcaccgctacatcgagaagcgcatcaacgtccgaatcgagcacatccagccctcccgatcccgtgaggacttcatcaagcgagtcaaggccaacgccgaggccaagaagcaggccagagccgatggtgtgactgttcaggtcaagcgacagcccgctcttccccgggaagcccacacggtctccctgaccgacaaccctcctgagactgtcactcctctgccatacgaaactacaatctaagggaagggttggcgtggtgctcgcttcggtttttcttatggtgttgcgttcggatgggaaagaactcagcatgtgaccaaggtctgcatttttttctatttgatgttcataggaaatgagaaaatatgacatcgacaaaagtgcatttttgctcagtggccactcctggttagaggagtagagtatcctcatagtttctacgacttgtgcggtgtctcccatatataatacctaggtgtctgattttcggatacgttgagcgctgaagctaaaaacaaacccttggcgaaatatactggacgttttccatgacaaacgttgaatttccttgat

SEQ ID NO: 107950 - DNA, 458 bp, Zea mays
  Clone ID: MRT4577_29947C.1
cacaagacaaatagaatactttattgaataaattccaattcttgcaaaatgaatagatccaaacaatccttagcataattgatctataccttaatcacgattattacaatgaaatccaattcaaaaagatccaaacatggccaatagaaaaaaatctctatcgatctctacttatatggaacaactcccatgttagggccaaatatacttgattgcatgaaaaatgctcatagaaaattaaatatcttaatgtagggcttgtttgggagcaaagaaagtggaggggattgaggaaaagaaatcctcttcctattcaattttgaatagcaagaggatttcctccgtctaaatctccttgctctcaaacaaacccatagggtggccaactggccatgaacattatgctgtttgcaaacgatggcgcagtgctcaaggttgcgactaaggaggtgggcccc

SEQ ID NO: 107951 - DNA, 307 bp, Zea mays
  Clone ID: MRT4577_29948C.1
gccttacctgctggatggcctgctgtggaggaaggcatggagccacgtggtggagactgtccttctttatgcaaccaaggtatcttgacaagatcagtacagcacactaggaccacacgatgggttttaacatcatcatgatttgattgccggacccctagatgaccataggtgcatacgctgacattgatggggctataatcatatggtaactgattaagcaaaaagacctaactttgggctatgatgccataaagggggtgtacctatacatgctctatggcgggatcatgtatccctggaaggt

SEQ ID NO: 107952 - DNA, 282 bp, Zea mays
  Clone ID: MRT4577_29949C.1
tcctctaaagcgtacacccttcgtcctttttttttttttttgatgtttggtaatatatgaaatgattgttgaatgggtgtatttatagatccacactagcacaaataaaaatgatatacaatcataaccataggctgtcctacacacttgcctctcaacgaaccgttttatcccacagtcttaatacatgtgccacgccgcaagaggcaacaccgaaaagaaagacacgcgctaggtccccatgaaattgggatgcttccaacccatttaccggacgcgtgg

SEQ ID NO: 107953 - DNA, 330 bp, Zea mays
  unsure (1)..(330): unsure at all n locations
  Clone ID: MRT4577_2994C.1
ctnttttttttttttttttttttttttttttttttttttggtttttttttttttgagggccccgcaaaattttaaaaaggggcccattctgccagggaaaaggggcctttacagggatgcatatggcatgcacccattgaaaaagtgaacaccaacttgctttaacaattttaaccccacatgcgcccgagctgacatttaccaaggggtccttgtgatgtaagcacaacngcaaatttgacaaatgccccaaatgaaacaaaaaggtctacgggcttctaatattgggggggatacaagggccttgaaccattattttatcgctttgaa

SEQ ID NO: 107954 - DNA, 145 bp, Zea mays
  Clone ID: MRT4577_29950C.1
ttggtttttttttttttttctaggacattaaggctttgatctgcacaacatatgcccccctatgacttgagaagcggtggacctggggcgaatatttctctctcgcgtggctttctttgttttatactcgaacagcacaccaggc

SEQ ID NO: 107955 - DNA, 774 bp, Zea mays
  unsure (1)..(774): unsure at all n locations
  Clone ID: MRT4577_29951C.1
attccagagcgcaggagggccagccgcaaccgggacaaaagcggaaacaagccaacccaagcctcgattcctcctccatcgccgcggcagaagctcgaggtccagaagggagcgcgagaagcttgcgtgaaggactcagccatggcgagcgcggatctgctgcggagggaggaggagttctacgagtccctgttcgattccgccaaaggcgatgccgctgccgccaagacgcgtgggcagatgattgagaggaagattgaagccttggaggacatggcaaccaaggttagtaaccggaggtctcgcagatggttgaatgatcgcttgctgattgagctcgtccctcgtcttcgtgttgaagaaatcaaaggcctctttgcccctccgccatttggtgaggaagcaccactgtcagcattttgcaggacaagtgttggtgagtgggatgccttcaggagcattgacatggacgttgaggcaagatttatgcaacggatgaaacaatcctcagctaagcagaagaatcttgtgaatgaagatgagtcaattgtgctgaatgcttggcgccgtatagattgccaaacaagagaagctatgaagagaaacttcctacctgaactgcttgaaatatatgaggaacggatcagggccttcattgaagacactaccgataaagatgtgcttgtgttgaatgtccaggacccnatttcagaggttgctatttacatgggtgtgtgcgagttctacaacgtaacgtctacgacaacgggtact

SEQ ID NO: 107956 - DNA, 970 bp, Zea mays
  Clone ID: MRT4577_29952C.1
tctctgctggactcgcgtccgcccccgccgccgcctttcgtcccagcctctaaaccattctccattcctctcctcagtttagcacaatggcactggctaataagcttggtggtctgctcaagaaagccacaagatcaaatctgtctgtctaccaagcaatcagatgcatgtcatccaagctctttgttggagggatttcttatcaaactgatgatcacagtctcagggacgagtttgccaaatatgggcaagtcattgaagctaggattatcattgaccgtgagtctgggaggtctagaggttttggctttgtaacttacacgtcttctgaggaggcttcagctgccattactgccttggatggaaagactctcgatggacggagcatacgggttaatcatgctaacgagaagacaggtggctttcgtggcggcggtggctatggtggcggcggctatggtggtggtggaggctatggtggtggtggtggaggcggtggagacggtggcggccactatggtggtggtggtggcagcggtggatacggtggcggcgactatggtggcaactttactgctggaggtagcgacagctttgccaacagtaactttggttctgacagtagttttggtggaaacggtgctggtggctttgatgcaaccggcggttccacaggcgatgatgggttctctggcacacctgatgataactttggtggtaacaagaatgaagaaaccatggatgatatcttcaaggacgatgagccggacagctacgccgacaagaggagctagtttgtgccttctccaaagagtgctcatcaatacgattccagaacgatatgtattggctagtgtttgctgttaacatcatagcggcctgtatgttcaaataatggagcgagtaattctgatgagtttgagttgtcgggggctgtggaactttcaaacatggcgtgcatccacgttat

SEQ ID NO: 107957 - DNA, 1075 bp, Zea mays
  Clone ID: MRT4577_29953C.1
cactcctatgggcgattgggtccctcgaggccggccgggactcgcgtccgcccccgccgtcgcctttcgtcccagcccctaaaccattctccattcctctcctcagtttagcacaatggcactggctaataagcttggtggtctgctcaagaaagccacaagttcaaatccgtctgtctaccaagcaatcagatgcatgtcatccaagctctttgttggagggatttcttatcaaactgatgatcacagtctcagggacgagtttgccaaatatgggcaagtcattgaagctaggattatcattgaccgtgagtctgggaggtctagaggttttggctttgtaacttacacgtcttctgaggaggcttcagctgccattactgccttggatggaaagactctcgatggacggagcatacgggttaatcatgctaacgagaagacaggtggctttcgtggcggcggtggctatggtggcggcggctatggtggtggtggaggctatggtggtggtggcggccactatggtggtggtggtggcagcggtggatacggtggcggcgactatggtggcaactacagcaacaggggtggtggtggtgattatggagttgctggtggaggtggaggcacctttactgctggaggtagcgacagctttgccaacagtaactttggttctgacagtagttttggtggaaacggtgctggtggctttgatgcaaccggcggttccacaggcgatgatgggttctctggcacacctgatgataactttggtggtaacaagaatgaagaaaccatggatgatatcttcaaggacgatgagccggacagctacgccgacaagaggagctagtttgtgccctctccaaagagtgctcatcaatacgattccagaacgatatgtattggctagtgtttgctgttaacatcatagcggcctgtatgttcaaataatggagcgagtatttctgatgagtttgagttgtcgggggctgtggaactttcaaacatggcgatacgttataatgtcgttttgtgaaaaaaaaaaaaaaaaaaggcccctagggcc

SEQ ID NO: 107958 - DNA, 1239 bp, Zea mays
  Clone ID: MRT4577_29954C.1
cattggctccctcgggccggggcgggactcgcgtccgcccccgccgccgcctttcgtcccagcccctaaaccattctccattcctctcctcagtttagcacaatggcactggctaataagcttggtggtctgctcaagaaagccacaagttcaaatccgtctgtctaccaagcaatcagatgcatgtcatccaagctctttgttggagggatttcttatcaaactgatgatcacagtctcagggacgagtttgccaaatatgggcaagtcattgaagctaggattatcattgaccgtgagtctgggaggtctagaggttttggctttgtaacttacacgtcttctgaggaggcttcagctgccattactgccttggatggaaagactctcgatggacggagcatacgggttaatcatgctaacgagaagaccggtggctttcgtggcggcggtggctatggtggcggcggctatggtggtggtggaggctatggtggtgctggtggaggcggtggatacggtggcggccactatggtggtggtggtggcagcggtggatacggtggcggcgactatggtggcaactacagcaacaggggtggtggtggtgattatggagttgctggtggaggtggaggcaactttactgctggaggtagcgacagctttgccaacagtaactttggttctgacagtagttttggtggaaacggtgctggtggctttgatgcaaccggcggttccacaggcgatgatgggttctctggcacacctgatgataactttggtggtaacaagaatgaagaaaccatggatgatatcttcaaggacgatgagccggacagctacgccgacaagaggagctagtttgtgccttctccaaagagtgctcatcaatacgattccagaacgatatgtattggctagtgtttgctgttaacatcatagcggcctgtatgttcaaataatggagcgagtaattctgatgagtttgagttgtcgggggctgtggaactttcaaacatggcgtgcatccacgttataatgtcgttttgctagatgctatgctttcatcgtggcttggaaatcggggtcttgtcaagcttcagcttagacggatctgtaaatggtactgaaccctacattttatgttttctgtggatgctctgcgtatgtgacaaaaaagcaataaaaatgaagtgtgagtttaattccaaaaaaaaaaaaaaaaaagcggcc

SEQ ID NO: 107959 - DNA, 223 bp, Zea mays
  Clone ID: MRT4577_29955C.1
agcactaacgcgccctttattcttatgggttaataagccacacattttctaaaaaacttttggggatttattcagcaaccgccaaaacaattcccaaataacctaccgactttttttgtcccccggaaattggtcatatccttgtaatccggactcgcccggggatccgcttttatagggtgtttagtctgcttcacctattggtcaagaaataggctctccc

SEQ ID NO: 107960 - DNA, 477 bp, Zea mays
  Clone ID: MRT4577_29956C.1
tcggtcaaacttgcccgatcactatctttgaacaaattagtccaatcaggtagtccatacagtgcgaatggaacgatacttaactcatcccaaacctcgagggctacagcattggtcgagtgctatgcttcatagagctctcaacacagtcctatgctgtgtgcatgaccgtaaccgacctacaccagactcaagcacctgctattctaaaaaacgtgaatgcgagtacgcaacgaaagctcattaactgcagactggaagcaagaaaggatcctgaaccaaagagttggaggatacttgataaccttctctacgatctagccactgcatggaaagttgatttgccaatgtaaccacaactaccagctctcgaatctgcagcgctgtggctaatatgttgcgcaactggaatggcacgaaccatgcaccaagagcaaccaggcttgcaatatactatatttttgccaaagaagaaat

SEQ ID NO: 107961 - DNA, 158 bp, Zea mays
  Clone ID: MRT4577_29957C.1
ccaagctgatggaaaccacaatacacactttcatatttccagtattcacatattatgccgaaaggttacaactggttttacgatcacgcctaaaaactatcatacttatcctatcaattaaccattatacatccctaaaaaacaaaaaacctccatat

SEQ ID NO: 107962 - DNA, 342 bp, Zea mays
  Clone ID: MRT4577_29958C.1
tttcctcttttttttttttttttttttttttaaacagttgatttcataatagcatatgttattcacgacatttcccagatacggcaatgtaagatatcatattaagggcttggtcggccaggtgcggatcgaagagacttgggggagattaaaccccccctttttgaatacaaggaaaattaatgaccttgaattcccttggatacagacccaacccaacaagccctaataggggtgctgccttatgtaattacactagggagcttggctccctattctgcaactgtgctttgagcctcaggcccccccatggcgaaagagacatccttaggcgctagcacc

SEQ ID NO: 107963 - DNA, 463 bp, Zea mays
  Clone ID: MRT4577_29959C.1
gcgattatcaagatgattagcattcctgttcctgcctatcagctgcagtagtggtgctcgcctcagcacaagtcgtactggaggagacgatgcccgtcaggcagaagcacggtgcaccaagctctttaccggctcctacgtcttctcggggtgcctaccacatactacctgctgatgtgctacacagtcgacgcacgtcgctgatgccgtatgtcggagccagggtacccgtctctggagatcttcgacgacgagatctgggtcgcgttctcatagcatgatcagacgccccgtgcgactctgacacatacgccgcgctagcttccattatatactcgacctcaggttcttacagcggcttgcatgcgtggatatcattcaatgtacagaacacctgttgtcctactcgctgatctacacgctggtctacgacctgttcctgatggcgctcaactaccagccc

SEQ ID NO: 107964 - DNA, 125 bp, Zea mays
  Clone ID: MRT4577_2995C.1
ctgcaggtaccggccctgtaattcttggttttacccacccgtaataacacacctccgctgggagggaggggagtgggccatttgaaagacgcgagcgttattccatggtggaggcaggggagaag

SEQ ID NO: 107965 - DNA, 163 bp, Zea mays
  Clone ID: MRT4577_29960C.1
aaaaagggaaaagctggcctaccgggctatttttatttaatggtcattaaataagggtaaataattatgatttggaccgcccttaacgggggggtaaatgttcccttacccggttggaaaacaaagggccagacttgaagtttgccccaagattccacaggct

SEQ ID NO: 107966 - DNA, 493 bp, Zea mays
  unsure (1)..(493): unsure at all n locations
  Clone ID: MRT4577_29961C.1
aaaaatnnnnnnnnnnnnnnnnnnnnnnnnnnnnnnnnnnnnnnnnnnnnnnnnnnnnnnnnnnnnnnnnnnnnnnnnnnnnnnnnnnnnnnnnnnnnnnnnnnnnnnnnnnnnnnnnnnngnnnnnnnngnnnnngngngnnnnnnngggnnnnnnnaangnnnnttgtgttttaaggnnngcatcgcggttagggacacttcngtcagactgncncgangacggccgccatgtgnaggttttaattttttacaacattttttttttttttatgggggagaaaaaacacacctgggaccttttaaaaaattccaattaatttttttaaaaattaccaacctttaaaccgggtccaaaatttttacggatacaatccaatttataaaatggttttaaaaaaattggtgccctattttttaaaggattttttaaaatgcatgtttatgtattactttccagccaaaagggaaaaaaaggggaaaagaaaacccc

SEQ ID NO: 107967 - DNA, 169 bp, Zea mays
  Clone ID: MRT4577_29962C.1
gtctcgttcaacgtctgcgcgcatggtgtgctcctgtaaataaacgtctgagtctgacgaactgacaatagattattgaccgcagccaaatctattgtgtctctggccaaataaatatttaatcacaaagaattctataactcacaaagtctaaagctgttttgttacg

SEQ ID NO: 107968 - DNA, 343 bp, Zea mays
  unsure (1)..(343): unsure at all n locations
  Clone ID: MRT4577_29963C.1
ttttcggcacgagggttctcaccatggaccagcaaaaccaagtaatcgaggcgccgctcctgcaacaacaacgagaagatggcacgtccgtgcaaggcggcggcgaggcggacagccacggtcaccgacgcgggagcaacaagctcacgtgccgtgcgttcgttttcctcatctacttcgagggcgccggcggggcgtacggggcggagctcgcggtgaaggggggggggttgttcttccccctcctgggcttgctggcgttcgcgttagcggggggaggttcagtgatgcgtgtgtngagagtgttttgtggttgtggcccttcaggggcatttgtgggcct

SEQ ID NO: 107969 - DNA, 742 bp, Zea mays
  Clone ID: MRT4577_29964C.1
ccggccgggacgcgcattgtggttcctcacttcggcgccgccacccactacaggcaaggaagaggaggagggcaggatgtcgcaccgaaagctctagaacgcgaggcacggatccctcggattccttcccaggaagaggtcctcccgccaccgtggcaaggagaaggcgtttcccagggcatgaccccaagagagccttgccatctcactgccttccttggttacaaggctggcatgactcgcattgtccgtgagggtgagaagccagaatccaaactccataagaaggaaacttgtgaggctgtataccatcattgaaagccctcctcttgtcattgcggggctcggggaatatgtggagactcgctcgggggctccgcacactcaactctgattggtgccaagatcttaacgaacaagtgaggagaaggttctacaagaactggagcaagagcaagaagaaggctgtcagagagtatgctctcaaatatgaaaatgatgctggcaagaaagaaagtcagctgcagcttgggaagatgaagaagaatggttctgctatccgtgccattggtcgtacccagattaggaagatgaatggtttgaaggagaagaaggctcacctgatggagattcggtcaatgtgaggaccattgctgacaaggtgcactacggctgaagactttgtgagaaagaggtgcctgtatgatgctgctctccagaaggaggagatgattgacatcat

SEQ ID NO: 107970 - DNA, 459 bp, Zea mays
  Clone ID: MRT4577_29965C.1
ccatcactggagcccatgccacggccaagccagagcattcggctaaatagaatgacgtgatgtaaaacttgtaacatatccaacatggtcatgcatcaagcagatatcatgacctgaggagcacgattagggtgccttggctatatacgtgaccatgtgattctgatagaggcagcaactctgtgctgagcacattgaggcatttccatactgcacgtgaagcaataggttgatgccctgggataatttattgaattaggctagttaggaaaccccatttttacaagacattcctattttttcaagataatatgaggtattttcccttaaaaatagaaatctctttaaaaaagcctttgccaaactaatcatgtaattgaagggtatcatggactccaattcactgggcatcaaaccagccctcaaactcgtgctactctttatgcacttactactact

SEQ ID NO: 107971 - DNA, 341 bp, Zea mays
  Clone ID: MRT4577_29966C.1
cgctgatctacgcgtgagcggcccggggcgcgggcatactggacgagtacacggcgtttaccggcccctttaccagcatctcctaccaccgcctcatgaagctccacgcaagcagcagcaggcacacctacaactgcgacggtcacacttgcaaatacctaggggaagacggcttcacatactgtgttgttgctgctgaagcggtggggcaacaaagctctattgcttgcatggatagggctaaggaggatttcacataaaggtgtgggggagggcaagatgttcctggtgtacctaacagcctcaatcgagagtggggatcaacaacttacagagacaca

SEQ ID NO: 107972 - DNA, 636 bp, Zea mays
  Clone ID: MRT4577_29967C.1
ctgaatgaccgggcggtccgacctacatatcctcctgcccacccttataggtcgttgtgtcacctggctttgggggcactacaaacttcagcatttgataggctagctccaccaatgcaataccgattgggaaatccacaattcggtcctcaggcacaagatcaagaggcatgctagaattcttggccataaaggttaacaaatctggcaggtggcataaggagagaacacccacatttgtagcacccgagttagaatcaccagctacaacgagttctaaaaaattagatagaactacggctggcgacatcatcaaggtaggggcaacaaatgtcatgatcaataaagaagaaaatgaagaaccgatggtttttggaacattgaccaagacacaattagatgagggtgtcgctgtagccattaacgataaggccaccaacctaaaaagacatccgattcgaagtattccatgtctagatggttccattcgggtttgtcttattctcaaaaacacaaactttagcgcttgagagaaaaagaaaagaggggaaaggatgatgaataactgtaaaatgaaacacatcctatttacccaaaggctttgtttggatgttgatattggaagggaaggaattg

SEQ ID NO: 107973 - DNA, 420 bp, Zea mays
  Clone ID: MRT4577_29968C.1
ggtttggggtttttttttttttttttttttttttttttgtttttttttttttttttttttttgttttttttgtttatccggtttttcgggggttcccgggggaccggggcctgggggcttctgggttgcccgtgccggccttttttgggggggggggggggtttcccggtccaaggggggggcggaaaaaccccctggagggacagaataaaaagaggaaccggggggtcccgggggaacgggggttcctgggcaaaagggggaaaaccgaaggaggatagggcttaagggtgtttgggagataaaggtcatcgggcaaaactggaaattccggtccaccgggggtaacgggcacccccgttgtaaaaaaaaaacacggaggaacaaagggacttaaaagaacaaaggaggttgaaaagg

SEQ ID NO: 107974 - DNA, 298 bp, Zea mays
  Clone ID: MRT4577_29969C.1
ttgtctgcaaggacgaacggattttttttttttgggggtagtttccacaagtagtctaccggtacaaacatgtttattttatttgacaaatttcaaaacgcacactacatatacatggaaccggaaaaccaaaaaagacaaagaaaatcaggaagagcaaaacctccttcaagagcaattttcccaagcaagcaccttctatactactagtaactaatacctacaaaacaagttgatctgtccatctgcgtgtgggtggggtctactacatgacggaacaggcgttggggttatcaaa

SEQ ID NO: 107975 - DNA, 2001 bp, Zea mays
  Clone ID: MRT4577_2996C.1
cgcaccgccttctccactacttacccgaatcctaacgctattccactgcattctgctccgaaatggccctcgccaccaacgtcgccgccgcagcaggccgccatctccggagggtccgcctcacagccccgccgcgcgtcgccgtcgctgctcctgctcaggcgccgctgcgccgtcggcgccgtacacgccgcggagccgtcgaagaaccccggcgtcgtcccggccgccgcgaaggcctcgacgccgacggtcgtgcccgagaacgacaccgtcccggccccatccctggccccgaacgcgtcgttgcgcgcgaggtgggcggtggacagctggaggacgaagaaggccctgcagcagccagaatacccgaaccagacagagctcgaggaggcggtcaacacgatcgagaagtctccgccgatcgtctttgccggggaggcgcgtcacctggaggagcgcctcgccgacgccgccgtcggccgcgcattcctcctccagggcggcgactgcgccgaaagttttaaagagttcaccagtgctaatatccgcgacaccttccgcgtcatcctgcagatggccgtcgtgctgacgttcggcggccaaatgcccgttgtcaaggtcggtaggatggccggccaattcgcgaagccgaggtcggacgcgttcgaggagaggggcggcgtgaagctgcccagctaccggggcgacatcatcaacggcgaggctttcgacgagaagagccgcgtccccgacccacagaggatgctcaaggcgtactaccaatccgcttccaagctcaacctgctcagcgccttcgccaccggcggctacgcggacatccaacgcgtgacacagtggaaccttgacttcactaaacacagcgagcagggtgacaggtaccgtgaattggcacatcgggttgatgatgcccttggattcatgggtgcagctgggctaacagtggaccagcctttgacgacgatgatcgagttctggacctcacatgagtgcctcctcctaccttacgagcaagccttaacccggcaagactccaccaccggtcttttctacgactgctccgcccacatgctctgggtcggcgagcgcacccggcagcttgatggcgcccatgtggagttcctgagggggatcgccaacccccttggcatcaaggtgagcgacaagatggagcccggcgagctggtgaagctgatcgacatactgaacccgacgaacaagcccgggaggatcaccgtcatcacaaggatgggggcagagaacatcagggtcaagttacctcaccttatccgcgcggtccgccaggctggacagagtgtcacctggatcactgacccgatgcacgggaacaccatcaagactccttgcggacgaaagactcggccatttgactccattctggccgaggtacgggccttcttcgatgtgcacgaccaagagggaagccagcctggaggtgtccaccttgagatgaccggtcagaacgtgaccgaatgcacgggcgggtcaagcaacgtcaccttcgacaacctgagagaccgctaccacacgcaatgcgaccccaggctgaacgcgtcccagtccctggagctcgccttcatactcgccgagaagcttaggaagcggaggatgcggcggtcgtcggtggcgtctgggctcggcggcagcatcttgcccttgccgccctttggcttttgatgtcttgcacgctggctgtgtgcatgcagggtgcagtgcaggggtgtggtaggagaatcttacgttgtcgtttgccttgctatgtagtatgtaatgctttaatttactgcattctacgtcgttttttcccttcttcttctatttgtttctttttgtacgtagctgcagctcataagagattgaataatactattgctgccacatatatagacggagttggctttgtgaattaataaagtccattgctgctgtcgtcgcaaaaaaaaaaaaaaacaaccaaaa

SEQ ID NO: 107976 - DNA, 760 bp, Zea mays
  Clone ID: MRT4577_29970C.1
gaccctccgggctggccgggttagtctgtccctgctcatggaaatttattggtcctgcccttccacagagtaaatttaacttcgtatgactgtgactttcatatggcatgttaccttctatgaattgttctgggttgtgatgtggcttgtcctattcatctcatcatctggagttcaagcaaattgcactcaggaaaaacttatgtgctgcaacatgtgtcatccttgtaagcttttagtaaatagtagaaaccaatgcgtggcgttgccacacagccccatagggtgaccctttggggcttgctgtgccatacgagacagttgatttatcgtcacccatatcatctttctcagtaaataacaaacatatagcatccacctaaaaaaacatatagctgccttccatgatcctttgatgtgccttctaaatctgaaaactaatcagataacaaatgttccctaacaatcttctactaatatttaaattttttgcacaaaagaaaaatataaaaataagcaaagcccaataagcatatatgttttaatatattaaacatttcatgtttgcattaaggacttggctcaaatacatatacaagatgcatggcattaggtaatgaattctcttggggtctggcaagggagagatgtttacaggggtaggaggtagcgatggagcatgtccatgacgcagataaggagctaaggaggcagaggagtgtgtccgggatgtcctccaccctgggcgttggagcagctg

SEQ ID NO: 107977 - DNA, 663 bp, Zea mays
  Clone ID: MRT4577_29972C.1
attcctgcccccgacactcccactgtcacctgtcctctcaccgacaggcgcgagacaatgcagtcgcctacccttctcgcgcctctcgtgcgcatgccgcgcaggagcaccttctactacgtgtcgctggcaggcatctcgtcggcggggcagccgctgtccatcccggcctccgtcttcgccatggacgccacgtcagggtcgtggggtgtattcgtggactccggcaccgacgtgacgcggctccagtccgcctgctacgcggtgatcctggacatgcttcgttccagggctcgccgtcgctgccgcggacctccgtggtgtcgctgatcgacacgtgctaccacctgtcggagcggactagcgtgaaggtgcccgcggtgtcactgcgattcgagggcgtggtggcgctgcgcttgtcggagaagaactacctgatcgccgaggacggaggcggctcctactgcctgtggttcacgccaacgaacgcggccgtgttcatcatcgggaacatgcagcaataggtcacccgcggcagcttctacaccggcagatgcgacggctgtcttctccccgcaacaagtgctagactagactatcctaggcctgctcttctgactaaccgtgtccctgttagccacggattgacagtagtaatgacaa

SEQ ID NO: 107978 - DNA, 163 bp, Zea mays
  Clone ID: MRT4577_29973C.1
aatgcattcctacaattcacactttcatgtatctcacgcggttccgatccgcacgcttccgcacccacgaccgcgctgtcgctgatccgatcgtcgctcttgtcgagctcgtcacccagagcgccgccgatcccatcgccgcgttgtccgtgaagatcacctg

SEQ ID NO: 107979 - DNA, 211 bp, Zea mays
  Clone ID: MRT4577_29974C.1
gctttatctttttctttaaagatttatttcaataaaactaattgggaccacccgtattctagtaggacctgggtagggattggaagtacttggcagggcagcagcaatcttgctgtgtttgatataacatgcatccttgggcaggttgcccttaaatcttacactgtggtgaagggatgttttttttgtaatgctgcagtagagttggagt

SEQ ID NO: 107980 - DNA, 239 bp, Zea mays
  unsure (1)..(239): unsure at all n locations
  Clone ID: MRT4577_29975C.1
gacaaggccaatcccgccgacgccgacaagaaggccgagggacctacctagctaggattggcttggggctgttgaaaggcaacaacgttcggaatgtttccaattccaagggcacagcttgggaaagagaaaaatccgtgaaaaacgaacacaactggatatacgcgggcgttgggtgcgtgcacatttaaatttaaaacaacattcatatatngagacaccggcgctntgggggctct

SEQ ID NO: 107981 - DNA, 654 bp, Zea mays
  Clone ID: MRT4577_29976C.1
ggcccttgaacaaataactattacagttctgaacttccaatcttgtttctaacctaattttattaaaaaataaaaccataaaactctcccagctcagttttgtctttttcaggaccaatggcattttcattttcgtggccatgcattacctggggaaaaaaggacccatcttcctcttcaaatgggttatctgtctgggggggtataggctcaggggaatatcgtttatcttctccaaataaaacataatatcaaaaatcccttcagtttctgggaaacatagttgatggggtaataaaaaagggggggaaaccttcatcctggggcatttaatcctccagtttattgcaaaaaacccatatttcaggaacggctaagttataaaaggcatttgatgtcctgggcgagggggccaaaatatacaacagctgtcttcaaaaaccatccagaaaattcccccggtggggggctgcagggacagcgcttttttcagccgacttacccttaaataaggatgaggaaatgatgctcaccttgaacaccagatagggctcatttaattcaagggcaaattcatctgaaaaattaagattctttaggagaacatcaataggctttgtacccccctcccgcaacctgatctaagacctgacc

SEQ ID NO: 107982 - DNA, 336 bp, Zea mays
  Clone ID: MRT4577_29977C.1
gcttgaagtcgttcgtgcttgttttacaccaaaaataagtatactagtgctactgctaattcatgtgtggggacttcgctgccttccctggctggccgggccgagagaaacaaaacgaagccgcatgcatgggaatttaccacggacgctgacctaaggatcacataccatgacgacccggtcgaggtattgaacaccccagaccctccgcagccgtcaaccccttaagaccatgcacgcattgctacacgggcctgaaccgtgccgtcgaggttgattctcctcccacacaacctgatgcagaccggaacttcagggtccaataggggccttcca

SEQ ID NO: 107983 - DNA, 427 bp, Zea mays
  Clone ID: MRT4577_29978C.1
gcgacggatacgaacggtgcacctgctgttgtggccctatttgccatgtgatcgagacttcttgagccccagatacgggctcactccctaacatcgtatcctgcaacttgcaagactgctcatggatgacctgctccacgatagaacccgcacctgtgtgcccttacttggctcgtctagcccgcggcagctcacaggagcactggcttgagagcttggctatacgcatggtggctctggttattatccgatgacaatgtatggtgcttagtatttatcatcatgtggatacccaagagagaatggtgaactgactgctgtaatatatcctaacacaaaccttatttttgttcaccatgtttttcctagtgcatgtgcgctttggccgttctttcagtgaacatgaatcggcctgataacgactatt

SEQ ID NO: 107984 - DNA, 173 bp, Zea mays
  Clone ID: MRT4577_29979C.1
aggccgctacgagctcgatcgctcagcaggcaaaatatttggaatgaccgtcagcctaaatcggctacagggccaatttctagtcatctacagccgggttagaacggacatcatttggtgggttcactggtcacacatagaacaaatgatgtccgtctagttctagatcgcga

SEQ ID NO: 107985 - DNA, 493 bp, Zea mays
  unsure (1)..(493): unsure at all n locations
  Clone ID: MRT4577_2997C.1
gggctcgagcacgcgtccagccccagcaccccatttccctctccctctccctcacacgcgcccacacctccgctgccaccgccgttcacgccgtgctgcatctgcagccgcgccatcgcccatcacctggtgccccgccgctctgagctcgcatcgtcgtccgccgaggagcctgcgtggagccgttgccgagatcgcgatttgtttccgcgctccgaggaatcgacgatcaagcgtcggcgaccaaatgatcaagctctctgagttttatgaggttgaagatcctgagcatctgtttggtgaagacgagcaagctgcagaggatcctgaggttcaacaagtagagatagctgagcaggagctcattgaaggagaagaacaggtggttcaggaggagccacaaggcgaggagtatgatctgatctaggtggcgtntctcagttgacattggcgccgacgatccttaagtcggtttatggttattcctttattt

SEQ ID NO: 107986 - DNA, 269 bp, Zea mays
  Clone ID: MRT4577_29980C.1
gcggtacatcacgcggggcgacgggcggtgcaaggtcctcgacaacgggcggatgctgacactaacgctgggaccgcacatacgggtcgggtttacactccccgcacgagtacctgctaggcaagatcgacatgcagctgcggctggtgccgggcaactccgacggcaccgccaccccctactatctgtgaaaccaaggcggccctcacgacgagatcgacttttatttcctgggcaacgtgcctggcgagcccaacacgctgcacacc

SEQ ID NO: 107987 - DNA, 532 bp, Zea mays
  Clone ID: MRT4577_29981C.1
ggtgacgtgaccctgaatcggtgacaactaactgatagtgtggcaggacataatgtgtgccgtcatgtccaagactgccattgcaacacctgcaaaccagaaagactaagctgctttcaaaccatgtaactacatcgcactaacataataagctgatcacatcctttccgacattctgaaatggtctcgaggagtggcccggaaaatatcctaccggttacaatcctcaaacataattatgcatatcagcaccttgatctagagctccagcaaattattgtgataggatcatcttgtacaaattttttttaacatggccaatccacacattcaatcatctccgatgtatgtgcaatctccacccttgagtctggtgtaaataaacctctacatattatgctccagcactgactgatacatataaaaaagatacatgtggacaatcaggtgcttctacaaatgggacttataatcacgagaggcagtttgaaaatacttgagagatcttttatagtatgcataaccaacagac

SEQ ID NO: 107988 - DNA, 232 bp, Zea mays
  Clone ID: MRT4577_29982C.1
ccggccggggattggttccaacatggcttggggtcaataccaagtatccaccaatttgtcgcacgaccactcagccgcccgctccaatggagagagcggccatgctcctcatgatatgacccacgtgcgaccggcagcccgccgtcttctctcagcagatgaaccaaagtcttcgtcgggctcagggcacatagcaagctcggatcgtcagactctgcatgcccgaatgtca

SEQ ID NO: 107989 - DNA, 812 bp, Zea mays
  Clone ID: MRT4577_29983C.1
gccggccgggatgacaaaaggggatcccgtcccttcgcttgcgggcacgaccatcactccaccatgtccgccgccacctcggcggcagcggccgtctcctcgtcgcgcccgtatcccctcctccaacccgcctccagacccgccctcgtttccttccctcggcgacagcttccatccacctcggttgccctgtccgcgtcctcccagctgtcgtcgcggggctcgccgctggcgccggcggccaacccgaagtaccacaacgcgaaggtggacgcgggagacgaggacgcggacggtgaggagctcctgcggcggttccgttggcaggtgtcccgcgcgggtgtcatggaggagatcaggcggcggcgcaggcacgaggacgcccgggacaagcgcaagcgcaaggcgcggtcggcgtcgctgcggtaccgccggaggcgcttcaagggcccatatccttccatcgatgaccaggggctcaaggagcaggacgaggagaacgacaactgggagctccctgcaggagagttgcctccttacattacaggcaggtgaaggtggtccgacaaattgaagcgtggttttgtctgacggagaatttcggcggctaaatcttcagttctttctgttagtcgagtaggtgttgccaaattgttcttgtggatggattgtacaatggctggtgtgttctcacgagaattctgatgctttctggtggggagaaaatgatttctgatgcagatgcagttgacacttttaaatttataatgaataatttttcgccttatataaaaaaaaaaaaaaggccccta

SEQ ID NO: 107990 - DNA, 884 bp, Zea mays
  unsure (1)..(884): unsure at all n locations
  Clone ID: MRT4577_29984C.1
cattgggacctcgaggccggccgggacaaacatcccgtcccttcgccggcgggcacgaccatcactccaccatgtccgccgccacctcggcggcagcggccgtctcctcgtcgcgcccgtatcccctcctccaacccgcctccagacccgccctcgtttccttccctcggcgacagcttccatccacctcggttgccctgtccgcgccctcccagctgtcgtcgcggggctcgccgctggcgccggcggccaacccgaagtaccacaacgcgaaggtggacgcgggagacgaggacgcagacggtgaggagctcctgcggcggttccgttggcaggtgtcccgcgcgggtgtcatggaggagatcaggcggcggcgcaggcacgaggacgcccgggacaagcgcaagcgcaaggcgcggtcggcgtcgctgcggtaccgccggaggcgcttcaagggcccatatccttccaacgatgaccaggggctcaaggagcaggacgaggaggacaacgacaactgggagctccctgcaggagagttgcctccttacattacaggcaggtgaaggtggtccgacaaattgaagcgtggttttgtctgacggagaatttcggcggctaaatcttcagttctttctgttagtcgagtaggtgttgccaaattgtttgcagcccgatcggtggccaaagcatggcaaactgatgtaaatcttggttctggatgttatgccagactctcctggtcctggctgtgctgcgaatgcttcatctgtattgagttcttgtcgatggattgtacaatggctggtgtgttctcacgagaattctgatgctttctggtggggagaaatgatttctgatgcagatgcagntgacacttttaa

SEQ ID NO: 107991 - DNA, 282 bp, Zea mays
  unsure (1)..(282): unsure at all n locations
  Clone ID: MRT4577_29985C.1
ggcnattngttctacaacatgtcaacatatattttggtattctttagcaacaanagagcaacaggggcggtgaagatattttacattcttatgctccttgctcttnctgcatgtgttgctaacgctaccatttttcctcaatactcacatgcttctatagttgtccttttttcctcataccttttatcaatgacctgctttagttatgtaaaactctacttttcaattttacatgctttaatcagtaattttatcatagaacttacttttatcattcttgtt

SEQ ID NO: 107992 - DNA, 1463 bp, Zea mays
  Clone ID: MRT4577_29986C.1
aggctccttgtcgctcgtagcacgagctcgtgccgaattcggcaccaggttttgattctcggcctcgcgccaggccggggaagaaattaagaatacgccaggctccttgtcgctcgtaaaatggaggtcgcgacggcgacggaggcgtctgcgccggcggcaagcggcggcgcggcggggcagagccacccgttcccgtggctagacgctgccatctctgagccctactacttcctgcacctcctcgccttcttctcttactttgcggcccgcagcgcggcgctctccgccgacgacggaggggagctccacgaccgcctcctccgtagggagatccaggcagtgctcgtgttcctggtgctcttcgtagtgaagattgtgaaagaggaaacctgggaagcagtaattgctgactcgttgctttatgcgaagggtttattgctggcagttactttggttattgattgttggctggcctttgcctactttctgggatttcttgttatatatgctgtagctcaacagccaccttatgatggcctaggccattcaaatcacttgaccccattgcaacttgaaagtctgctaactgaagagccaacatcacgattttggctggtagaattccgaacttcattttcagcaaaatgtgtacaagcaagcagcattctgcctgaactttctatcgcgtactccaacaagaacatctcttttggaacaattgaccttgggcatttcccaaatgctgcagcaaagtttgggatatccatgtgggatcatctccccacttacatattgtttgacaaggtgactgaagtttctcggtttccagaaatcacaagtgaatcaaaagtatttgtgccaaaagttactaagaaacttctttgccagcattttgatctcgacagacgattgattggatacctatccacctgatctgtcaccgatcccatatgcctcaaaggatggggacatctcccttttttgtcgctgaaccggacatctgtgtgtcagcagcaatcacttcaggggggtatcgtgagccttgtattattcgccgaactgcttattcccttttaattaagtcccagtaaactttgtggcggaaaaacacacacacacacacaaccaatttctgtctaatctgtctgatactgaattatagaatttcactaccatgcagaggtttctgtaatgatttgccgactatgttttgtcacattgtgactgcagcagcagtcaattcagacagcatccacttccactgaaaaaaaaaaaaaaaaaaataaaaaaaaaaactcgcacagcggtaccaatttctgtctaatctgtctgatactgaattatagaatttcactaccatgcagaggtttcggtaatgatttgccgactatgttttgtcacattgtgactgcagcagcagtcaattcagccagcaaaaaaagaaataaaaaaaaaaaaaa

SEQ ID NO: 107993 - DNA, 317 bp, Zea mays
  Clone ID: MRT4577_29987C.1
actcattcaaaatgcgtggatggaaacgagtgctgatgaagtactactaccttgcaagagtagcctaggcttctacgactacgagtaagctacagggccggttcagttttttatggggagtttttgtaggatctggctgtagaaaagatcagactgcaaagagaatatgagtgtcgtgcagatatagaaaaaaaatcgaacttggagagaaactgagtgtcgtgatgattacgtatagaggaaaataagagtatatagagttttgaatgtaaaaagtgacggtttttctactattacaacgaatcgtcacattctat

SEQ ID NO: 107994 - DNA, 1664 bp, Zea mays
  Clone ID: MRT4577_29988C.1
gtaaaatggaggtcgcgacggcgacggaggcgtctgcgccggcggcaagcggcggcgcggcggggcagggccacccgttcccgtggctagacgctgccatctctgagccctactacttcctgcatctcctcgccttcttctcttactttgcggcccgcagcgcggcgctctccgccgacgacggaggggagctccacgaccgcctcctccgtagggagatccaggcagtgctcgtgttcctggtgctcttcgtagtgaagattgtgaaagaggaaacctgggaagcagtaattgctgactcgttgctttatgcgaagggtttattgctggcagttactttggttattgattggtggctggcctttgcctactttctgggatttcttgttatatatgctgtagctcaacagccaccttatgatggcctaggccattcaaatcacttgaccccattgcaacttgaaagtttgctaactgaagagccaacatcacgattttggctggtatttctgtacatgtttttaatggaattctaatattgttatctcccaaatttccagtacattcctgcccgctttactattttgtcaagacttgtagcctgtaggtgcctacaattgttacaaatgtgtcactctcatcttatagaaggattagaggagcctgagaagaatttcatatggtttgatgggctgatggaaaccagttaaattccttgcccaactgcgcaacttaatttagagtagagacacagttgctatataactttagtgcctatcattaaaaatatagtttgtctacttcgatagcaacggtatcaaaatctgactaccttatgaagtttggagtcttctcatttcttttggttagtgagggaacttgtagggggttcctttttaagaattgtcccagaagtttcttgcccataaagttaggtgtatgtttcaatttccctggttctttgatgactggatatttttatttcaatgcaaacaggtagaattccgaacttcattttcagcaaaatgtgtacaagcaagcagcattctgcctgaactttctatcgtgtactccaacaagaacatctcttttggaacaattgaccttgggcatttcccaaatgctgcagcaaagtttgggatatccatgtgggatcatctccccacttacatattgtttgacaaggtgactgaagtttctcggtttccagaaatcacaagtgaatcaaaagtatttgtgccaaaagttactaagaaacttctttgccagcattttgatctcgacagacgattgattggatacctatccacctgatctgacaccgatcccatatgcctcaaaggatggggacatctcccttttttgtcgctgaaccggacatctgtgtgtcagcagcaatcacttcaggggggtatcgtgagccttgtattattcggcgaactgcttattcccttttaattaaggcccagtaaactttgtggcggaaaaacacacacacacacacacaaccaatttctgtctaatctgtctgatactgaattatagaatttcactaccatgcagaggtttctgtaatgatttgccgactatgttttgtcacattgtgactgcagcagcagtcaattcagacagcatccacttccactgagccaggggtgtcccgg

SEQ ID NO: 107995 - DNA, 555 bp, Zea mays
  Clone ID: MRT4577_29989C.1
gggtacctcgaagccggccgggccggtattcttgatcctattctagagtgatcatgtcgcaactctacctgcctgtctacatctcgtcggcggggatgatgagtttcactgctagtctggtacgatggcaccccccgagtccgtaagagctactccgctccatcacaaacgctcccttatgatgaagcttcctgagaggattgacatggtgaagactgcgagggttaaggagctccctccttatgaccctgactggcacaacatcaggtctggttatgaagaaaggaacatctacttgaaacaaggtttcgctgatgatcgtttcgagaagatgtttcgtggccgtgcatacaaacgtctcacgccctgcctagttctaagataagcgtgggggtattacagtcatcatcctcctccggctgctagagatgagacttattgacttcgatccccttgcagaacggcgcctcccctcccaagtaaataatagatccggaccagcagactgtaagggttgctgctaggaccttgaagcatctcatatttgttccccta

SEQ ID NO: 107996 - DNA, 467 bp, Zea mays
  unsure (1)..(467): unsure at all n locations
  Clone ID: MRT4577_2998C.1
cgcacaattacagtacacgcttatatctgatcgctgtactgcacatagcctaacgggacgttgtcaagtacactggcgcggtcaagcaagagctagggagacacgtgggtattcttggaaacaccaccctgggggctgggcgtactcacgagctgaacaaagaagggcgtcgactgaggcgcgaccgctacactgangtatgtgccggaacacacgaatgggcacgatgcgtttggcttgcgcgcctccattgccttaggggcatggccatccttacacaccagcattatgaaagtaatcgctggcttgtgtgtacagaacacaaatccgcgttctactgacgatgtgagtgtcacttacgaacacttgataccacagtgacaattactaccaatatgctagtcgctggggctctgttcttatcaaatgctgagaccttactgcctatagtacttctatacctggta

SEQ ID NO: 107997 - DNA, 399 bp, Zea mays
  Clone ID: MRT4577_29990C.1
gcgtttgccaagcactgcggcttcccgccggtggaggggtggaagagggacctcctgtcgttgtctctcgcaagcgccagcgacggcgccgtggagagctaccgtgacagctaccatgacagcgacctggttcgggagggattgcgctccgagggctggtggccgtggctcccagatccacaatgaagacgacggcgcagagattcacaactaccgccacgcagcgctgctggctgctgcactactctaggtactttttgttacaaaatagtgtactgtgatcgagctcatccacccatccattgtaacagttattatccaagggtcatacccttggtaatcttatgtacgtatgtatataaggactactctctgtaataaacaacagttactagcctc

SEQ ID NO: 107998 - DNA, 164 bp, Zea mays
  Clone ID: MRT4577_29991C.1
gaatgaacagaggcttattgacgctatgttctcagctcaggactgtgccatatactcactacattatatggtgacgacggtacaaagcccctaggtcgcctgtgattagaccacctaaacatgtctataagacaccggaaatcccatccatcaaccgattccag

SEQ ID NO: 107999 - DNA, 541 bp, Zea mays
  Clone ID: MRT4577_29992C.1
ctccactaaagatcaccattaacttataaataggcgatcactaagctcctatacaagtggtacaatgcaaaacgcgaataagatagggcgcccgcctgctgaaataaaacccattagtaagcttggcccatcaggatattcagtgcgatacctatcactacctgacaaaatgggacacgcaaaagggctttaatgcactcagtataatcccagcaccttaaggtcttaattgctactaaaggttccaaaagcaggtataatctaaaaaatgaacttatccaggcaatattaaccaactggataccctcatcaatcgaagacataaactagttctagagcttttccaacctttcaagctcaatgtccacctgctcacctaatccaagcactgcctcaactccattcattgccaagccgtaccttagatccaaagaatggaatctgtgcctcaaacgattggacaaaagagcactcaacagtcatgctaactccgttgatacccttcaagcatgcatactccaaaacagcaccattctacact

SEQ ID NO: 108000 - DNA, 530 bp, Zea mays
  unsure (1)..(530): unsure at all n locations
  Clone ID: MRT4577_29993C.1
ngtcctaccccatagcaatgtagatatctctcactggctcacggaagccatggaggttcgcaaaggtgcgaacgaggctgtcatcccatacgttttaccgatccccgattgcctcatgatgtgtcccaagccaggattcgtggaatttccttcttctatggtgctacaggatgacccagttccttttgctaagaagcgtgttggagaaggaggcgactcgcacacggggtagagtagcaatggaggcataagaaccagggtgaataagagacaccgaagggctaagcgccagatgcgcaggtaccgtggcgtcgagatcaactcaactgatgaggatggggatgatgatgacgtgagcgtgggctccaagctttgggccattcctgatgcctcccttgacgcgttaacggttggctttgccatggccttttctagcaacacagtgagtacttttcttgccgtggaggaggccgacttcccagacctccccaccattttcctaggccgatgaacccagtggtgcttgcccc

SEQ ID NO: 108001 - DNA, 1948 bp, Zea mays
  Clone ID: MRT4577_29994C.1
cattgggtacctcgcgggtgccctggattgaaccgccaccagtctcttccattgaaccgcggtcgtaagacgcctcacccaacaccgcgcccaccaccccaaacgacgcctacattcctgacttcccctcctacgcgcagacgccgtcccaccgccgggatgccgccggcgatcccaagcctggtccacccgtcccgtgtgcggattctccacccgggcggaagccatattcacgggccggtggtgtactggatgctgcgggaccaacgtctcgcggacaactgggccctcctccacgcggccgaactcgccgctgcgtccacccccgcggcgccgctcgccatcgctttcacgctattcccacggcctttcctcctaggcgcgcacctccgccagctaggtttcctcctccgcgggctccgccgccttgccgccgatgcgcacgcccgcggcctcccgttctttctactcgagggcggacctgcggagctgccgtcgttggtgcggcggctcggggcttcggcgctcgtcgccgacttctctccgctgcggccggtgcgggaggcattggatgctgtcgtccaggagcttctgcgtgacgccgccaacatggccgtgcaccaggtggacgcacacaatgtagtgcctgtctggacggcgtcagggaagctcgagtactcggccaaaacctttagaagtaaggtgaacaaggtgataaacgagtatctggtggagtaccctgaggttccgcagtgggcgccttggtgcatggagcagccgaagagtgttgactgggatgcactgatcaatagcatcttcagtgaggctgagaatgtgccggagattaactggtgcgagcctggggagtcctcagcgatggaggtccttcttgggagtaaggatgggttcttgacgaagaggattaagaactatgacactggccggaatgatcctacaaagccacatgcattgtcgtgcctttcaccgtacttacattttgggcacatttctgcacaaaggtgtgctcttgaagcaaaaaaacgccgtcatcttagtccaaagtcagtggacacgttcttggaggagctgataataaggagggaactagctgacaatttctgctattaccagcctcaatatgattcactggctggtgcatgggagtgggctagaaagacgttaacggatcacactggtgataaaagagagcatatctatacgagggagcagctcgaaaatgccaaaacatctgatccactttggaatgcatctcaattggagatggtgcaccatgggaaaatgcatggatttatgcgaatgtattgggccaaaaagattctagaatggaccagtcaacctgaagaagcactttccatagcaatatatttgaacgacaagtatcatatcgatggcagggatcccaatggctatgttggttgcatgtggtctatttgtggcctccatgaccagggttggaaggaacgtccggtatttggaaagatacgttatatgaattatgctggttgcaagagaaaatttgacgttgatgcttatatttcgtacgttaaaagattggttcctagggccaagaagaggaaaactgaggaaggtgaatccacggtcaaagaatccaatgtctgagttggctcagcagttcaacattgtctaaaacattggtataatttaaatttggcgcagtcaagtgacatacttttcttttgctggtagatgtttatacggctaactgaagagttgctaagtagagatagacattatacaaggttgtgctgagatcagtttgcctcgctgatattataggaaaaacatattaacatatatgttttataatagttttaaaaatactaatgttattctgtcgacgtttgattttattttttaataaatttggttaaactttgtgaaaaaaaaaaaaaaaaaacccgcggcc

SEQ ID NO: 108002 - DNA, 213 bp, Zea mays
  Clone ID: MRT4577_29995C.1
gtggttgggttttatacaagaacggggcgggcaatttaattttcccttttacaacagaaaagatgaaagaaatgggccccatgacttgagcattatattggggcccagcggtcactgagaagttttgcaaaaaggactttttagactaagctgttgttcccaagggactacaggacattttttttttgccccaaccaaggcgttggctgggat

SEQ ID NO: 108003 - DNA, 300 bp, Zea mays
  Clone ID: MRT4577_29997C.1
gtggcgaggcgagaggaaggatcattggatttctagggcgggaaacaactaagatgcagggaggggggggacattgttcgaactacggcaccacaatagatgggccaacaagcaccgggtcggaacaaagaaccaggaatccagtaccttcgcagggaagggaaagaacagagcagggaacgccaaaggggaagcggcaccaggacaaggcccaccaggagatggagagggacagcgaagacgccgaaacggaacaggccgcgggtcatgggggcggagggcgacaagggagggcatgga

SEQ ID NO: 108004 - DNA, 346 bp, Zea mays
  Clone ID: MRT4577_29998C.1
gagtctccgtctccggtcggaggtccgttgccgccgccttgcgggaccgggacgacgcgtcgtgcctcgacgatttgctggtcccgtagcctctgttcttcacctggatcaccaggtggtggaggagcgccaccagctccagcatgtagtgctcggttttcgccttgtcggcgtgatggagcgtctggatgcgggtgacgctgtgctgggagcctgatttcttgctcatgtcgctcctgcgagcaaggtggatgcatgttaggtggtgctgcaactgcaagcaaaacatgttacgctacattgtcgatggggagatcataataaggtttatcaacggtcgcatggg

SEQ ID NO: 108005 - DNA, 401 bp, Zea mays
  Clone ID: MRT4577_29999C.1
gtaggcggccggccttggcttttgggcggaaagttcatggccgtgaggcaagctatcacagctgacctacacttacgtttgagcctctgacacagaacaatcagagcacgtatgttaaccgcttgtaccatctattgtgtccaatagcaaacaacatatgatcgaagctacctaactagttgaacaggatcctatgccatttgcaatatgtcgctggggtgtaccgagacacatgtacttgagctgtgacatgtacaggatgcttgtagccaacaattatgcaggatcacactgacccagcgaacatacatttgtacagacatccgtgaacgtcagtccagtttctccttcaggcgttgtagctaagcacttgatcgaggtgtacaacttgagatattcac

SEQ ID NO: 108006 - DNA, 538 bp, Zea mays
  Clone ID: MRT4577_2999C.1
gattccctctcggaaacggacggtacaatcataccgatcaggagccagctgctgcttcctgtgttggtcccactgccgagatcagcagcagaagcagccgtcggtcctctgcgcctctcgttgatcgcttgatccgaggggatccaaggcgagctgcgtacgtggcggcggcgatgagttcgctgagcatggtggaggcgaggctgccgccggggttcaggttccacccgcgggacgacgagctcgtgctcgactacctgtccaggaagctcggcggcggcgccggaggggccgcggtggcgagcatctacggctgccccgccatggtcgacgtcgacctcaacaagattgagccctgggacctccccgaaatcgcatgcattggcggcaaggagtggtacttctacagcttaagggacaggaagtacgctacaggccagagaacaaatagagcaactgaatcaggctactggaaggccaccgggaaagaccgtgcgataagccggaaaggcttgctagctggcatgagaaaaaccct

SEQ ID NO: 108007 - DNA, 200 bp, Zea mays
  Clone ID: MRT4577_299C.1
tgctcaagccgagcttctctccagcacacaccgctctgtctctggagaaaatatcccagccacgcctctgcttatcctcctggaatttttttttatctgctgcgtgagatttttgttccgtgttcttatctctctcttctcagtctcatccggtgatcggatttatcttacaagcgctcgttcttccatctgctggctcg

SEQ ID NO: 108008 - DNA, 635 bp, Zea mays
  Clone ID: MRT4577_29C.1
ccctctcgtccgaacaaaaaagcgtcccgcctcatcccgcgaacagcaatcagagccacgcggcgatggcgatggcgatgccgatggcagtggcgcgggtgaccagcctcgcctgcgccccccgacaggcgcagcatcgccgccgccatagccttgccccgccgtgcgcctcgggtgcggtggaggtgcgggtctgcacgaaccgcacgtgcgcgcggcagggggggcgcgaggtcctggctgcgctcgcgggcctcgcaccgccggcggtcgacgtggcctcctgcgggtgcctcgggcgctgcggcgccgggcccaacgttgcggcgtccgtccctgggagcaccgcggtgttcggccacgtgggcacggcggcgcgaggcgcgcagctactggagcacctcctcggccccgcggaatttgatgcggccctagggctcaccgagctggccacgagggagaaggcggaggctgccctccagaagggaaacgcggacgaagcggaagcccttctcaccgaggtctggactggacgcatacgccagtctgcgattgtgcatgctctctcagttgctggatccgagtttgatgattacacttgtatgtttgcatagggtattgggttcaatgcttgt

SEQ ID NO: 108009 - DNA, 1856 bp, Zea mays
  unsure (1)..(1856): unsure at all n locations
  Clone ID: MRT4577_2C.1
gtaccctgtaccctcgagccagtcacgctgttcgagcagagccccatccccgtgccaggccgctcggccctcgacgccgtgagtcaggcaggcaggcgcctctttctgtccctccacccgggtctccacgccgccgccgccgccgcctcgaccgcccccacgcatccgccgctcctctacccatcctcggcccgcggcccagggagaagaccgcacgggcgggcgagatggaaaaccataatccattacattctcagattgctgaagtgaaaatggacatctcagcatcagcttctgttgcatcagggaacaaattctgcaagggtggtgcctgtgatttctctgattccagtaactcctcgaaagatgccaaggagagatccacgtccatgaggaagcttataatcgcagtgatcctttgcatcatattcatgacggtggaagtggtcgggggcatcaaagcaaacagtcttgccatcttaactgatgcggcgcaccttctttctgatgtggcagcatttgccatatcgttattctctctctgggctgctggatgggaagcaacaccgcagcagtcatatgggttcttccggattgagattcttggtgccttggtctccattcagctcatatggctacttgctggcatactggtatatgaggctattgtaaggctcattaacgagagtggcgatgtgcagggctccctcatgtttgctgtgtcggcgtttggactgtttgtcaacattataatggctgtattgctaggccatgaccacgggcacggccatggacacagccatggacatccacatgaccatggtcatggtgattcagacgatggccattctcaccatgaagaacccagaacagggccatgttcatcatcatgagcatagccatggaggcgctattactgtcacaacccatcaccaccaccatcatcacgatcacgatgttgaggaggcgctgatcaagcatgagggtacccagtctgctggcagagctggtaagaagcctcggcggaacatcaacgtgcacagcgcatacctccacgtgctcggggactccgtccagagcgtcggggtcatggtgggcggggcgatcatctggtacaagccggagtggaaggtcatcgacctcatctgcacgctcgtcttctcggtggtggtgctgttcaccacgatccggatgctgcgcagcatcctcgaagtgttgatggagagcacgccccgcgagatcgacgccaccaggctggagagcgggctctgcgggatggagggcgtggtggccgtccacgagctgcacatctgggccatcacggtgggcaaggtgctgctggcgtgccatgtgaccatcgccagggatgcggacgctgatgagatccttgacaaggtgatcgggtacatcaagacggagtacaacatcagccatgtgaccatccaggtcgagcgcgagtagggagctctgtctttggctgctgtcttgggcataaatggctggcgccattcgagctctggtgtgctcggtggtgttgtctattgctagtctattaggcaggccgggggaattgtttgcgtggtggtcgtcagtcagtcagtcggtgcataaacaaggatgaaattttcggtaatgctattgacagcatcgtggttcatcgaaaaaaaaaaaaaaaaaaaaaaaaaaaaannnanaaaaannanaaaaaaaaaaaaaaaaaaaaaaaaaaaaggattttgggttgttatcantgtttaagggggaattnnagaaattggggggggttgttaggggatttgggtttggttnnaagtttggggtaattatggtnatagttgttttttgggtgaaattgt

SEQ ID NO: 108010 - DNA, 150 bp, Zea mays
  Clone ID: MRT4577_30000C.1
gctactcgtccgcctactcgtgcgtctacgcgggggtctgatcaaatacaatgtggttggttgccaactgatccaaggagactccaaatggattcagtcagaagagcctaaaactgtacagatgctactgtatacgatacgaggacaagg

SEQ ID NO: 108011 - DNA, 577 bp, Zea mays
  Clone ID: MRT4577_30001C.1
ttttttttttttttttttttttttttttttttttttttttttttttttttttttttttttttttttttttttttttttttggccccaaaccccggaatggcccaaaacaagggcgcggcaaaaaacccaaggggcccggaaaaaaaacaaggcgggggccgaaaaaaagccgccccccacctttgaaaaaggaagggacccccccgaaacaaagggggggaccattggaaaccacccacaaaccccccctttaaaaaccggggggatctcaaagcaaaaggcaaaatcggcccctttaaaaacccaccctggaacgggaccccccggaaaacccccgggggggaaagggcacccccccccccccccaaaaaggggcccccccaaaaaacccaggggccaccccaggcagggggcggggggaaaaacacgggggccccaaggccccccccggggttaacccccggcccgggaaaagggaggggggccagggggacaaggaacccggcaacccccatgggaaaaggggcgaggaccggcccaggggagcccccggggcccccctgggcggcgggggcgg

SEQ ID NO: 108012 - DNA, 415 bp, Zea mays
  Clone ID: MRT4577_30002C.1
ccccaaacttgcaccagtcatccgtacccagatacaagactctcttgctgctccccttctcccactgctacgggtcccagggcaccaccgaccgggtctacggggacgcgggaacccgcgtgcccacaacagcagaaatggcaaaaaacgagtccacccaacccgtccgcatccgcaccgaagataaggaacgacaccgcaatgtgacgagtcttcactgtcagacgtactaccattacgggagaggttgttatcgcgcatttggttgagatctactcggagaactttcgggataagggagtaggatacaaattaactaagaaggaccgctagaaaacctaagaataggagatgatgaccatgagtttgggtaatgcaagctaggagaagatatacggaaccaacacgcggaacc

SEQ ID NO: 108013 - DNA, 1316 bp, Zea mays
  Clone ID: MRT4577_30003C.1
tccacatccatcccctccaacgccaatcaactccgtcctaaactacacaatccgcggcaacagaaaaaggcgacaccagaaacagaagcaagattccctccgcttgatcgccctgtgaatcgacccgaccgagtggctccaccgcccgatggacccgccgcggcccgctgccggccgctccggcggggtcggcactggtgactcgccggtgagttgggacgacgacgacgatgactgcagcggcggcggcggccgcgtcgaaggcttggcgggactccacatatttgaccaagaggcagacgagccaccagccaaaaacagcatggccaacagacttgatactaactgcattccagttgctaacggatgcaacacgggaacctccgtagagaaggaacctgtaaatggcttggacccgcttcatgagcatactggcatctgggtccctgtttctgtcccgccaatgacagcgcaggaccgcgaggagtggcacagggggtttagttgcaatggcaggaacttcccagaagaagagttcagctgggagctggatgaagagaacattgagatgacaatgtgggatgtttttgctgatatggctgtcgcagcaaaagataaggtggtatctgctgcaacatatgagtatgggagatatgggatgtcggcagtgtccaacttttttctccaagaggcttggaacgatatggcacaaacacttgcggatgcaaacactggtattgcgaacgagcttcttgagacagagccaactaagtggttacctgacagtgctgccacctcttgcatgctctgtggcgtgcgatttcatccaataatgtgctctcgccatcattgtcgtttctgtggtggagtattctgcaatggctgttcaaatggtagaagcttgatgcctccaaaatttaggactgcagatcctcagagggtttgtgatgtctgcggagttcgtctagagagtatccaacctcaattgatgaatcagatcagtcgggcctcacaacttccaactcgggatgtcacagacctgagtaccttgaggtcatggctgaatttcccttggtcacacacaatggaatatgagatttacaaggctgcaaattctttacacagttattttaaggtgggaagactgaaaccagagaagtatatcctgatactattcttagacaagcaaaaggccttgctatagttactgtggtgaaggttgggatgatgggttaccttacaaacttggcagtgggctggttgtttgctccgaagagtggatggctcctggttccaccaccggccaaccaatctcc

SEQ ID NO: 108014 - DNA, 328 bp, Zea mays
  Clone ID: MRT4577_30004C.1
ggaaatgcaattggccggtcaatatagcatttcgggggttgtgtttacaatttgattgacgaaagttccacatgctgtaaattgccaacatttttttaacataagatgcccttccaccatggttaaacccccaataatcattgggggattttggtttgaatgctttctggaaaaaaaggggcccttttttttttttggaatccaaaaattaatttttggatttaaagggctttttttaaaaaccaattggtgggaattggtttgcaaattcctttaaattatggggaagctttgcaatctcaacttgggtgctttcaaattggaaagg

SEQ ID NO: 108015 - DNA, 554 bp, Zea mays
  Clone ID: MRT4577_30005C.1
gtaccggccccctctcgagtttttttttttttttttttttttttttttttttttttttttttttttttttttttttttttttttttttttttttttttttttttttttggggccaaggcccacatccatacagttttaaaggtggaaaaaaacaaagaccccaagttttgaaagaggcaaaacccgggcattttttaaaaccccctaggacaacccccctcgaaaaaaaaggggggggctccctggacaaaaaccgggaaaaaaaacgggggttaaaaaaggggttttcccttgaaggaaaacttttgccaaaatttttggtaccgggggggccccttttacccccttttttaaaaaaaaaggtgggggacctctcggattttgggaaaggggtgcccaaaaaacttttttggggggaaaaacgggaaaaaaagcccccccctttggcccttggaaaaaaacgggaggacttggacacaaatttgtccctgggccgggggttgtttggcaaaacaaaaggggaccccccttttttggagcaatagggggacctt

SEQ ID NO: 108016 - DNA, 726 bp, Zea mays
  Clone ID: MRT4577_30006C.1
acatgctcttctactgtggtagcctgtttggggagcggataggacttctcctgtcatgaatgagaacctacattcatttcggccacggtgtgtgagaaccaacatggatttcggggctggtgccgggtacggacaaatcgtatgtggctgtgacccgggtacgtggaaagcgtatgtgtcgcaatttatgttcctggtggtgaaatttgttccgtcatggttgcgggacataaagctggacacgctaaagaagatagcagctggacttcggagctggcacgaacacgaccttgctctgtctcttcttgaacgaggaggaccacaagcaatctctgttgtagtcgagacctttctgtaatccttccgtttggacattttgcccccacctgacatagcagccgccgttaagggtttgtagttggtgatctgaggtctagctgaagtaatccggatgacccttttgatccagaattacacttgtgctacccgggtaactgatgtttatctcatgtatggcgagctcatcggggttttcgtgaatccaatacggaagaacatgcaacctactagggtgtacttcagccctaacatgtataacatgtgggaagttcatgcaacctactagagtgaactttctgtatattttgttgcaatgcatcgtgtttcctatctgcggtaaaaggagagaaaaaaaaaaaaaaaaaaaaaaaaaaactcgagagaggg

SEQ ID NO: 108017 - DNA, 286 bp, Zea mays
  Clone ID: MRT4577_30007C.1
cgcttaggtgtagccggacgagcagggctgcaggggccaccttaccatggcgaccgacactgccggccccgtccccgccggcggccacccgtaccgccgcgcccggactcgctgcgccccaccgcgcctgcaccgactgcgcttaccggccgcagccgcagccgctgccgattcgtcttccctgcccggcccgtcgtccatgctgccaccgctgccagatggaggcgggcggctggtggcggagctggtgtgcgcgttcaacgagctcacggagcggtggggggga

SEQ ID NO: 108018 - DNA, 594 bp, Zea mays
  Clone ID: MRT4577_30008C.1
gccgggagacataccatctgttagctcctgcgcgccgccgacgccaacgtgacggaaggaataggaggaccaaggagcacgactcgatggcccactcgaacgtttggaactcgcaccctaagaactactgccctggctccggtgtctgccgggtatgcgcgaactcttacggcctgatcatgaagaacgggctcatgtgctgtaggcagacgctttcgtagcaacgtcaaggacatcagcatgcatcaagtacctggtgaagaggccactgtgactgcttgcggagtaacttcactacatcaaacatatggctccttcattataaggcctaattaatgcgctataactttttggtaaaaactcgacactaacgtgtgatactcaacttggttaagtactgatggctactgtgggcttgttggtccaactatattcgagaaatggacattgttacttattaagcaacaaacaacagctactatggacccagatactctagtttctaccccctttaatgagggtcattcgaccaactaggcagcatcgtgctcatatgctgattcacgagagaaacagctactaccatacattcca

SEQ ID NO: 108019 - DNA, 366 bp, Zea mays
  Clone ID: MRT4577_30009C.1
aacaaaacccaccttttttgcacaaaccagggtgatttaaaggaccaacgccaacctatcatcttcaatttgcctatgcaacgccacgcgaaaaaaaagccacacatgcttttcgcgcctagaataaacccagggccgaaccccctttcccaaccgaaaaacaaggaagccccatagcatacccggacgagcttatttgccgggaaagaaatgggggggagcggcccctgcgtggttgttaactggtgcacgaataagcccaacaaggttttctggcgagcccttgcggggtgacaattgcttgtcctaagacaccgaatatggaaaaaattgggaggccaccctttttgagcaccatctcctgga

SEQ ID NO: 108020 - DNA, 291 bp, Zea mays
  Clone ID: MRT4577_3000C.1
ggaggacacccaaaagggggaacggcaataacacatggggacgaagggccttggcccggtttaaacccatccggtttctctatcactcgcgttttcggggagggaagggaaaaaacatttcctgaggcacaatgaggcttccggccccaaacctaaggaaattgtttacccccacacggcgggggtcatagtggatatttcctacataaacggcaagtgaaccctgttatcagcccacccatgggtaaatttcaccgggcggacgagccaatacctggcccggggaacagg

SEQ ID NO: 108021 - DNA, 179 bp, Zea mays
  Clone ID: MRT4577_30010C.1
catgtcgggagctggagcagcttcatctgggcctgtatggcacgtcagaccggctgactctagccaaggagggcagcccctttttgacccagaagtggtgccatacactgcgagaactggacttgagtggccaggggttcactgagcaggacctggagcaggccctggctgccttctta

SEQ ID NO: 108022 - DNA, 428 bp, Zea mays
  Clone ID: MRT4577_30011C.1
gtgccagctgactgggggaggtcgctagcctaatcctcgaactcgttgaagtccttgaactcctggagattcgcctcgacaccttctccttctttacctgagcatatgttgcacctgttgttttgtgaaagcaagggtgagtacacatcaacgtactcagcaaatgttctgtttagctaaggtggactaactttatgtggggtgaagctccagtagttgcttttagtttgtcagatatttattattagtagaagccaaattttagcaataaccaacccatgaaccgtttcctcatcgaggaacatcattatcatcatcgtaggcaaatccataaatagaaccatagtatcttgaaccatttgtatctctaatcaaagaagcttacaaggctgctcataaccgtgagcacgactgatatatcggcttct

SEQ ID NO: 108023 - DNA, 472 bp, Zea mays
  Clone ID: MRT4577_30012C.1
gaaggacatgcgcataaatatggcaatatcagcagcatttgtatgtactcttctcttaattcataagaagacccagctattgctaacatgctcattgtttatggttattcacttgtatgtctcgtatatgcactgcagctttgcattattattcttgtcagaaaagctattttaagctatcagcttgaaactttttttttaaaaaaaagaaagcttgaaacatgtttggaagcttaaatcataagttcagatcatttaagtttggatttcatgttttgctagtcatttttaatctgtaaagttgttcagaaaaactacaacccgaatccaaaacagatataacttgttttcaccagatacaactttctccatagttctcttcaaaagggcaaacatgttatgaaattaaaataccaaaggcatttatctttttggaattgtgtatgcaatatagtcataagctcataacttg

SEQ ID NO: 108024 - DNA, 448 bp, Zea mays
  Clone ID: MRT4577_30013C.1
cgtgtaccaccgcgccctccggccgctgctgcactcgtcgtcgtcgcgctcgggcagccaggccacgcccgtggcgcccactgccgccgacatcaactaagcgactgctcgcttggctgctcgcggtgcagcaggagtgcgcgcagcttcgccgctcggaccagccgcagcgctgtccgcttgagccggagctgcggcactctcgcgggccagacgctggcatgctagccatgccactcctggcctgacccttcttcttgcgcttcgcacctttccgccttgcccacacgaacctctgacgaacctggcttcctttgcgcgcctcgctcctcctctcttacccctctcgcacgcccatcccatatcattccatccggcaccctcttccttccgaaaacgacatactttgctgcgctccacgagtcgaaatgaagccccgtcgtccttg

SEQ ID NO: 108025 - DNA, 221 bp, Zea mays
  Clone ID: MRT4577_30014C.1
ggtggtggtcggtggcctcgacatgatgcgcgaccgcaccgtcgactacgcgcaggactggcggccatgggcaagcccgtggagctcgtcgagttcgccggcaagccccacgggttctacctgcacgagccggggtccgaggccaccggcgagctgatcggactcgtcagccgattcctgcgcagttgcaaggcgcgcgcgggtgcttgattagcccggtg

SEQ ID NO: 108026 - DNA, 366 bp, Zea mays
  Clone ID: MRT4577_30015C.1
gtcggtcgttgctagccttcaactaactttccagagagcgagcggacgggggaggaggggcccggataggggcagcagtcgaattgagaagaactttcattctggtcaaggcggtgtaccgttcctgccctctccgacaaagctgagggagctcgaggctatactgactaaactcctacgctttatcgacttccagaacatgcacaatgccaattcttacgcatgctcaggaagtgctcccaagaatcaagactatgggttcaggatgaacacactagcagcagacgacgcaaaggacaagaattctcaatagcaggcatttgttgatactgctgattgcaaagcatcagatattgatggtcatga

SEQ ID NO: 108027 - DNA, 414 bp, Zea mays
  unsure (1)..(414): unsure at all n locations
  Clone ID: MRT4577_30016C.1
ccgggncccaggaggccagggnccncagncnannangnggaggcaggncgcaacggccaggccnaanncncnggcaagacgcgacaacnnnggncnganggccggggngcacgcncaganacgangcgcnncgcaggcngcggcngngaaagaaaccgaanccaggaggggggggagaagcancgggcccaaaccaaaacagancaaggaggangacgaggangcnaaccnggnanaccaagggccaanancancgaccanaaagaaagggaagcnncncncccgggccaccggcngccncnccgngncgcgggggccagnggnaacanacangacnncgccggacangaagggganccccaagggagcggnngcanccaccgncaannnccncagcgccacnacgacggcagc

SEQ ID NO: 108028 - DNA, 2289 bp, Zea mays
  Clone ID: MRT4577_30017C.1
tgggtacctcgaggccggccggggaacaccacccaaactaaacaacaccacgcttctctaaagatcacaatgatgagagccctggtggcggtgaccccgcccctcgcattgggcccctcgaggccggccggggcgtccctcgccccgtcgcgacttcgcgagtcgccccgtcccaggctcccagcgaccccgccctccggcagtccggcgcgggggctcctctccgatccggtgagccgaacgaggaccccaactccccgaagaaagcggccacagccagagccagggtggctcggctctcctctcacagactgcgccgcagcgcctagcgctcggctggcagccgccccggccggtcggccccgcccctgctgcctacatccgcctgcagccagaagatctgcctccagcgaccgccctgcctgcccttgtggcttctgtggttctgcacaccagcacacgcacttgtccccaaacaacggcggcggcgatgagtatctcagaagagcttcccggcgaaggatctgacggtgaggaggaggtcttcatcaacgaggaggacatcatccacgagataaccatcgacgaagaagatctccccgaccgcgacgacgaagatgacgacgtcgtcaacgggatgggtaggggtggattttgcttggagctgcagctttcagtctatgcgagtgtttctttatctgttttttccatttattcgccagttagcctcccagatagttcttgaggagattgatatattttttgttctgacatagtgtggaatgatttgtatattctagtgttatctaatgttcttgtatcacttattcgtttgacacgtgcctcctagcttggctgttctagacttccaatgatgcagtggcgaagctggaacaaaattgacgaggatgcatttggctttttgattccgaagacatcgatgattctacatacgcatttcaaggccaccaagatgaagtcttcattgtcgcctgcagtcctacagattcatcacttgtggcttctggaggcaaagatgataggggattcctgtggaggattggatcagaagagggtgccctggagctgactggacataaggatactgtcggcacagtggctttcagttcagatggaaatttgttggcttgtggaagttttgatgggcaaataaatgtgtggaatacagctacacgaactctcaagggaacccttgagggttccgggtcaggttttgagtggcttaaatggcattctcggggacatttgataatcgcaggatcagaggattgtaatgtatggatgtggaatgccgaccataatgccattctgaatacctttgctggacatagtaacacagtgacatgtggtgattttactccagatggtaaacttatatgcactggatcggatgatgcgtctttgaggatatgggacccaagaagtgcacaaagcagacatgttgttcgaggccatggctaccattctgatggattgacatgcttatcgatgacttcggattcacaaacggttgttagcggctccaaggacagttctgtgcacattgtgaatttaaactcgggccaggtcgttggctcattagcaggccacaccagttctattgagtgccttggtatctcgtcaagctatggctgggtagctacagggagcatggatcaaaagctgatcatctgggacctcacgcaccaatccagccgatgcatttgcgaacatgatgagggcgtgacatcactgacatggctaggttcgtcaaggtacgttgcgtcaggatgcattgacggcaaggtgcgcatctgggacagcctctctggagcctgcgccagggagttcagtgggcatgcagatgtagtacagtcgctggccatcactgctgacggcaacaccatggtctccgcctcatcagatggctccgcccgtgtgtttgacatctccatgttcaagtgaaggaaaccgggacggagtacatgtttatgctatggcttgattgtgatgcacgattgatcatggcatgccatggtaatatgcgattgtactactctgctcatggaaaaatcgtgcatttgtattgcatatgactccacttgtagtatctattacagcagaacaaaggatgtatttatatatattccgtttttcccctttggagagaaggaatcaattgtgatagcagtgatagaattcggacgggaattctgtctcaaaattatattaatatgagctagtttgggccaaaaaaaaaaaaaaaaaagaggccggccggacgcgtgg

SEQ ID NO: 108029 - DNA, 359 bp, Zea mays
  Clone ID: MRT4577_30018C.1
gggggaactgaacaacacgctattatttggggggggccaaacctcacataacagtacaaagggcaacacgatgaaccactcgctgctatcgcacaagaggctcacaaactcaataactgactacctaactccgcattacattccagcggctgtgtggcagggatcaaaacccaactccagtggcgctcagtggcaaatggcggaccttacaaaaacaagcatcgggtgccaaccgggctgatgatcgaatatgttttgactggcaccttttcagaacaaacggggcgtatgctgtcgcaatggtgaccggcggcaacttcaactttggggacagccctggcgctgctgggatgagtgcc

SEQ ID NO: 108030 - DNA, 537 bp, Zea mays
  unsure (1)..(537): unsure at all n locations
  Clone ID: MRT4577_30019C.1
tgttctgaattcgattttaattagaatttgttacgatcgattgatcgattgatcgattggcgagtgcatattcgatcgattcgtttgtgttcgtctcccggaatctaatctcgtctaattgattcacattctttcaatcgaacgatcgattcgattcttttgtttccgattcattcgatcttctgccaccgattcttttcaatcaattagttttcaatcgatcgctttgcaatgaatcgatcgattcttcttcttctttccttcgtttgtttgctcaaatcgattcaatcggttccgatcgattatctgttcgatgagatcaccaacttcgtttggagtgactttgcagcagatccactgtccaaatgtcaacctgaccttgatttaactaccgaacaattgattcgttaccatggtttcgattcggaagctcattccgtgatcaccagtgattgttacaatcttaccatttatcgaattgtggtaccaggagcagctgtttccgagtatcgaccggttctgattcaacacngactg

SEQ ID NO: 108031 - DNA, 855 bp, Zea mays
  Clone ID: MRT4577_3001C.1
ctgtgcgccgctcgagccggccgggtcgggataactcattacccgtagtatcaatcaattattataacctcccactccgacgcgcgatccggtctgtgaagatgagcgcgtatgcaccgccgacgggggaatggaccaccggcctctgtggctgcttcagcgactgcaagagctgttgcctgtcgttcttgtgcccgtgtatcccgttcggacaggtggcagaggtcttggacaagggcatgacatcctgtggtctggccggcctcctctactgtttgctgctgcatgccggggtggctgtggtcccgtgccactgcatctacacctgcacctaccgtcgcaagctccgggcggcgtacgacctgccgccggagccgtgcgccgattgctgcgtccacatgtggtgcgggccgtgcgccatctcccagatgtaccgggagctcaagaacagaggcgccgacccggccatgggatgggaagcgctctcgaaaaagacgactatggctcctgtaccaatgcaagacatgacgcgctgacgacagcaactcgatctcctagcaaaccaggattacatgttgcatatatgcacagtttgtgtgttatgtggctatgtcagcaagtaaatggagtctatgagtgggtaaaattaagtggatgtgttcgcgtcttagtaataagtgaataaaatttcgtaagtgttactaaaatatgtaaatagggtacatgtatgtttgtatcccattatgaactatttgtaataataactatatatacaaaagttgtggaattagcttgtagtaaaaaaaaaggaaaataagtgatacctataagaaaaaaaaaaaaaaaaaagcggcc

SEQ ID NO: 108032 - DNA, 706 bp, Zea mays
  unsure (1)..(706): unsure at all n locations
  Clone ID: MRT4577_30020C.1
gaacgaagagtggcgcagtggccatcgagactcgagagggagtggcggacgcgaggttgcaaggagatggcggacggcaagggaagggagaattcggccgtggcattgaagacctcgccgtcagtgccgatggctcggggattgcgcggcggtagtaaccctctggaggagtggagcggccgcgtaaaagcgattgaggccgggttccgtgcgtggatggcgaagcagcccatccacatcgaggccgcggtgtccacggccgttggggcggtgcagggcggggctctgggtgggctcatgggctcgctcacagccgacggagggtcgccgttccccatcccgcagccgccgtccaacgccaactcggatgccatggcgtcgttcaagcaggcccaggctctagctgctggacccttggtgcaagcccgaaactttgcagtcatgactggcgcaaatgcaggcatatcttgtgtcatgagaaggctacgaggacaagaggacatccagggcagcatgacagctgcttttggttcaggtgctcttttctccatagtgagcggaatgggaactcctaatccagttttanatgcaattacnactgggtgttgcttttgcagtattntcaggtggctntttcatgattgggcagaaattctcanagnccatcagtgaagatacatactactctctngacagagcatgctgc

SEQ ID NO: 108033 - DNA, 353 bp, Zea mays
  Clone ID: MRT4577_30021C.1
cgcctgcaggtaccggtccggaattaattcccgggtcgacgagctcactagtcggcggccgcccttttttttttttttttttgagaaaagtagttattccactaaattattggttgaaccgaacatgcaccactcatatagaggggcttggttcctcaaatcacacaacataaatgcacttgatgggcagagaaaaaaatcgcttctcaaaaaacataaaatttgggtttttaccaaaaaacgatgttcatcatgccccaaacttattgttttcgagagctagaccctactcattccattctggctgggcaagtcctgctgctcctaactttggggttggggaaaacatttta

SEQ ID NO: 108034 - DNA, 364 bp, Zea mays
  Clone ID: MRT4577_30022C.1
cttagtgttgtttttttttttttgtgctcaatctaaagtgaattaattttttggacgagactttgtacacagatgctttgacaacaagctaacaaatttttagcgtgccggcctgcctggagcacgaagcaccggaaataactacaaaaacgctccttatgggaggggaccacaacccccaaaaagtggtaggttaaaataccactccctggaaaatggggcggaggggcctgtacaagaaagtttttcctcacccccacagttattgaccttttggtggacagggaccccccctcagggaagaaaaaaaaaattggttgacaggaaaaaaaaatagaaacccccacgttcttaagggccctgc

SEQ ID NO: 108035 - DNA, 275 bp, Zea mays
  Clone ID: MRT4577_30023C.1
aattcggcacgagggaactttccgatgaactccagttttttaatagaaagtatatgtcgtggtttcggaaaccggggagacaatagatttgagtttggtggggaatacaggcacggactcacaccgaatggtgaatcacgagcatccaggctaaggagctgagacatagggagttatactggttcacgctagggccctagtccaatatagtgttgatcgatgtattgcttaggagcgtgttacaacaagtgtgcttgggtggacaaagaatgggg

SEQ ID NO: 108036 - DNA, 472 bp, Zea mays
  Clone ID: MRT4577_30024C.1
cctttcttgtacgttggggtgatgacagaaatggctacagtgaaacaatgcccgtttactattgcacacacacgaaagagctcaatcacaaggctctgttggcagctaccaaaactaaaaggcgttgccaagatgaactatattgctttaacatatattaatttaaccctgaatctttctagtacgatcaacaacatatcccggagataaagaatgggagatgggtgcattacaattgcatcggacatccacttggacctgtagagctcaaactacttctaactgaccgccatatttggagctaactaattatccacattatgagccaaaacctgctttctctgagatagcctgaacatgtataacatgaacatgatgaacgccatggtggccacatactgcgatgtaacaatgactcatgtgtgctagcagttagtaaccgacacgagggcatacacaatgatctctggtg

SEQ ID NO: 108037 - DNA, 344 bp, Zea mays
  unsure (1)..(344): unsure at all n locations
  Clone ID: MRT4577_30025C.1
ccactcgtccgacgaactccaaccagccctcttacattcgagctagcttatatcccggattacatctcctgatactatgggacggtttcaatgagttctgctgccttcttcaatcattatctagctaatatatgtagtgatggatatgctcacgcattcgctgattacacaaaagcaggtggttacaccatcccataatgaactgatagctgtaggagatggtcattcacgtaccatatctgatcctgcagctggtaactaccttatcagaccatttgatgaagctgnagatgaacccacttgagctagacccctttccatggtgcacatcaaattgattatat

SEQ ID NO: 108038 - DNA, 994 bp, Zea mays
  Clone ID: MRT4577_30026C.1
ccggccgggaatcttcacccccccccccctccctcgacctctctttcttgttgcacgcctgcctgggcgaaccgtcgccgctatacaccaggcgcccagggcttcgccggcgccgagtagccaccagctgccgctcaacattcacctctgccaagggcatggaccacatgacgatgctcggcgccggagccccccaccagctctccagggctgaaccaatgcctgaccgtaggtcaaggttctggcagacggatgtgcagcctgtgcctcggatagacatcatctgtcctctgccttgtcgcccttcccgctcactgctcctcaataggcccagccccaagcctaatggggcactcccattgtatggagcaaaccctacttatgatatcgttgatctcatccttagcaagaatgaccctgatgtggatactgattcaagcagccaggcggcctttttctgtggctcgcctcctgcccgcactaacaaccctgttatccatgacccacagtttggaaagaaagcaccatccttttctcctctaggaagctcttctggaaaaatggcagctggaagagctgaagtaggttctccgtcctgcaggtcgagcagcccaaaaatgagaatcgaaggttttgcttgcgggaacaaagagccccctcactgctttgcctgatgatccccattgaccctgcctaaccctgttttgctaccctgcaacctgtacattttcgctgcccagctgagagttcgtttcgttataagctgttaaactagctgagagtcccatgtgattgtggcttttgaaaattgcatgatccaaggggacggatgtaaataggtcgagttgtccggtgtatgtactagatgttgtatgcgtctggtaaatgtagtcatgctgggtgggtccatgtgtcggcgtctgtaaatacagccatgcatttggatgtgaaatttaaatgcgtcttcagttaaaaaaaaaaaaaaaaagcggcc

SEQ ID NO: 108039 - DNA, 149 bp, Zea mays
  Clone ID: MRT4577_30027C.1
atggggaaagtgcgcgcgcccgtaagctccgatcctgtatagtgggcgcgatgcgggcgtggggattgtgctgttcaaacctgccgatgagcgcgaccagacagcatgtcacgaggacacgaataagctcaatctccgcctgcagaagc

SEQ ID NO: 108040 - DNA, 206 bp, Zea mays
  Clone ID: MRT4577_30028C.1
gctgttttttttttttttttaggggggggttgtgcattgatttaccatgtgcgatacagtttccggggtcaataagagcaatactagtttgtggtgacagggggcggggtgggcatgcgtgagatcatgagcgaggcgacgcgtcaggtgcctttacgggaggcgtgcgtctagctttccacagcaaacaactggggggggggggg

SEQ ID NO: 108041 - DNA, 603 bp, Zea mays
  Clone ID: MRT4577_30029C.1
gttttttcaaagatggaaccgcccacctatggattctgttatggtccactcaggtggaagaggtggtttgcaggaatcacgatttatagaaaagctcgttaagaacgagcgccaggtagagggtcttccggacaattgcagtcgggttatggtctggaatttcaacctggaacctcctcgagtcaactaccccacaggctgggcactatataagaacctagaaccggacatgcctgtgacatagtttcctgccgctgccactgtgcctgcttctagaggtggtccagaactccacataggctgctcgtccatgccatcctgagcgagttgcgccaaagattacatggatactgcacgctgagatcttactcccttcccccgcgcgccttttagttttgtgtattcctgttatgccctttattttgtgtttctccttatattcaccagcagctagatacgccgtgtagactttcttttcatgtaggctcttctgttcttttcatactgtgtgtgttaccttactacagatgtataaaggctctcatacattgcagctgtttttaagaggaaaggcaaaaataccttcttgatagttgatacgtg

SEQ ID NO: 108042 - DNA, 474 bp, Zea mays
  unsure (1)..(474): unsure at all n locations
  Clone ID: MRT4577_3002C.1
cgttccttcgttgttccttccccggntccgatgactgttcatagncctgcctccgcgaccatatgcagatcggtgtccagggtgttgctgtggagtgcaaacgtatcgttcgggaatgagagggcttgcttcatgagcctcgaccattgtgctacgtggtcctgatgacgatgatatgttccactggaaggaccctgtcagtgggtcctcctgacaccccatatgttgtctgtgttttcttggagaacgttgttttcgcgtgagactaccccttcgagactccgaaggtatcttttaggagctgagtcttccgtccaaacttctgtagtaatggctgaatatgacttggctttcttacggttgaagggaggcctgctttagacaagccctatcggttcgttttctagtctgctccctgcttagtgatcccagcccacgacgaccctcttgagcctgacattgctctcgtgtcca

SEQ ID NO: 108043 - DNA, 213 bp, Zea mays
  unsure (1)..(213): unsure at all n locations
  Clone ID: MRT4577_30030C.1
accgttctctaattcccggggggacgccactcnttcttggtatagaaggtggtcagtctacaccataaaccttgaatcggagttcatacggggcggggtttatgaggggggggggggaaattttattatttatatgccttctccgccaaaggtttttattggtttggcgaatcctagtgatttggtctttggtgctggcaggtgcttgtggag

SEQ ID NO: 108044 - DNA, 2394 bp, Zea mays
  Clone ID: MRT4577_30031C.1
gccggccgggttgggataatcccaaatttctcgacgccgaccggcgacggcgaccgcccgcgatttgtttactcgtctcgctcacctccgcctccgcgaggagctcctttttctctatccaaccataccctcaccaactccccctgtctcggtttgcgtggagagagaaagggagggagcgagaagtcaagccggagccgggaacagctcaacaccacgggccgcggtttctgaaaaggagaggcgtggtgggaaggggagggggagcgggaggggggcgagccagccagagagccgtacgcgaagcaagcagccccctgcatctagatcaggcgttctgctcgcaccgccgccgccgccgccgccgcttccttctctcaccgacgctaattggagatcacgtctgggcctggctgctcgtcttccgtcctgggtacaattcgattgatgacctcatcagggaagaatgttttgcagtcttacatgagttaaagggatagaaagtgcaacaaccgtggaataaaggactcgtgcttttgagtaattcaggaggagtacatgcatcacgaagccttgattctggaatggtgtccagtcgaaggaacagtgggattatcctacgggaagggtcggttagggactggtccgagttcaacaatccctcgccgtccccaaaactgctgtactcacagtcctatgtcgcaatgagggggttgctggcctcagtgatctccttggactttttcctgctgtcgagcaagctaaaatctgtgtgcgcggctatgacttcccagaggcatagccgatcacaggagaggtcaaaatcaaaggggttgacctgcaggagagttgcagtccatctgctgttctttttcatggttggcattttcattgggttcatgcctttgttctctgtcgatgtttacaagaaaatagtatccgaaaacgagaggcttccgttccatgatggtgtgattgaggcggaaatgatgggcaccaaagttaaggagttggagacagttgtagtagagaaagaggtcgaactgattgacgagcctcaggttcaagagagccctccagttcctgcaatgttggatgatgaggcagattttgctgaatcttcacctgcattacctgctattgaagaatctgacattcctgtgaagaagctgctgataatcgtgacgatcacttctgttcggccacaacaggcatattacttgaatcggctagcccatgttttgaaagctgtacaggcacctcttttatggttggtggtggaatggcctgaacagtcctatgaaacagcagaaattctgaggtcttctggggttatgtacaggcatcttatatgtagaaagaataccacgagtgtacgaaagattgctgtatgtcaaaggaataatgcaatctatcatgtcaaaaggcatcaccttgatggtataatgcattttgctgatgaagagcggtcatactcagctgatgtatttgaagaaatgcagaagatcaggcgctttggctcatggcctgtagcaatccatgttggaacgaagtatagggcagttttggaaggccctatttgcaaaggaaaccgagtcatgggatggcacacagtccagacggttcagaagaagagttcgactcgtcgattcccaattggcttctctgcatttgctttcaacagcacaatgttgtgggaccctcaaagatggaaccgcccacctatggattctgttatggtccactcaggtggaagaggtggtttgcaggaatcacgatttatagaaaagctcgttaagaacgagcgccaggtagagggtcttccggacaattgcagtcgggttatggtctggaatttcaacctggaacctcctcgagtcaactaccccacaggctgggcactatataagaacctagaaccggacatgcctgtgacatagtttcctgccgctgccactgtgcctgcttctagaggtgatttctcccagcaaggcagagaagtttggagcacacgtctccagcgtattggtagttctaaatttcaactccctgctgttaccaggtggtccagaactccacataggctgctcgtcgatgccatcctgagcgagttgcgccaaagattacatggatactgcacgctgagatcttactcccttcccccgcgcgccttttagttttgtgtattcctgttatgccctttattttgtgtttctccttatattcaccagcagctagatacgccgtgtagactttcttttcatgtaggctcttctgttcttttcatactgtgtgtgttaccttactacagatgtataaaggctctcatacattgcagctgtttttaagaggaaaggcaaaaataccttcttgatagttgaagagattcaagcc

SEQ ID NO: 108045 - DNA, 113 bp, Zea mays
  Clone ID: MRT4577_30032C.1
tcagactcgcgaactccatttcgatgggagggaaattcaacccgggcgagtttcctccgactagcatcctatcacccttatggccaagaacaagatccgtatcaatgggttcg

SEQ ID NO: 108046 - DNA, 757 bp, Zea mays
  Clone ID: MRT4577_30033C.1
atcaaacggcagacggtgcaatcggaccagatagaacatgcttcttttttacacacaagcagggatctctggatcttcttccaaataatttttacacatagtacacaatatagtgtatatccttgcattattattatttgcttcaagagcttcattcttagctcctatcttggtttgcatggggcacatgtatcatacacatttacttttacaagctacacgtacgggaccatatatataaataagcacacgtaccattggacacacttcgctggtgcagcatccacacgtacgtacgggattcacaacactagtaagctgtgtttgtctaggaggagttgatgaccctgcacgtgtgcctgatctcaccatcgtcgccctccttgaggtcgagctgccccatcttgagcatcccctgctggaacgcgtagaagaagtagggctggttcatggcgaacatgttgacgatgcccctggtctccggcgactcgaacagcgtctggtcggagctgagcaggccgcgccgcatctgcagctcccggaagtagacggtgtcgaagctggtgctggtgcggtcgaacgttgccacgccggcgtccccgttggcggtgcaggtggcgccgagcgacgaccccagcgcggcgtccagcgtgtccgtctcggcgaggcggccttgaagttggcgcagtgcgcgacgcccagcgtgtggccgccggacagcgccaccatgtccggcggacgcggggcggacgcgggg

SEQ ID NO: 108047 - DNA, 401 bp, Zea mays
  Clone ID: MRT4577_30034C.1
gcactcatacttataacacaagcgtgatctgcattctgctttccggcatctgctacgtctaaggcttccgcgtctctatttcaccttcggaggccatactcacattcctagcttatcgttcatccatattatgactacacattctatcatctacactgactagtgttccaatctcactatgctaatcaccagatctaatctgacaacttttagcaacactcttaaataccatatttcaagtgtataacatctctgcatcaactaagctaaaataagttctatcgacaccaatcactgacacttctggcttcctatacaaaaacagattatagacaaactgccctctaaatggctcactattctatggcaatcacaacttaacgtctcaatgccaacttatc

SEQ ID NO: 108048 - DNA, 304 bp, Zea mays
  Clone ID: MRT4577_30035C.1
agaaaaaaataaaaaaaaaaaaaatataaataaaaaatggcggccgcactaaaaagatataagcttaaatactcttacataacaactctatagctcttcaataatatcaccggggattgggttcaattggcggtcgaaaaacaccgtctttaatcgggaaaatactcttcgttaacatatttaatcacctttcaacacgaccccctttcaacagctagcgtcataattttaaagcccgcacctatcaaacttcccagcattttctcagtctgactcttcaaagtgatgccccctttcacagcct

SEQ ID NO: 108049 - DNA, 739 bp, Zea mays
  unsure (1)..(739): unsure at all n locations
  Clone ID: MRT4577_30036C.1
cttcttccttctcgcgtttctcctccaaaataaaagaagctccttcggaggagcaacggtctcgcgcgggcaactagctacgctccaattcatttgagatataataattgtaatggacaaggagcaacagcgccatgacgagctccaggcgccgctgcttcccggcgacggcgggaaggccgccgccgcggccggaagcgcttacgcgctcgtctgctccctcgtcgcctccgccatctccgtcatctacggttacaatcgaggtgtgatgagcggggcgcagaagttcgtgcaggacgacctgggtatcagcgacgcgcagatcgaggtgctcatcggggccaccagcatctactccctcgtcggctcgctggccgcgggctgggcgtgcgactgcgccgggcgccgccgcactatggcgctctccgctgccatgttcttcgccggctccgcgatcaccagcgtcgcgggaggatacgcggtgctgatggccggacagctcgtcgccggtgttgcctgtgggttcggcctcgtcgtcgcgcccgtctacatcgccgagatggcgccggcggcgtcccgtggcttcctctcctccattccagagatcgcgggcaacacgggcattctgctcagctacatcgccgactccgcccttgccggcttccccaacaacgtcaactggcgcctaatgatcggcgtcggcgccgtcccgccgttatttctcgcggncgccacgctc

SEQ ID NO: 108050 - DNA, 160 bp, Zea mays
  Clone ID: MRT4577_30037C.1
cggtactaaaggtaactctggcttcaagtaaacaaaactgtcagtcacatttacagtgaaaaccctatttgacgatttgtacaactatacccgcgataaatctcatcatgcatcgttgataggaacacttttgctttacaatgttatggaggcacaaacc

SEQ ID NO: 108051 - DNA, 2054 bp, Zea mays
  Clone ID: MRT4577_30038C.1
gtggttcccctccgtggcggcgtggctggggttcgccgatccggcggctgcggggtcggcagcgcgcgccttgtccgctgaagtggtcgagttggtgtatcgggatttggccgctccgggggtcggcggcggcgcggcggcggaggggctcgagattgcggagcttgggatctcgtcgaagatcgtcgaaaggctcgccagcaagggcatcaccaagctgttccccatccagagagctgtccttgagccagcaatgcaaggaagggacatggttggccgtgccaaaactgggactggtaaaactttggcatttggaatccccataatggatgcaattatccgccacaacgagaagtacaagcctggtaagtttcccttggctattgttttggcgccaacaagagaacttgcaaaacaggttgagagggagttccttgattcctcccctttggaaacactatgtgtatatggtgggactccaattatgcagcaaataaggaaacttaattatggcgttgatgtggtcattgggacacctggacgtgtgattgatctgctaaaaagaggttctcttagtttggcagagatccgttttgttgttcttgatgaagcagaccagatgttgtctgttgggtttgatctagatgttgagacaattttggagagggtgcctccgcaacgtcagacattgatgttctctgcaacaatgccaacatggatacggaagctcacacagaagtacctcaacaatcctgtcacagttgaccttgttggtgaggatgaccagaagcttgctgaaggaattagtcttctcgctgtctcttcggagaaccgtgaaaaaccagctgtccttggggaattgattaaggaacatgccaaaggtggtaagtgcattgtttttacacaaacaaaaagggatgcagatagattgtcacacaatatgagtcgaagtttccagtgtgaggctcttcatggggatatctctcaatcccaaagagagagaacactggcaggatttcgagatgggaggtttaatatattgattgctactgatgtcgcttctcgtggattggatatcccaaatgtagatctggtgatacattttgaattgccaaattcgtcagagatattcgttcacagatctggccgaactggccgtgctgggaagaagggcactgcaattgtgatgtacaactatgatcaaagtagagctgtgcgggtcattgaacgtgacgtaggatgcaagtttacggagcttccaaaaattaatgttgagggatccgacttgctgggtggtggatttgactccttcgggggcggaggtggtgggtatggtggctcaaactatgggcgctcacgagggggctttggtggacgtggcggtggtggtggttttggccgatcaggcggtggaggatttggcaattctgggtttggccgctcaagtggtggatttggtgactcgggatttggccgctccgggggtggagggtttggtgactcaggatttggcaggtcaggtggtggcggaggattcagtgactcaggatttggccggtctggtggcagcggtggaggattcagtgattctggttcaggtcgtttcggtggcggttttggtagttctcgctcaggtagttttggtggctttggcgacaaggactcacgatagacctataactaataacagctatagaattatggacatcctgagccagattcagcttggtcatgcggtatatcacaaaggagatcgagattgttgcggaccctatccatgaacacctcggagagggcataaggctgggtgaggcgggtccttcgataggcaaaaataatcacgtgccttgtttattagtgttcttttctgttcgttttttcatttgcttctgcaagttctagctctagatcatacctgtaaaatatgcagaggtcttttgcggatgatattcttatatcgtttttggtagtcgcgctgtactgtaccgtgtgatgattatggagctgctttgtaggccgtttttaacctgatatgatgatcttgattattggcc

SEQ ID NO: 108052 - DNA, 1333 bp, Zea mays
  Clone ID: MRT4577_30039C.1
aagcgcgtcggggattgacctcgcctcctcttcctctctcaccggcaccgcccggcaacccggcttccaacggccgcgaccgaaacgggacccaccagacgcaattccccaacacgtccgcctcgacgaatttcgatcgtttccaacttgggatttccgccttccaatcgctccgtttccttcgtattctagaacctagcatttggtttgattccgccgcttggtccggccccgaggaggaggcaagggagggagcggtggccgcgcggccatggcgggctcgtctacggcggcgatggacgcagccgcggcctggtgggacgacgtgaacaactccacgctgtggcaggaccgcaccttccacgccctcgccgcgctctacggcatcgttgcagtcgtagccctagtccaactgataagaatcgagtgccgggttcctgagtatgggtggacaacgcagaaggtgttccatttcctaaacgtcattgtcaatggtgtgaggtcaaccgagtttgtactgcggcgggatgtgcaacttgtacaccctgagatacttcaacacgtgcttattgatttgccgggcctagcgttcttcacgacctacgctctgctagtgctcttctgggctgagatttactatcaggcacgtgcagtgtcgactgatgggctccggccagctttctatacaatcaatggaatgatctatgtcattcagatactactgtggctgctcatgtggtggaaaccagttcaagccgtggtaattttgtcaaagatgttctttgcagctacatccttgttcgctgcctttggtttccttctctatggagggaggttattcctgatgttgcagcgtttccctgttgagtcaaaaggccgccggaaaaaattgaatgaggttggctatgtgaccaccatttgctttggttgcttcttgatcagatgcataatgatgtgcttgagtgcttttaacaaagatgctgatcttgatgttctgaaccatccaatcctgaacttcttttactacctgctggccgagattgcaccctcatctttggtgctgttcatcttaaggaaactgccgccaaggcgtgggattgcacaataccatccaatccattagtttgtcttcaacaacatcctctatatccttttttttacagtttcttctaaaaaaatcacttcattctctctagcagcgtcctctatacttaaatacctatattagagacatattttgctctagattttgtatgtatgtatgtatgtatttgttatactcaagtattttatacatattttagttttgtttaatatgttgtttaaaaaaaaa

SEQ ID NO: 108053 - DNA, 372 bp, Zea mays
  Clone ID: MRT4577_3003C.1
ggaaaagcagggatagttgaaccatgtattatgcacatataggtaatagtttgagttccccttgcggaagtcttgctctgacagcgagtcagctagttttgctccactgcacaaaaaaaacctcttctagtggactataacctacaattccaattccaacttgaatacctctcaccgacacctgtacaggttgggtgcgtcatgggcggaagaatgtccatcgaacacccacacatttcccacaacaaaccatacagcgaagaaacagtccagagccatcttgaagtgatcagcaaaagcttaggccctacgggctgggcgtcccgctgaaccaaaaagtatggcgacgaaggagcgcccgagatcctggga

SEQ ID NO: 108054 - DNA, 553 bp, Zea mays
  Clone ID: MRT4577_30040C.1
gttgaacacaaatatttcatccagcagagaatcatataacttcaaaacatatatatacaaatcctttaacttaaaatccaaagcaaatcctataacttcatctcaaagtattaaacattaagaataattgaaaatgatagtatagcttcacatctagaactactatggctgcaggtcctatagtggtcaagcagacttaagatggagacacttggccacgattgaatcttaatagttgatgaaggatgctgttattttcttccattgacctcttcatactatcaatggtctcctgagatgcctgtgctgctacattagaggatctccagctcgacgaggccaagcgacacgagccccattgtaagcccaaacatgatccctgaaagggaccctgacaatccgaaacttggcagtcttcagcaagtacaaccaccatgtaacatcacagtgagggatgaattgctcatcctttaaaatgagcgaaattaccaattatagttattcctaaaatagtgtcactcgtttgtctttagataatttttgtgtttaaccc

SEQ ID NO: 108055 - DNA, 258 bp, Zea mays
  Clone ID: MRT4577_30041C.1
gatccgtatcgatttaagaagcggacggagctgtacattgccgacgagggcgttcacacgtaccagtttgtgtattgcggcaagaagtcgcagctcaacattggcaatgtgctacctgtgggcaccatgcctgagggtacaatcgtgtgctgcctggaggagaagcctggagaccgtgacaagctggcccgagcatcagggaactatgccaccgttatctcctacaaccctgagaccaagaagacccgtgtgaagctg

SEQ ID NO: 108056 - DNA, 1059 bp, Zea mays
  Clone ID: MRT4577_30042C.1
atggcgggctcgtctacggcggcgatggacgcagccgcggcctggtgggacgacgtgaacaactccacgctgtggcaggaccgcaccttccacgccctcgccgcgctctacggcatcgttgcagtcgtagccctagtccaactgataagaatcgagtgccgggttcctgagtatgggtggacaacgcagaaggtgttccatttcctaaacgtcattgtcaatggtgtgaggtcaaccgagtttgtactgcggcgggatgtgcaacttgtacaccctgagatacttcaacacgtgcttattgatttgccgggcctagcgttcttcacgacctacgctctgctagtgctcttctgggctgagatttactatcaggcacgtgcagtgtcgactgatgggctccggccagctttctatacaatcaatggaatgatctatgtcattcaggtgcacgatgtgacatacacacatatgtctagcagtaacgccaatgatactactgtggctgctcatgtggtggaaaccagttcaagccgtggtaattttgtcaaagatgttctttgcaggttgcagcactatgttttgcactgtaagagcaatgaacatttacaacatgaaatcgttgctggattgatggctctaatggagagtgatcacattggtcctttcaacttggaaaacccaggcgagtttaccatgttggagctagcacagagctacttttcagctacatccttgttcgctgcctttggtttccttctctatggagggaggttattcctgatgttgcagcgtttccctgttgagtcaaaaggccgccggaaaaaattgaatgaggttggctatgtgaccaccatttgctttggttgcttcttgatcagatgcataatgatgtgcttgagtgcttttaacaaagatgctgatcttgatgttctgaaccatccaatcctgaacttcttttactacctgctggccgagattgcaccctcatctttggtgcttttcatcttaaggaaactgccgccaaggcgtgggattgcacaataccatccaatccattag

SEQ ID NO: 108057 - DNA, 207 bp, Zea mays
  Clone ID: MRT4577_30043C.1
atgttggccgcccttttttttttttttttagggcatttgtcataggagttattgccgacctggaacaccgggacaaacaggcaggatcacatcagtgcctactaaatcgggatagggcttatttgaaaaccaagcgttgcggattggaggtaaagagacgggtactctaaaagggcggacaggcgttattgacgaccaccacggacg

SEQ ID NO: 108058 - DNA, 124 bp, Zea mays
  Clone ID: MRT4577_30044C.1
tctttgaagaccgacagagctgacatggcgcaggccatggtgagcaggaccgccctcttgcagggagggcggaccagcaggagccccgacagcagaaccaggccggacaacgatatcgtgagga

SEQ ID NO: 108059 - DNA, 645 bp, Zea mays
  Clone ID: MRT4577_30045C.1
ggccgctttttttttttttttttttggttttttttttttttttttttttttttttttttttttttttttttttttttttttttttttttaaccgggaacaatacctagcattatgaaattggccacatttagttaaacagcaggagcatcatgggtttacgggggggcatcacccagggcttatttacaaattgggccagatgcaaaggatttagcccgttggaaccgagcatttatttaccaagggtaattttaaacagggggaacataaggggccggcatcctattcaggcataggcagggaggggggggagttttttgggcgcagggcattggaaattatcctgggcaggggaaaggtttttttgggcaggcctggtcttttttagctttccattggggggtttttctagggccttatttgggttaaacaccttttccaattttttcctgagccttcgattttttttgacaaaggggggcagccggccaatgactaaagcagggaatagggggtttcccatgggggacccctcgagggggggtcgcgcaagaaggacctggtcggggggggggggagccccacgaccccgggagccgggggagctccccctcggggggggcccggggaatcttggccatgct

SEQ ID NO: 108060 - DNA, 180 bp, Zea mays
  Clone ID: MRT4577_30046C.1
ccttctaataatctttaacccgacagatccttatcgggatatgttccgtagagcgaagtaatggtataggaattttgtgatcaatgagactcggtaccacatcaagagatcaaattcacttagaaaattgctctgaactcctatttgccttgactgcaccaatggggcccgtggtgtaca

SEQ ID NO: 108061 - DNA, 590 bp, Zea mays
  Clone ID: MRT4577_30047C.1
tgggtacctcgatgccggcctcctgacgctgccgcctgctcttcacgaaagccctcttcggcggtcgctgctccagctcctccatctcctctgttcccacttcatcgccctcagcgatccctcctccatcctctacatcaacagaggtttggacgtcttcggtctccgccggcgacggactcgagcagccgctcgtcgagtgtccgccggaccgggccacggaggcgagtcagggagctgcggttgagggtggtggggctcctgaggccgcggcgtcttgcggaagaaggcgcggagagtcctcgggaatgtcttggagacggcggcagcgaacaagctggcggaggtgctcatggcgcggcgggcggaaagcgagtgaagcgggcaagcagaggcttctgagcggttttggtgagcgccaacggccgatcggataggcgagggaagcgatgacgtcgactggtccattcaagtcgattggtgacgtactgacgtgggaccgctgcatttgacaagctgtggcgcgacatgacgtggcataaacatcttccctgcttggctgttgggaaataaataaaaaaaaagcggcc

SEQ ID NO: 108062 - DNA, 249 bp, Zea mays
  Clone ID: MRT4577_30048C.1
cagacgcttgcgcggacgcaccggctgctcaagagctgggtatgtcgtatggggggatggccagcatctgaccgatcaggcaggactgggaacccttatgttcgcgctagaaggcacccaccagaccagcctacaatgctgacaaagccttcaacagctcgcgacgagcctgtgcactaatcgataccatgaagaaactcaacactgttacgaccaaagctgcattcagcggtacattcctcaacacca

SEQ ID NO: 108063 - DNA, 345 bp, Zea mays
  Clone ID: MRT4577_30049C.1
atattcgggatttgtcaagggaaagccaaactgcattgcttaacaaacacagggttgttgtcactacccaatttcacttaagaaaaatttgttcccatcttaaaaggagaaacaaaaggttttggactaggtaccaatttatgccacttgtcctttgttgggacatacaacaccaatattaccactggtacggaggatatgccaattcctaacccctaaatcatagctcgaattcattatccaactttagcgccttagctggagccttttttttcttatcattaatggcaaagtatgggttatgcaccttaggccggaacttggacccaaaaaaaacatataacg

SEQ ID NO: 108064 - DNA, 2335 bp, Zea mays
  Clone ID: MRT4577_3004C.1
cacacactggaagaggcccccaattttttcccttcccatccatgttttcaaatagtacacaattttgtttggcacttttgtgaaccgttggagcagatatcttcaaaacaggctgcagtcttcggtattcccctcgcgtcgcgtgattcgattggattccgttcccccgccccgttccgttccttcagcgccgctgccgctgccgctgcggctgcgccgaggccccagcgagtccccgaggcccgaccccaaaggctgcggcctgcggccgtcgcagtcccatcgattcctcccgcttggctttcccacccctcgaagccgaatccgatggttccacccgttgaccgcctccgccatcggaggccgcgccgcctcctccccgccttcttcctcggtccccgcgcccgcctcctcctatagatataccgcccgcgcatcgctccatggcggtcggcggcgacgacgacagcatggagcgggacttcgccgccaggctgcgcctcgcgcattcgccctccccggccacgcctgccgccgccgcctcatcctcccccaccgccgctggggggatcgccttccgcgcgccgcaggagcagttcaccgccgacgacttcgtactcggcaagatctacggcgtcggctcgtactccaaggtggtgcgggccaagaagaaggacactggtcgcgtctacgcgcttaagatcatggacaagaagttcatcaccaaggagaacaagatctcctacgtcaagatggagcgtattgtactcgaccagctcgaccaccctggcgtcatcaggctcttcttcactttccaggacacatactccctctacatggcgctcgagtcgtgcgaaggcggggagttattcgaccaaattgttcggaaaggtcggctctctgaggacgatgcacggttctatgctgctgaaattgttgatatattggagtacttgcatggccttggcctaattcatcgggatgtcaagccagaaaatctactgcttacttctgatgggcacatcaagattgctgactttggtagtgtgaagcctacaagggatactcctatcaaagttctcccaaattcaactactgaaagggcctgtacatttgttggaaccgctgcatatgtaccacctgaggtcctgaactctgccccagcaacctttggaaatgatttatgggcattgggatgcacactgtaccaaatgctttctggctcttcgccatttaaagatgctagtgagtggttaattttccagagaatcattgcaagggacctcaaatttccagagtatttttcagctgaagctagagatcttgttgacaaattgctggatgttgatccaggcaaaaggccaggtgcaggacctgatggttattcttccttgaaggagcatcctttcttcagaggcatagactggaagaacctgaggaagacacggccacctaagctcgcaatcgatgcaaatgtaaatgaagatgaggatagccaagattcaaattggttggcacacatgggaagtgtggcagtcaaccaacagtcaaatactgttggtaataatggtgccccgtcatcatctgaagtgcgctcccatatatctaaattagcttccatcgactcctttgactcaaaatggcaagaattcctggaccccggcgagtctgtagtcttaatatcaaagctgaagaagattaataagctagcaaacaagaagatccagttgatcctcactgacaaacctcaattgatctgtgttgacccttcaaaaatggtggccaagggaaacattatttggtctgatgacccaagtgaactcagtgtgcaagtatcagattcttcacattttagaatatgcacgccaaagaaggtgtcaacatttgaggatgcgaaacagcgtgcttggcaatggaagaaggcaattgaagacctccaacgctgccaaaggaattaattttcaattcaaatcaaaactctaaaatgtcgaattaggcactgttaatacatcatatccttttcacttgggaggaacatgagggggtttatttctcctgcatcctgctccaatgcctggttgcaaggaacttgctactcgctaattcacacactgaatgatggcccccaattttttcccttcccatccatgttttcaaatagtacacaattttgtttgtcacttttgtgaaccgttggagcagatatcttcaaaacaggctgcagtctggaaatattgacacaggaaactattttaacagtctgccatacttgattctctttgttgtcttttgttcaagagcatctatatcagagtaattctttggttttgcgaaa

SEQ ID NO: 108065 - DNA, 495 bp, Zea mays
  unsure (1)..(495): unsure at all n locations
  Clone ID: MRT4577_30050C.1
agaaggcacaggttggcacgtttattcaggatggtgtgattgttttacatctgtatacaacgtagcaagaagctcttctcgtctatgagaacatggacagagcccaccgtcttcctctatggtagaaaggggttctgagaggaacacagttccttttgccgttgatacgctcttgatgcgctgaaggcgccaaaagaaactgctgcaaacgttatgaggagaaacggggctttaaccaacgttctatttgatcttccgtggctagtcggaacaccagaacgcataacatgaacttccatcctactccctgatcttcttccgtccttcgaacaagaatatgcttctgcgatctcggaaggggagggcctggagtagggatggaagcccaggagctccatggcctcgctgctcctcatcgccccgtgccgaccccgtcccctgcggcggaagggaggcggagaaggggcagggcggggctctgcgcgtgncgtcacg

SEQ ID NO: 108066 - DNA, 361 bp, Zea mays
  Clone ID: MRT4577_30051C.1
cccacgcgttcgcccacgcgtccgcccacgcgtccgcccacgcgttcgcccaggcgtgggcccacgcgtccgcggacgcgtgggaagaagatagacggatcctcccggtgaacgaacatgtcgccaagagagtggatccacgacggagactacaccccggtaatcgtggtcatgattttcattgtgctgctcacagtcgcgttcgtgcttttctcccattattgctttgggtaccgtatcgttcatgctcactggatatgactttgaatgctatgtgatgctcaagtatctcatttgcgttgacagtgtcctttccaagcgggcacatcatgatataaagaattcaaacccttatgaggtt

SEQ ID NO: 108067 - DNA, 610 bp, Zea mays
  unsure (1)..(610): unsure at all n locations
  Clone ID: MRT4577_30052C.1
atcatacgagncggccgggaccgacgtgcgtgacgcctaccaagccccgccccgccccgcccccgcctcccttccgccgcaggagttgtggcctcggcacggggcgaatgaggagcnagcgaggccatgggagctcctggggcttccctccctactgcaggccttccccttccgaggtgaaggctgcgtatagaaggatggtgatggagtcccatcccgatcgtgtcccaacgcatctgaaatcgcaggctgagtcaaaattcaaggagatagatgcaaaccattcccgaattgtgtgacgtctgaattggatcgattgcacaaagtatcgtaacataattcctgagtcctgagcttactctttcctccaccgccattacaaaaccgtctgcttttgcaccttgcagatagcagaagcatattcttgtttgaaggacggaagaagatcagggagtaggatgggagttcatgttatgcgttctggtgttccgactagccacggaagatcaaatagaacgttggttaaagccccgtttctcctcataacgtttgcagcagtttcttttggcgccttcagcgcatcaagagcgtatctacggcaaaaggaact

SEQ ID NO: 108068 - DNA, 2131 bp, Zea mays
  Clone ID: MRT4577_30053C.1
agagctatttcgtcgcaagcacccgggcgtaggctcggaattcggctcgagaggaaaacaaataccttgcttggactcgctgccgtcgccgtcgccaactataaaccaccccaacccaaccctaccgtttcgccggcgaaaccggggctggcggcgtcggggaccatgggggagtacgcggcggtgaagacctcggtgtggtgggacatcgagaactgccatgtcccccgctcctgcgacccccacctcatcgcccagaacatgagctcggccgtcgccgccgccggctacaccggccccatcaccatctcagcctacggagacaccaactgcgttcctaaccacgtccagcacgctctctccagcaccggcatcgcgctcaaccacgtccccgcaggtatcaaagatgcaagtgataaaaagatcttagttgacatgttaatctgggctattgacaatcctccaccggcaaattatttgctaatttctggtgatcgggacttctcgaattcataagcgttgggacacgctagtgatgggtatacatcactattctactagacacagccttcacctccgaatgggtaggcctgctgcagcaaaacatgtttgggacctcgatggctggggaaccaccattggcagagtccccatacataagtagcataacaaatggcagtgtggaccattcaaatgcatcgaagaacatggattcagattcttcagttgcaactccacatagcagtactcaaggacagaatagcataccgtgtgatcagcaaaaaggtggtaacagcaaggcagacaaacaatctaaagttaggcaacctcggaaaaaccagtcagatgaagcttcagttgatgggctacctggtagtcctaaaggaagcactgctcccgagccaaatcaatctcagccttcatcatcctcactaccaagttctgatttgcaagatgagggtggggcacaggtggttcagctgaatacacaaaaaaaccagccatcttcccagcccaaaaagcctgtaaaatccactctttcccatcaaaagagtgttcctcatgacttttaccatggtaagaagcctggtgcgtcaactgactcttcatctaaaaacggtgctcctgaagtgactaacaatggtcgtccaagacaacagaaaccccaatcctcaaagcaaccaagacaacagaaaccagtgaaccatcgtcctcatggtggatcatctggcaattttcaatcatcaaactcacatagaagcaactcatgtccagctccagctgggcataatggtattcctactgcaccgatgcaattctggccaagcgggccaccttatcatggaccaccaatcaattatcctgatatggatcggttgaatatttctgaatatcctaggggtattcataataaccaaggtttgcatgccaactaccatccaaaccatcctggttacaatgattatagctacagacctccaactcgacctaacatgcctagcaacatgcaaaatattggacactggggagccaacccgggatgttcacagccatcttcagaccctcaagatcttgtaagatatatcttaggtgctttggaagttctgaagactgagaagattcccccaacagaacaatatataacagactgtatatgttatggtgatgctaatctaccaaaatttgatgttaagaaggcacttcaggttgccatgcagcatcaagcttgatgcgctgaaggcgccaaaagaaactgctgcaaacattatgagtagaaacggggctttaaccaacgttctatttgatcttccgtggctagttggaacaccagaacgcataacatgaacttccatcctactccctgatcttcttccgtccttcaaacaagaatatgcttctgctatctccttgaattttgactcagcctgcgatttcagatgcgttgggacacgatcaggatgggactccatcaccattcttctatacgcagccttcacctcggaaggggagggcctggagtagggagggaagcccaggagctccatggcctcgctgctcctcatcgccccgtgccgaccccgtctcctgcggcggggcgggggcgggggcgggcggggcggtgcggggcttg

SEQ ID NO: 108069 - DNA, 849 bp, Zea mays
  Clone ID: MRT4577_30054C.1
agaaggcacaggttggcacgtttattcaggatggtgtgattgttttacatctgtatacaacgtagcaagaagctcttctcgcctatgaacatggacagagcccaccgtcttcctctatggtagaaatgggttctgagaggaacacagttccttttgccgttgatacgctcttgatgcgctgaaggcgccaaaagaaactgctgcaaacattatgagtagaaacggggctttaaccaacgttctatttgatcttccgtggctagttggaacaccagaacgcataacatgaactgcgtgaacgatgatacatgtaattagctacaaacaaagattgtgtgaatcatgtccatcatggaatctagttcaccttccatcctactccctgatcttcttccgtccttcaaacaagaatatgcttctgctatctgcaaggtgcaaaagcagacggttttgtaatggcggtggaggaaagagtaagctcaggactcaggaattatgttacgatactttgcgcaatcgatccaattcagacgtcacacaattcgggaatggtttgcatctatctccttgaattttgactcagcctgcgatttcagatgcgttgggacacgatcaggatggaactccatcaccattcttctatacgcagccttcacctcggaaggggagggcctggagtagggagggaagcccaggagctccatggcctcgctgctcctcatcgccccgtgccgaccccgtctcctgcggcggggcgggggcgggggcgggcggggcggtgcggggcttggttaggcgtcacgcacgtcggggagaaggaccccggcccggccggctcgagcgccgcac

SEQ ID NO: 108070 - DNA, 442 bp, Zea mays
  Clone ID: MRT4577_30055C.1
aatgcttttgcacacacacaccaaaagacatacaggaattcttattcagcttatggtaccgggcaattcatgccttgttcattaatgcaacaggttcttcacgtaaatcatgctctaccccaattgatgtcaacaggttgggggcattgtcaaccagttcatcagcgagccagcgtaaagaatttaaatttcctcctagaaaggcagaagttagagaaatgtcaatgaagtcagagtttgagcgacgcatcaatgtgcaggcgatgaaactaagttctcatgaaataactaccattgctggacgtccggcgacctctactaattctcaggatgtgaaatctgctgttgctgcagttccttctagtaatgccagcgacagcatatgtaaacctgcagctggtccagtatcagcaccaccaccaccaccacgttcaggttattc

SEQ ID NO: 108071 - DNA, 294 bp, Zea mays
  Clone ID: MRT4577_30056C.1
atggcctccgtcgcatgttgtgcgagcgccgccgcgcctggtcttgctgatggattcaagttacaggcaagttgtgcccttgatcagttttctttacctaataatgtttctgttaattactgtgacatgctcaggagaaccacccgggaaaacagtgctaccactagggtggaatgggacgcccttggccaagtaattaggaaagctagggaaagattaccttacccagaaggggcaagcggggaggtgtcactgctagagtatagggaggtcctcaggtcgaactgtctgtaa

SEQ ID NO: 108072 - DNA, 1231 bp, Zea mays
  Clone ID: MRT4577_30057C.1
cattgggtacctcgaggccggccgggattaccaagcacccatcccttcaacaaacctcgagtcgagagagagaaagagagcagacaacaagagacaccaacgaacagaggcaaaccggctcacgcctgtctcggtgcggtggccggctaatcatggccaccgtggggcagtccggggccctgagaagggtcaccgtgcactacgccagctcgcccacgcgcggcgcggtggtagaggtgagcctcgacgacctcgacgacgagctgctccagtttgtgctcgccgatcttcttcccggccaggagggtttacaccagtcgatcttggaaggagcacacggcagcaaccaggagaactatatgagaggcgcaggatccagtgcgccgtcacaggaataccatgcacagagcagcaccgctgctgcggcagcagctgcttcgtccaggaggaatccaggcacggatgacgcccagatcgcctcggacttcgagtacgccacgaagctgcagcaggagatggagggcctcagcgtcgacgacgacggcgacggtatcagctgcgtgccgtctccgtccgactctgacgacgggcacgaccatcacgacgaagaggacgaggatgaggaggatggtaatggtggtggtgatgatgatgatgatccagacaacatgacttatgagcaaagacaggcacttgtagagtctgtggggtctgaggacagaggcttatccgacgagctcatctcctacctgcagccatggaagtacaaggcatcagggtttttctcccggaaaacaaaccatgacgactgccctatctgcctgtcaactttcaggaaccgagagactatgataacgttgccgtgcatgcatcactaccacgcagcttgcgtcaccaaatggctcagggtcaacaagacatgccctgtatgcaaatatgaactgttcggaccttgctagcatccgacaatgggctgataagacaaggtgatggggcgtcacactcacacccagctggttgcatcatctacttttttttgcaccaagaaaaaagaaaatgaaaaacaatccaaaaagagaagggaaaaaagttaggaagtgtagatcttgatcacacaagaaaaagaagaaaaaaaactgaaatttatgtcttttttatctttcctttggcttgtggaaatgtacgtaagtcacggtcttatatttgtttagaagcttgtttttttttcttc

SEQ ID NO: 108073 - DNA, 581 bp, Zea mays
  Clone ID: MRT4577_30058C.1
tgcggcgctcgagccggccgggccggggtcttctcacccgactgcgtgacgcctaaccaagccccgcaccgccccgcccccgcccccgcccccgcctcccttccgccgcaggggacggggtcggcacggggcgatgaggagcagcgaggccatggagctcctgggcttccatccctactccaggccctccccttccgaggtgaaggctgcgtatagaagaatggtgatggagtcccatcctgatcgtgtcccaacgcatctgaaatcgcaggctgagtcaaaattcaaggagatcgcagaagcatattcttgtttgaaggacggaagaagatcagggagtatgatggaaggagaactagattccatgatgaacatgattcacacgatctttgtttgtagctaattacatgtatcatcgctcacgcagttcatgttatgcgttctggtgtgccaactagccacggaagatcaaatagaacgttggttaaagccccgtttctactcataatgatggtagcaggtgcttttggcgccttctacgcatctagaacgtatcgtcgggaagaggaactgtgtacctc

SEQ ID NO: 108074 - DNA, 824 bp, Zea mays
  Clone ID: MRT4577_30059C.1
ccggccgggttcgccgttcgatgcctaccgctgcgcgagtcgtggatcattggtacctcgaggccccggccggaacggccggggtcctgactggtgaccgtctccaccgacgtgcgtgacgcctaaccaagccccgcaccgcccgcccccgcccccgcctcccttccgccgcaggagacggggtcggcacggggcgatgaggagcagcgaggccatggagctcctgggcttccctccctactccaggccctccccttccgaggtgaaggctgcgtatagaagaatggtgatggagtcccatcccgatcgtgtcccaacgcatctgaaatcgcaggctgagtcaaaattcaaggagatagcagaagcatattcttgtttgaaggacggaagaagatcagggagtaggatggaagttcatgttatgcgttctggtgttccgactagccacggaagatcaaatagaacgttggttaaagccccgtttctcctcataacgtttgcagcagtttcttttggcgccttcagcgcatcaagagcgtatcaacggcaaaaggaactgtgttcctctcagaacccctttctaccatagaggaagacggtgggctctgtccatgtctcataggcgagaagagcttcttgctacgttgtatacagatgtaaaacaatcacaccatcctgaataaacgtgccaacctgtgccttctaactttgttgtttcagactttcgaaacatgtaaaatcacttttgtattggtttcctgaaaaaaaaaaaaaacatccgtctggcttgttgctactataacgttctggtagattacacctac

SEQ ID NO: 108075 - DNA, 405 bp, Zea mays
  Clone ID: MRT4577_3005C.1
acccgcctctggggagcttcaactcccgatgtgtcatatcaggccgatacttgcgagcgtaccggcttatctaagaactagacgttctactgctggccataggcacctacgtagcccctgcctgtgataaatccagcttctgtcgcaactgcacactgcatacgagccggagccacatttagagaagtctgcgatgatttcactgaccactatcttaccataagcgctaatcgattactccacagtttaactatatgaaaccctgacattgccgtaccacttcatagagtaagatcaccactctaaggaccggcgacagcgctgctcgactacggcagtggttactacaatacacagtgtgactgtcagcaactgatcgtattttacactctgccattatatgag

SEQ ID NO: 108076 - DNA, 160 bp, Zea mays
  Clone ID: MRT4577_30060C.1
gtgtcgcgtgggttgaggaactttggattcgggggcattgtatggccagatcttggtgaggatgcatgggtcagactttggtgggaaggaattgaagatcatgcaacaaattgattgaagaccatacacttactctaattgtcaactcatggttggacat

SEQ ID NO: 108077 - DNA, 514 bp, Zea mays
  unsure (1)..(514): unsure at all n locations
  Clone ID: MRT4577_30061C.1
cccgcacgacggaggcggcgccggcgcggacggacacaanacanncacctcccaaccaccacacaccagaagcgaaggcgaaggcggaggcggaggagcggagggaggagaccccgagcaagccggaggcggagaagaagaagacgaacgacccgcggccggacnccctccgccgggagaggaagcgcaacaggcccttccacacgggttacgccatcaccggacccatcaccacgaagatgacgcccaactccaccgaggaggacctcaagaacaccaagaacgtccaggaacacaagaagaagcaccgacgaaccaggcgaaggagaaacgcacgcacggccagccagccccgacacgcccccgaacgaaaaaaccagacccctcggccccggcaccccaaacgaaaagcaagaacgcaaagccacacacgcaacgaaacaaaaggcaaacgaaatgaaccaacagcaaacaacccccgaccgaaaaaaaaaaaaaaaaaggcccccagggc

SEQ ID NO: 108078 - DNA, 365 bp, Zea mays
  Clone ID: MRT4577_30062C.1
aaataaaaaaacggtccgggactatctagccaggggaggggcaaaacttcctcactataaatacagacgaatacaagaacaccatcaaacataatctaataacaccggcggctctaatgaacgcaatcgcaaaccatgtccaagaaacaaaatcttgaagatctatcatagccttgactcaaaccatacgtacaaaaaggagattgaatcacacactctgcaccatatagcccaagactaaaaactcctcaaaagacttggccattgtaaacccacccatagctacgggaccagactggacccatgctgataaagtttacacacaccaaacatatgaaacaacatcctgacaaaaataactttgt

SEQ ID NO: 108079 - DNA, 300 bp, Zea mays
  Clone ID: MRT4577_30063C.1
cattcttcttcctccgcacataaaccataacattcttctccacctgtgtttctttccaagccaccatggcctccaagctgagtttcaagagggcagacagcatcgcggaaagcatgcccgatgcgctgaggcggagccggtaccagatgaagaaatgcttccataggtatgtttccaagggaaggaggctcttgaagaaccagcagctcatagaggagctggacaaatcactggatgacaagtcgagagggaaaagttgttgaaggctcctgggttacattattgttccacgcagaagca

SEQ ID NO: 108080 - DNA, 120 bp, Zea mays
  Clone ID: MRT4577_30064C.1
aacgataaatatgaatgggaccaaaccttcgatgcttttgtgcacatggtctgcattatattaaggagtggcatttgtactcgaactagaatcatatgcatgtctgcacttgttgcaccc

SEQ ID NO: 108081 - DNA, 1304 bp, Zea mays
  Clone ID: MRT4577_30065C.1
actcctatgggcgattgggtttctcgaggccggccgggaccggcgcatagcattctcttcccttcccttccctgagcaaagagaagtagccacaagcatgtctggcatcatcgacaagatccaggagacgctccacatcgggggcgaccacaaggaggagcacgagcacaagaagggcgaggagcaccacaagaagggcgaggagcaccacaagaaggacgacggggagcacaaggagggcatcgtggagaagatcaaggacaagatcaccggcgagcacggcgacaagtccggcgaccacaaggacaaagaccataaggagaagaaagataagaagaagaagaaagagaagaagcacggggaaggccatgaccatggtgatggtgacggcggccacagcagcagcagcagcgacagcgactgatctcgcctcgccgagcgccgtgcgcacatatgcgccgcgcaggttataatacgggctgtccgccgaacaccatgcatgcgcatatattatacagtactcgccaagattgttgttctgcaatcttctggataaaaaggttctttttttgttttcgtttgtctgtggttttcatctttgctggatggatctgaaggacgaagtcgatgttggattcacatgtatgcattgcttggaggatactcaccggatatcggtgctgatgtgatgatcaaaaaaacagtctcagagatagctagcatgtatgcgctgtttgccaggtaataattaatggtaatgcagaaatcgatctgcttgattgtgttgtgcctgaaaaaaaaaaaaaaaaaaaaaaaatctcgtgccgaattcggcacgagctcatcaagaagctgcgcaaggcgaaaaaggatgctcctgtcggcgagaagccagagccagtgaagacccatctccgcaacatgatcattgtccccgagatgattgggagcattgttggtgtctacaatggcaagaccttcaaccaggttgagatcaagcctgagatgattggccactatcttgcagagttctccatttcctacaagccggtcaagcacgggaggcccggtattggtgccactcactcctcgcggtttatccctctgaaatgagttgttacccagatctgtagcgtcccaagggtgtccagtggcattgccctttcagctttgctgcttgtttcgaacaagttacatacccaagacattttgttctgtttccagcactagatttcaaagctaagcattgcataactatgctgttttgttggaagtatgtgagtataatcttatctaatatgtga

SEQ ID NO: 108082 - DNA, 354 bp, Zea mays
  unsure (1)..(354): unsure at all n locations
  Clone ID: MRT4577_30066C.1
cccagcgtccgcccacgcgtccgcggacgcgtgggaggctttactcgcggtggatgtctttcaccgctagatggccagaggcatatcctgccaaccaagcagagcagccattttgattttggtctatgatacttttacctgcgcttgaagattcctatactcctcaagcagggccttcgttattttgccgttagattatttttactgcgtcggctgctattttcttttgcccaggtattaatcaatcatggacgggcatggtatgttgctgtgaaaaaaaaaaaaaaaaaaaaaaaaaaaaaaaaaaaaaaaaaaaaaaaanaaaannaaaannaaaanaaaanaaaaaanaaa

SEQ ID NO: 108083 - DNA, 296 bp, Zea mays
  Clone ID: MRT4577_30067C.1
gcatggacggggactacgagatgcctcccgccggcgtcgatgacatgatgggcgacgagcgagatgggcgacttcggcggcgacgagggcccggtgatgaaggtgggcgaggagaaggaggtcggcaaggaggggctcaagaagaagctgcctaaggagggcgagggctgggagactcccgcggtttcctttctttgccacccaaccttttttttggggggggggctctcccaccccacacccatattcttttactttatctttccctttttttctttctccttctttctttccct

SEQ ID NO: 108084 - DNA, 244 bp, Zea mays
  Clone ID: MRT4577_30068C.1
ggggacaaaagattggacttggggaaaatggaaacaatttccaaaccatattcgaaaggcacaagcctataaggcagtttttttaacaaaaaaagacattactatttaaactactcatggaacataatcttaaactcaagctgcggggaaagccttttttcctgcagcaacaaatccaactggaattacttttacaacaattaacctctacaaattttgatagggtccttcacttggccaaata

SEQ ID NO: 108085 - DNA, 332 bp, Zea mays
  Clone ID: MRT4577_30069C.1
gggctgggaaagatgtatcttgttattttccaaaattaacggtgggacattataatgcgaggggaattttcacatttggttgctttggggagcttgggagatacaaaaagcccgctcggtcaagaaaaaagatcgtaccggcaaatttatgttactttatacctcaaaaatgaggatcagcttccaaaggatttattggttgttcggggtgaggacatttattggaaaatgaggaggacccatctgggatcaacttgaagggggggggcccttctggacaaaacatccctgtttgggaaccttgtgggaaacaaggcttactttgcaaaaat

SEQ ID NO: 108086 - DNA, 391 bp, Zea mays
  Clone ID: MRT4577_3006C.1
aagtgtctggaaccccaccgacttcatcttgggtgcgggcgcttttgcattccacatggccggtggttgcaacgaggtgggaaagaagccaagcacacgggatcacttgtgcctcaccttccctgatggggctgctggtaatataaacggggtcgtggcagaatgttctgtaccacatgtacatggaggatgagagcttacgtgaggaaataaggatggactcctatgggctcttcatcatttgggttcataactctgccgattggcccactcacaaggcagtattgttccatatggcatgaatttctacaaaaacttcatcaagttgacggtagagagcggcattgtgccatttggaacaattaaccactgggacacgctctaagcactg

SEQ ID NO: 108087 - DNA, 441 bp, Zea mays
  Clone ID: MRT4577_30070C.1
tcggcacgccctcgcaagctcgctgtcggtacaacctagccgctgctccaccgcgcgtgtagctgctcgacgatatgcacaaccggctgcgtgtggtcatgctggtgttctgcgcagcgcttgcgcgacgccaccgatctgcgcagcgccttcgagtcgtcgtcgaaacccgcagtgagctccctgctgccccgtgctttttgtgttaaattaaaaggccgcaccaatgaatcacataataaattgtgtaatgattgtgtatatcgtttaatcgcagcccttgtcaacgtcacgccttgcgcatcgctcgtcggcaaagagcccaaactaatggcatgcatgcgcggcacgagtcggccaggttgttcgccttgaatgattcgtgattgttttatttacgtattttggtcgatgatgtgcgtgtgtgaatatgtgcgtgaa

SEQ ID NO: 108088 - DNA, 301 bp, Zea mays
  Clone ID: MRT4577_30071C.1
ggttgggccatcaaacacatcaagcggccgattgattcattaaaaccaaaactttattatgaccatgcatatattatggggcgggccacacatgaaaatgggggtcgtcttacggcgttattccataaatagatagggaggagaggaacgaggagattccccagacatcaagagaaaaagggaggggggaatggcagcaggtaaaccccaaaggggttggggcggcaggtgggcaagggggaccctggggggcggccccctatgggatgataacatagacctcgtaggaggcaatgggggg

SEQ ID NO: 108089 - DNA, 126 bp, Zea mays
  Clone ID: MRT4577_30072C.1
cagacacagggtctgtatgtaccgtgtgtgtgataactagggtggtaatggatcacgatccacattacgctaaattaggaccctgaataaatgttagttcaacaaataaataggaatatagtttga

SEQ ID NO: 108090 - DNA, 720 bp, Zea mays
  unsure (1)..(720): unsure at all n locations
  Clone ID: MRT4577_30073C.1
aatctaattcacagcgctcaagttctcgcgcccacggccaaatttttctccactcaatcgcggaataatctgcactgcagccatgtacgtcagcgtagtcggcatcaaggcgaagaagggggcggctggtcgcaaggctgtggtccccangaacaatcggtgtcatgcctcagtcaaggccgggctgcagttccccggcggtcggatcaggtcgctacctcaagaaggggcggtacgcgcagcgcgtgggcaccggggcccacgactatctcgtcgccgtgtttgagtacctcgtctgcgaggtgttggagttggacgataacgcggcgaaagacaacaacgagagacctagccatcgtctgcgcgcacacttatgctccgtgtgagatctctgaaccgactactgtaggctcaggcaagcttgcttgtcatggcagtcaccattcgctgctacgcgcgactgtaccttcgcccaaccatgcaaacccagcgatctccttgccacaagtaatcgtggcaggcgcataagcgctcacatacggcagtgcagcaagcgatgagcaactaccctaaaaaggacgccctgttctcatataaggcagctcaagtccccgaagagaggcttacatattagtcacttcactagcggtctgctgtagcatgatctcggacacatctgtgtgacttatgtgctgcagcctaattgcctcttttgcttgc

SEQ ID NO: 108091 - DNA, 568 bp, Zea mays
  unsure (1)..(568): unsure at all n locations
  Clone ID: MRT4577_30074C.1
cccagcgtccggnaaagaccggaacagccgcagtcccaccgaccccgccgccggtcgccctccatctcctcgacgattcctctcgtttctcttttcattaatcaagataacacatgatgtgagtgacggtggtggtcaaagatatgtggcccattttttcttgtgctctgcggagctgtaggccttcagacgcgaacctgagcaatagtatcctgtacattgcggagctatattaagcttatttgcgcgacgtagtgatgaattaaggagcatctgaatgtgcatcattttgtgtctgtcttttaacctatgataccgattggtcttgatctgtgtcttggatgctgctggggtgtaaagggtagttgagttgacgttgtgagatcgatcttatcttacctttacctaaagtgcgtgtgttactatggttgcaagtttactaccacgtgcttgcgatgagctaggtcttgtgttttgggacttgaattgaattacctggccgttatgtttagattgtcgtgtgtggtataaccctggattgttccaaatttattgccttgtagaacat

SEQ ID NO: 108092 - DNA, 573 bp, Zea mays
  Clone ID: MRT4577_30075C.1
tcttaatatgtctaataagcaatttagctcataatctgaaatataatgagggcatataacagtgtgtatccaagtattgtgctattatcaatgtataggactatttgccttttgctgtcaggtgttggtgcttatttggagttccaactacataaatgtttgtcgtcattatattcccttcctactctcagtaattcgttactacttactactaaggattgtccaatatgccatcaacatgtgatgttttccttgttctgtcacctaatatgcttaatcacagccctaaattattgatactgtacatcaaatatggtgctttttcatacttatgctgcacttcaccttggtgcataaaactaccaaatgcaaatttcatgctgtgtctcataaagctcacccaaatttctttatactgatgaatgatctaatttaaacttagaatttatgggaaacatgtttggtgtatcatcttaggatcttaatgaaaaaaactatgaattgagtatgtgcatttgctacttattatctatattaattctctcgagatcatgggcatattcatattttttt

SEQ ID NO: 108093 - DNA, 387 bp, Zea mays
  Clone ID: MRT4577_30076C.1
cattattacctttttttttttttttttttttggggggttttttatattttttgggggtttttccctatctctttttcaaccttttttttgttccttctattggcataaaaagcactaaaaggggtttaatttgccggggggcgccatacctctctgaacaaaaaaaaagtgttttttccggaagtcctttgttaaaaaccaaaaaaaaactggtccttacccccaaaggggccttcccagtttcggtaggggggaaagccccacgtaaagccctgaaaaaaaaaaatcggcccagggggccccaaaaacccacgggttatagggaggggatttttttccaattcctaggcccaaaaaggctgaaaaaaaaaaggagggagttttaaa

SEQ ID NO: 108094 - DNA, 555 bp, Zea mays
  unsure (1)..(555): unsure at all n locations
  Clone ID: MRT4577_30077C.1
ccacgcgtccgttcacgcgtccggctccaggtcggcctggcctgctgcgacgccgacgtcgaccggaggtgggacctcaagacggtcatcgcgcgcatcgacgagatccgggagcccgagcccgccgccgccgccgccgacgagtcgtcattatcgtcctaggcgagcacccgcgtgtgtacttgaccaagcaaatcccaccgatcgatgagcaagtcgtcgtgcgtgcgtgcctgaggtacctccgagacgaggatctacatacgcggcggccatgcgcatgaatgaaccgtcatcggttgcttatttggttcctcaatcaatcaacttaagtcggatgcgttggtggtcgactcatcgatctgccgatctggtgaacaaattaaagcgtttgagacgggatggatcatggtgattcggtttctgatatgctcatggnggaatttcgaccgtgtaaattggtgtagcttaataatctgccaaggaaaaagaggtgctagtttagtagtgtgtaaggggctttacattcgtctgtcttggaactgcgtttgattc

SEQ ID NO: 108095 - DNA, 260 bp, Zea mays
  Clone ID: MRT4577_30078C.1
attcactctccttgcgcttcctcgacggggggcgtgcccaccccgtgttcaccgacccatcccctactgctcgcacatggatcccatccatggcggagacaccgtcgccgacggtcagctcggccggtttgacgagcacgaccacctggagcaggcatccgtacactccctcgccggcgggaagaaaggcatcctatacggaggacgaggggccttgaccccgacctgagggaaccagcatgtgccacgattgatcacac

SEQ ID NO: 108096 - DNA, 418 bp, Zea mays
  Clone ID: MRT4577_30079C.1
tcgacccgaaccatggcctactctgatccatctgacactcttgcctcctcgtcatcttgggctccgccttcacctacgcccgccccctgatccggatcgaccacgccgaccacagatccctttcctgtccgtcggctcatcgtcagaccggccaccgatcctacatgcctcccaggccttcaagcagggaaggagccttacgagctgcatggatgatgctatactacaatgctggcgctactacgatgggccaaagcctgctaatctgcaagtctggaacatgactatgcatatattagatagcacgcgcttacgatttcttgctctcgctctacactgaggtttccttctgggactgcatctcccgcaagataagatactcattcagacctgagtggtcgtagcagtatactgcact

SEQ ID NO: 108097 - DNA, 280 bp, Zea mays
  Clone ID: MRT4577_3007C.1
acttgacagctaaacaacaaaacaagggcgggcgcccttttgtttctttctgtacatgtttctcgtttctccttccgggggccccctaaactgataccattgcccccttgggtctgtttcggggccagaccaactgaatattttcccttaccccctacctgtccgtgtttaaacgggggcccctgcctggggcgtgatcaaaaaaactttttatctacccacttctgggaaacaaaaaaaggggtggacccgcccttttttttggaacccaatttgggtg

SEQ ID NO: 108098 - DNA, 706 bp, Zea mays
  unsure (1)..(706): unsure at all n locations
  Clone ID: MRT4577_30080C.1
gtaccctccgagggcttcggccgggccgggnacacatattattaagtacgcaactagcaacatagcacaagcacacatagctgtcaccaactaatgagcacgccaaaatatctttgcttcacttatggctcctctggtgctttgtgcaagtgctgataccgcaacattttcccacaatgctcacacgctgctatagcttcctttgttgccccatacctctcaccagcggtgtgttaagtctgtgacaacccaattgttcaaccctacaggatccaacaggcagttgcagcaggcatcttacctttatcacccttgttcctccaacaaccgacaggcctattacagcagctacctttggtgcattagttgacacaaaacatcaaggcacaacaactacaacaacttgagctaggaaaccttgctggctactctgcagcaacagcaccctacttgcattcaaccaactggctgcattgaactctgctgcttatttgcaacaacaactaccattcagtcatatagctgctgactacccccagcaatttcttccattcaaccaagtggcaacattgaactctgctggttatttacaacagcaacaagctaccaccattcagggtgctggctgatgtgagccctattgccttgttgacacagcaacagctgttgccgatctacctgcacgctgcgcctaacgctgggaccc

SEQ ID NO: 108099 - DNA, 589 bp, Zea mays
  Clone ID: MRT4577_30081C.1
atcattgcttctcctttcatctcgccctccgtcttgcgcgcaagcggctcccctgtttcttcttcctccaactttcaatctcttctcgccgccatggcccctcacaagaaagggaaggggaaagcgaccgagccggggccgtcggtcccgccagggcccgggcccgcgctactgaagtctgtgatcctgaacgaggagggcttggacaaggtgcggccaatgatggccggcgcccgcaacgagaacggggcaacgaagatttggccgctgtcgcgccccgctgcccgtggggggcacgaccttcctgttcttcctccactccgtctttgtagggttgttgtcgccattctctgactttttcaatgccgtactcagccagtatcaaatccacgcacttcatctacatccgaactccgttctcctcctctccgtcttcgcctacctctgcgaggccttcctaggggtgatgccctcagtggactcctacggaagttcttcaggcttcggatgatagtggcggaccaatgctcggcctgcgtgtcgttccacatggtcgatggcatgggcgcgcacatcatcgatatgctga

SEQ ID NO: 108100 - DNA, 308 bp, Zea mays
  unsure (1)..(308): unsure at all n locations
  Clone ID: MRT4577_30082C.1
ggcagatcgatgagcgcacgcagctttcctgatgaggatgggaccaccgacgccgacggtgcgccccagcacggtgatgcatgacaccgacacgaagaggttcagccaccggtctggcaccttccacagtcccttggcatacagcttcagctctgccttgtgcacgcggtccaaccgtcattaccgctcttgatgcatagaagttctctggttattttttattgcaatattttcacaattcatggaagaacgnntncagttgtgatactttttacaaaagttgacagtgatgcgactattctattttt

SEQ ID NO: 108101 - DNA, 225 bp, Zea mays
  unsure (1)..(225): unsure at all n locations
  Clone ID: MRT4577_30083C.1
accactgctacccagaagacggtttataagccgtgggcgggggactgaaagacagcatngtctgctacactcaacatcataaccagcagcactgtatctgataatgctgaaggcaaagtgctttctatccttaaccgaaagttgactggaaagtcattccttgtaccaaccgaccatgtttctgttgttgatttgactaataagcttgagaagactgcaacctat

SEQ ID NO: 108102 - DNA, 270 bp, Zea mays
  unsure (1)..(270): unsure at all n locations
  Clone ID: MRT4577_30084C.1
cnnacgntngggcaaaagctgnnatanaaaancntcctgataanggtggaaacnctgnaaagnttaaagagcagtctcaagcttatgatgttcttagtgacncggngnagagggagatctatgaccagtatgganncgatgcccttaaggnagagnatggnatnaggcagcagcngtgatttccannagccctttcgacatttttgagcnactttttccgggtatctatcacctttnggggtggtattcaagaggacgcagacaaaagcg

SEQ ID NO: 108103 - DNA, 360 bp, Zea mays
  unsure (1)..(360): unsure at all n locations
  Clone ID: MRT4577_30085C.1
cctgccagtaggtatagtgactgcttcaacctctaagcctcgcgcgcgtgatcgtctactgcgcagcgcagcagacaccgccggggcagcccccgtcaacgcctaacgcgccaccggccaactcgacggcccaggcgccttccagccagcaacccaccgccggcgccccaagcgccgtcggcaggcaacccaccacccgtgcccaccgacacttcacctgcggtcccgaccactccgcccacggaccagaacactactgccccggctgccacaacggcgcccccggcgccgacaactatacctccggaccccaccacgacggctgcgtacgcaccggtgtcgncaccgaccgcttccacc

SEQ ID NO: 108104 - DNA, 163 bp, Zea mays
  Clone ID: MRT4577_30086C.1
gaacgtagaagaacggccagaggccaggctatggctgctgtccccgcgaagaaggcaacgtgcgaggagctccaaggccggactccagttgcccgtcggcaggattgccaggctcctcaaggcgggcagaatcactatagagagaatcaacatgtgggggggg

SEQ ID NO: 108105 - DNA, 285 bp, Zea mays
  Clone ID: MRT4577_30087C.1
cgcgccacacccttccgaataaggttttatccctttatcgaacttttctcagaaaaccaaaccaaaaccccttccgaaggtttattttttaacacgggcgagccttccccaaaccaaacccatggcgaccaacaccaaccgccgaaccaacggccaaaccttgttcgccggcccggccctggtcttgttcccctgaaactaggccctcgcaatttaccttccaaggggcaacacggcccccttccttttttatatggggtccttttctattttattttttttttt

SEQ ID NO: 108106 - DNA, 475 bp, Zea mays
  Clone ID: MRT4577_30088C.1
ggggcccaaaggggggggggcggattcgaggaaaaaataaaaccccaaacggggttaaacgggaaacaggggccaaaaaacccaaagccgcccaaattcacacagggggggaagcagggggtttcgaagacccaaaggggaaaaagggggggaggggggggaccaaaacgttaaaaagctacaggtaggccgggttttttagggggaaaaaaaaagaaaaaaaacccgccccgccttttaaaaaagcaaagcccgggtgggtttcccccttaaaatcccgggggggaaaaaaccggtaccggagggtttaataaattggccaaaaaaaccttgacaaaccccccgaaggtgaatggggcaatgccaaaaaagggggccccggggataaattaaaaaacccccttggggggaaacttttccccgggggggggaaaaaaggggggggaccccccccaaaaaaaaaaacccttctggc

SEQ ID NO: 108107 - DNA, 398 bp, Zea mays
  Clone ID: MRT4577_30089C.1
cttggatttgtaatttgtactacttcaattgggttatctggcctgctatttgatttaagatgtatgtaacagtgaactctataaatatttgacactgatgcttgcatgattaattactttaattccaattaatactgccacaacctattcacatatattttggctattagaataacaaaattctttttctttttaaaagaccagaataacaagaattattgaaattttatagcctagcttcatctctaggtaaagaagaaattgttaactaatagcaacctctgggtgagtgattaactaggacatgacctacatgtaagtgagtttgagaagaaatgattacctgttctgttcatgcaactactgaattcagaatttacatagaggagcaatttagt

SEQ ID NO: 108108 - DNA, 474 bp, Zea mays
  Clone ID: MRT4577_3008C.1
ggcccgaaaccctagctccctgctttcatccccgccaccgtccccatggcgccagggctcaaacgcttcaccgacgtcgccggagacggcacgccccgcctcgacgacgccgccggcgaggagctcatgtgcgtggagcgcgccgcctcggtcgccctcggcagccgcgcgccggagcccccgggaaccctcttcatcaccaccaggagggtgatttggctcagcgaggcggagaagggcaaaggatacgcggtggacttcctggacatcacgctccacgcagtgtcgcgcgacccggaggcgtacccctcgccgtgcctctacactcagattgaagccgaagctgactctgatgaagaggatggtgattttgactctgaagcaaatggtgactcacagctaccaaaaatctctgagatgcgtattatactggcagatgctgcccaactagattcactttttgatgccttctgc

SEQ ID NO: 108109 - DNA, 653 bp, Zea mays
  Clone ID: MRT4577_30090C.1
ctcgaggccggccgggattccgtctccgcactatccatattctgcttgctttgtgctctaagcagagagagatagatagagatctagtatagaggctagcaggtggtcctcgaacgaagatgctgcgcggagctcatggttgacgaggcagcaggcgccggcggacctgctggcggcgggcatccggacgccgtcagccacgatcatggccatccacctgccggggcgctctcctggacgcgtccgaatcggacgtgtccgagcagctacactaaccacggccacctcggctactcccacaccaaccaatggctcctccgccccagctggttcgcggccaacgacgaggtgctctgcctgttctatgcttggctggacaacctgggtcggctgactcagcaccacggactgtcaaggaagggagcctgcgacgggctcctccacatctaggactacgagacgctgcgcgaccgctctgccctacccggccagattcatggtcgcccatctcaccggctcctacgccttcggcctcttctacaagaccaccagactccctgctcgtctcatccgacccctatgacatggtgccgctcttctgctggatcaccgccgactgctgagtcaccttctccgacgacatcgacatgctc

SEQ ID NO: 108110 - DNA, 669 bp, Zea mays
  unsure (1)..(669): unsure at all n locations
  Clone ID: MRT4577_30091C.1
gaaagaactggaatctttggtgcatgttaagaagatcaaggaactagaagagcaattgcatggttcacaaaatgctatggcctcgcttaaggagaatgaagcagtggaaaacttggaggacatggatcgtcgcagtcctgatcttccatcattaatgatgcattctggaagcaaaatcagaagcaggtcactgcattaaatagctgctcaaaggccagaatgaacaatgctgcaaaaaacccaaggtccatcatggaacaaatacttcaaacaaattttttgggcacttgaacaggatctttcaccttcaaagatgtcagctgaacatgatggggaggctttaactgacctgaaggaagacttcaaaatgagcaagagggatgctgagttaagtcggtgtaatgctttcccagaactgattgatgtacttgcagtcaacaacatgcaaatgaaaagaagaaaaagaacaaagaccgtcagggttttggaagatgatttttccgataccaaagtgttcctgagccagataacacccagcttatgaccagtgagaaaagcatgtctggtaatcaattgggttctgggatgactaagaatcgctctgatacacccaccagaaacagngaccgtttcttggaatgtgctactgggaacatgatgcatcagact

SEQ ID NO: 108111 - DNA, 846 bp, Zea mays
  Clone ID: MRT4577_30092C.1
tcccttttcccctccttcccatctctttcccgctccaaatggcggattcacaggcggaggcgatgaaaaaggcgtacgccgggatcatgctcaacatggcgcaggagtcggcggcgcgggtgctggcggcggagcggcgagcggcggcgctagctgccgggctcgaggccgcgaaggaggacggcgtcgctacgctcctgcgggtcaaggccatcatggaagccaggataaaagagaaagaactggaatctttggtgcatgttaagaagatcaaggaactagaagagcaattgcatggttcacaaaatgttatgtcctcgcccccccccgagctgcagagggcaattactgaattagagctgacaaagaaaactttagctgatgaaagaataaatagccttcccacgtctaacaacgtttattataataaaaacggtagccctctttctaagatacatcaacaaggaggaaatatattgttgaagaataaaaagtttgctgacaaaagtgatgacactagccttgttccaatcaccgagaaggagaatgaagcagtggaaaacttggaggacatggatcgtcgcagtcctgatcttccatcattaatggtaaggaacaagaaaccaaagttctatcataatgggtgtacacagcgaatccatgcacttaaacagcagactcaaagtacagatgcattctggaagcaaaatcagaagcaggtcactgcattaaatagctgctcaaaggccagaatgaacaatgctgcaaaaaacccaaggtccatcatggaacaaatacttcaaacaaattttttgggtaagttcaagcgcatgagaagcagaagaa

SEQ ID NO: 108112 - DNA, 433 bp, Zea mays
  unsure (1)..(433): unsure at all n locations
  Clone ID: MRT4577_30093C.1
tccgtccgtcttcnntgaaatcagtagcagaaaagtatccatctcaaactttcttcaccnnntcgcaatgggagaaagggatgganntgactttcattannacgctgnnttcaagaatgggtganntgaggagaaacacatgtcccatggtaataccaatacgtatcatgtgttgcatcctctagtgtctgcatcctccccatatnctgtatgatgctcgttgaagaaagcaccnngttgcagaagaatgccagaataccaaagttattagtcattctgtactttactgcaatggttaccaagaactctgttgctgagggtactctcccagctttaaaactgaatattaagagagattcattccagaaaagacacnaatctgcaaagaaactaaggtctcagatgaaattcaggaaagtcaaaagggtctcat

SEQ ID NO: 108113 - DNA, 305 bp, Zea mays
  Clone ID: MRT4577_30094C.1
ttttccccctgcctatttttacctcacttcccaataccgagggcatcggcgagagcgacatcaggggatctaaatataaagcacggacggaaggatcagcgggacaggcgccggggaaaaccagaacggggagtggagggaaggatagctcgttgcgcaacggacggcgacggttgcattacaaccaaagaggtcggaaatgttagtgcaatcactggggcagaagccaacggaggggcatgtgccgacatgatcaacgagggctatgcggacgggaacagggcccacatccttacggggttccg

SEQ ID NO: 108114 - DNA, 851 bp, Zea mays
  Clone ID: MRT4577_30095C.1
ctgtatgtgatctctggtgttggtggcagcttgctgtcttctctatttatggtgtcaaatatggcagtcggtgcttgaggtgcattatttggactattgggctcaatgctgtcagagctcataacaaattggacgatatatgagaacaagtttgcagcactcttgactctagttatgatcattctcatcaacttagctgttgggatccttccacatgttgacaacttcgctcaccttggaggatttatgtcagggttctgtcttggttttgtgctgctaatgcgaccacagtttggatatattaaccaaaagaactctcctcttggatttcccatgggcgtaactaaacggaagttcaagacatatcaagtcatacttttggttatttctacaatgatactagtttctgggttcaccattggattggtgttgctatttcaagggttcaatgctagtgagcactgttcttggtgccattatatgagctgtgtgcctacttcaaagtggagttgcaacgcaccaaataactactgtatgtcttcacagctcggaaaccaactaaatctgacatgtgaaagcactggaaagaccgcatcatatgttctcagcgatccaaacaactcggaggcgattaaaaatctttgtgtcggtctttgcagttaatagtaatgtctgcattttctaacaggaaattaatgctagcatatctatggattatatgactagaagcctatgcttacattatgattctctggtaatgctattgcggcttctatggtattttcttcttgtgcatgctatgtactatgaatgtgagttggtggtttaaaaaatggacaatttgaggcact

SEQ ID NO: 108115 - DNA, 119 bp, Zea mays
  Clone ID: MRT4577_30096C.1
aattcgtagcaggaaagtgtgaccagacatattggatttatgtttcagtgcatgtacataaatccaattcgtagcaggaaagtgtgaccagacatatttgatcctggtgcttcattgtt

SEQ ID NO: 108116 - DNA, 123 bp, Zea mays
  Clone ID: MRT4577_30097C.1
gtaacccttcctggggaactccggtgtcgagcaactagagataggaggggtgccacatgaccatccctcccaaattcatgggcaggtgtgttaggggagggggcttaaaattgaatctcaaat

SEQ ID NO: 108117 - DNA, 212 bp, Zea mays
  Clone ID: MRT4577_30098C.1
gggttggtgttttttttttttttttttttttttttttatttttggggcacacaacatcatttttttcccacaaagaaactgggcaccaccacacagtgctttggcggggataaatggatccaatacatttagccaattaagttaaaaaaacacgttacttcatcacaggtcgatttggtttttgcaagaacgacaacgaccgtcatttcatc

SEQ ID NO: 108118 - DNA, 364 bp, Zea mays
  Clone ID: MRT4577_30099C.1
ggggtatgggtttttttttttttcccaaccccccgttccccagggaaaaaacaagggggctccccataccaccgtccaaaaacacccgcctcacgcctttaatccccaataaagaggggggcgggttaactcccccatccccccctaaaaattttggggggcctggatctttttgccaaaccgccaaatccggggcgaaacctgcccagaggaacccttgcggggggggggggctattacccggaacctaaactactcgccggggggggcgcccctcggggtccaaaacttcccccatcttccctttattgggttacacttagccccctgggtggccttcaccccaaaggtccccaattacccg

SEQ ID NO: 108119 - DNA, 392 bp, Zea mays
  Clone ID: MRT4577_3009C.1
atcgtggcgctcaagaaggtgcgcttcgacaacctcgagcccgagagcgtccgcttcatggcccgcgagatcctcatcctccgacgcctcgaccaccctaacgtcgtcaaactcgacggccttgtcacctcccgcatgtcctgcagcctctacctcgtcttcgagtacatggagcacgacctcgctggcctcgccgccagtcccgaaattaagttcaccgaaccacaggttaagtgctatatgcatcagctgctgtcgggtctggagcactgccacgaccggggggtgctgcaccgcgacatcaagggctcgaatctgctcctggacaacaatggcatgctgaagattgcagattttggtctcgcgtcgttcttcgacccagaccgtaaaca

SEQ ID NO: 108120 - DNA, 192 bp, Zea mays
  Clone ID: MRT4577_300C.1
tacaaattcactatctactttgctctcacattaacaccgactgaatggctttcaggccggagacaaattctatcgcactcttgtcatacaatagatcagaatccacatatcactggcatgcaaaatgtaactcaccagctgctttcagctagcatcttccatgatccacaagggtatgatgtctcgatcatg

SEQ ID NO: 108121 - DNA, 296 bp, Zea mays
  Clone ID: MRT4577_30100C.1
gaacacaagagattgcaacgatgcagtattggttcgagaacaaatgaccgacgagcggtttcatacatgagatcaagtgtttaatgagagggaacacaacaggtgatcactcggggccatccgtctcttcacctaatcatcaagcaagaccgatcacaaccgagacagacatcctcactcagattagagcccatggtatttagaccaaaaacacaaaccaggctaacaatggacggggaagagcaatatgttgaattagaggaactctgcaacaaaaagctcagagctgacattag

SEQ ID NO: 108122 - DNA, 270 bp, Zea mays
  Clone ID: MRT4577_30101C.1
cattctaagtttctagcatgatgttgttgcatgcaattatcctctgataatgttgcctgtatctttttacttgggcaggttgctcggctatatcccttggatcaaaaggacatgacgccagctcaccgaccaatagaatttggagttccaataccccatggtgggggaaggggagacatttgcaagagactacacacctccccaatatctaacactcctcctgaccgaccttggtgttctgacgccgtctgttgttagtgatgagctatt

SEQ ID NO: 108123 - DNA, 531 bp, Zea mays
  Clone ID: MRT4577_30102C.1
ggccgcttttttttttttttttttctttggttttttttttttttttttttttttttttttttttttttttttttttttttttttttttttttttttgttttttttgtttgttttactgtttgttcacaatatatgttttggggggaaacaaccacaagatggagaaaaaaaaaaactaagaacgggggggcccgccgatcctggggggggaaagaccaacagaaaaaaaacagctataaaaaacacgcacccccctaggagcagcaagcagagggaggtgtttgaaaacaagctcagcaagaaccccccccaaatgctttggagaagaactctgctacccgctgggccaaggggctcccccgcccccaccgaaaacatctgcccacacaaatctcgcgcggccgctgagagatagccacccccccgcgccgcctccggaacgcgcgagcgcagaaaggggcctctgatggaggcaccaggaacagggcaaaaggcaggggagcggacgacggcgaacaggaaaagaatgcg

SEQ ID NO: 108124 - DNA, 581 bp, Zea mays
  unsure (1)..(581): unsure at all n locations
  Clone ID: MRT4577_30103C.1
catcttccgtggggccccctttttttaacaccacaccgggaagagccactggaaccatcccccggcgcaggaggggaacaaaaacggcgccccagagcgggggggggcgacaaacgcggacccctcaaccgggaaccccccccagcgcaaaaaaaaaccccnncgcccgcccaatggggccccccccccccaaggggggggggcaaaaaaccccccccgggggaaaaagaggggggaaccaagcccccgcccggccggcacaaccccccccccccaaanncgccccccgggaaccccccaaaaaaaaaaacccccggcgggcactcccccccctgctgctggggggggtgttacacccccccctgggggggggccagccctcccttccaaggccccgggaatccccccccgnccccccgggggggggccaaacacgaccatccgcacaggaagccccccccnggaggagacccccgaaaacaaacccccaaaaaggntctcccccccgggcccccccccggcntctgctccggcaaaacaccgggcccgccggccggggggggaaaaaaacagcccaaaaa

SEQ ID NO: 108125 - DNA, 528 bp, Zea mays
  Clone ID: MRT4577_30104C.1
ctataggggattgggttcctcgaggccggccgggatggccggctcacatatgagccacgacgagttcttcgccaagctaggtgagctcttcgaccatcgcaagggcagcgactatggctctatctacctgagccagaagcgattcacctatggtcaagatattccccagccctcagaagaagaaccatcaccagacatcaaccctggcaagcctctacccctcattatcaaggcaacaaacggcaagggtaagagggaccgttccaaaaaggtcaaactgtccacggttgtgaaccccgaagatttggaggcattttacgtgcggtacgccgatgtgtgcaagacaggcatgacagccctgaagccgagagacaggagcaagaagaaggcgaaggcgaagaagaagaaggccgcagcatgatttgacttcaaagttatggggttccgcagattaagagataggggttatatgatcaattaatgaattattgtcctacacagaaaaaaaaaaaaaaaaaacccgcggcc

SEQ ID NO: 108126 - DNA, 247 bp, Zea mays
  Clone ID: MRT4577_30105C.1
gttaagagtaatcaaaggtcgggacataacagcggggtcgcagaaaaagaccacaaatttggggatccaaactagttgttagctaccgtacaaaaacgtctgacaccgaggcacttccacaggagtaccccaactccgacggggggccccaagatttcgaccggctgggggggcaaccgcgatcttgaacctagcagaagctggtggcggccgaacgcgcccttagggagcctggggcttaagtgca

SEQ ID NO: 108127 - DNA, 1551 bp, Zea mays
  Clone ID: MRT4577_30106C.1
gccaagcgcacgtccgcagccgacatactccaggcgtaccagctgtacatggccgccatctgcttcaagagagtcgtcttcgtgttctcgaataacaccatctacaatgccgctctgggcaagatgaagatacatatcgtcgattacgggatccattacggcttccagtggccgtgcttccttcgatggatagcggatagggagggcgggccaccggaggtgaggattactggcattgacctgccccagcctgggttccgccctactcagcgcattgaggagacagggcgccggctcagcaagtatgcccagcagtttggtgtgccattcaagtaccaggcgattgcagcatccaagatggagtccatccgcgtggaggatctgaatctcgatccagaggaggtgctcatcgtgaactgcctataccagtttaagaacttgatggatgagagcgttgtgattgaaagcccaagggacattgtgctcaataacatcagaaatatgcggcctcatacattcatacatgcaattgtgaatggctccttcagtgcgcctttcttcgtgacaaggttccgggaggctctgttcttctactcggccttgtttgatgcgctggacgcgaccaccccaagagacagcaaccagaggatgctgatcgaggagaacctcttcgggagggctgccctgaatgtcattgcgtgtgagggcacagaccgagtggagcgccctgagacgtacaagcaatggcaggtgcggaaccaacgagcaggcttgaagcagcagccattgaaccctgatgtcgtgcaggtagtgcggaacaaggtcaaggattgctaccacaaggactttgtgatcgatattgatcaccactggctcttgcagggatggaaaggccgcatcctctatgccatctcgacatgggtggcaaatgatgccccctcttacttttagctgtttttttgtgactcacttgtctacaactttaggggccagtttggtacggcgcgtgcggcgccacggcgcgcctaagctgcggcgcccgaatcggccgccacacctgcggcgggaaaactatggcgcgccgtggcggcttagtccacgcaccaaacaacccctaggtttaggtatgtcatctagatatatctagtgacaagcgtgttcttggcccagttaatagccatggttacttggactctgcagtatgcctagtgccctagtgagaattcaacatgtacctgttctttccaagggtacattcagcttctgtggaacatgagtgacacacgggggatccagaagtcagaaggcataccgaaatctgtcctttgatttaatgtggattatatagatgctcatcactcagtcatgctgttgcatggtgctaaatatgatctagatctaggtcctggtctggataatgctctccacagcatctgctgtgcgtgtgacctgtgatcagttcagtcagttgatcaggttgtaaatgacacttgttcctctgtttccggcgcttactgcgctgtttcagacttaaccatggctattatgaag

SEQ ID NO: 108128 - DNA, 456 bp, Zea mays
  Clone ID: MRT4577_30107C.1
ggaaagggttattttatattattttaaaaccaatccaaacagaggtggttcatgttatacaaacttatacaaaatacacccctgggggataaataatgattaaatcaccccctacttcctttggaaaaaaaaaattcaccaacctgacttgaatgctaacaacgccccaacacaatacttgaaggcaaacctttttaaattaattagcaaaacaacaacctgggatccatccttgtttttttacataaaaaaaaacccacccagcgcgacctggcttggccaatccataaactaaaaaaaacactctgatgcccaccggccttaataacggtttgcccgtacaaaaaaacattttgccaaaaaaacgggtaaaccttgaaacgtaagttcctggcttggactttaccaacttttttggtgttcacctgcttggggcctccccccgaacgatttaaa

SEQ ID NO: 108129 - DNA, 462 bp, Zea mays
  Clone ID: MRT4577_30108C.1
gcgacccgatcgaattctgcttccaagacaagaaagctggtaccatggtacggtggctgacgatcgctcgctgccggttccaagcattattggtgtactacatacataatagtacatgcttggattggattggcagtacatcaatacttcaataattgagaattgctaaacaaagggacgtcaggcatggatccccgatcaacagaacagatggcagattccgaaggccatgcaaaacgcatgtttgcccgtaaggtccatgtcaagatgccatagccacgagggcattccattggagttggggcagaagctaaaacatcgcaggcctaactactaaaacatattaccctcaacctttgacagtagtagagggcctgcccatctttacaagtgaaatcgctcaaatcgacttgtttgtctcgggacggccgacgcctctggaatgatcctacctctggcagt

SEQ ID NO: 108130 - DNA, 785 bp, Zea mays
  unsure (1)..(785): unsure at all n locations
  Clone ID: MRT4577_30109C.1
ccgcatcgnttgataattatgaactatctatcgtggtcaagtttagtggttcgtctcgaggcattggagtcacccaatttaacccagccaaccatcctcatcatataacccactagttttttctatacgagagtttgtttagagatgagcagtttaatactgatcaaatgcacttcaatgtgtatcattcaaatatgtatcgtacacactgtcgccagtattctagaaccatcttgagtagtggtttcttattgatccaaaaatataaccccttatcacgctaccgccatccccaccactgccgtctgacccaccggttaccctagccaaacccctccaacgtgcatcccctaccttatgtcagcatcacatatgtaggattcaatttctgtgttcttcctatggcgccgcatgagttagctaccctcttgcaaaatatataaattagattagattaatttttttcactttcgtcatgataaccagatcgagatccatctaattcgttgcaatatcttatcatcaaactaaaaatgatcatggccagtgatgaggtgtgaacttgcatgcatttgtcacaacatgtggcggagtaagagcaagacattacttttcaactccatcaccactcctaccacggtataagtgaggacaaaaataaggcatcgaagaacctatacaacgataaagttgacatgacgaccgccgaggaggagatcaacgagtagacactattcatttgagtcggacaatgaagtagcatcgtgtcatcaccatacaaggcg

SEQ ID NO: 108131 - DNA, 529 bp, Zea mays
  Clone ID: MRT4577_3010C.1
ggttggaacattggtttggtttttgccttccggacacccaccggatgggcaacccacaccccccccacccacaaaacccacccaccccccaacaccacccccagccaacaacccccccccgcggccggaccccggccccccacgcaacccccaccgccgacccagagccagagcccccggcaagcaagaaccggacgcagcaaccaccaccaacggacaccacccaccaccaaccccagcccaaagccccgccacaaaacccccccccccccacctgacgaagaaaaaacaacccagccccccccggaaacgagacccccccaccaccccgaaagggccaccgcacagcccccccccggaaacagggacccccggaaccctgagcccccgccccccccagcacctaaccccacccagggcgtcggagcagaagcaacccccccgaaacagcgcgagccaccagccccctgaacccacgggccaggccaccgcccacggaaagcccacccaaccggggaaccccaacccc

SEQ ID NO: 108132 - DNA, 454 bp, Zea mays
  Clone ID: MRT4577_30110C.1
cgccggcgctggggacggcctgaccgcgcatccagggctgcagagcccgcgctgagggcaaggccagagccgaccaaacctgtgccaaggacagggccgtcgcgctgcctgcaccggggccgggtctagaagccgcgcccgcctgacggcgtctcgccggaccttggccgaaccgcgcgcctataccgcgtcagggccgtccgccaggagagccgaggctgggggccgcgcccgaacgcgctgacggaccaccgtgcccaagatgtcgggccgtagctgggtggccgctcgcccgcaagggaagctcgcaccccaccgcggggaggctgaggagccgcgccggcgcgccgggcatataggccactgggacgccgagctgacaaagggcccgggggctgccagcctgtgacgagccgcttgagccgcgcccgcgcacgctagagagcccatcccg

SEQ ID NO: 108133 - DNA, 467 bp, Zea mays
  Clone ID: MRT4577_30111C.1
cctcattctcagctggtcgctcactcttgcagctccacccttcactcagtcttaggctcttagctctaggctctacctagccgcgtcactccttcgtgtagccatcatcagccttctcatcgccaccaatggccactgccgaggtccagaccccgaccgtcgtggcggccgcggaagcgccagagggggagaccccgccggcggccgtcgcgcccgaggagtctgcccccgccgaggccgccgctgacgctgaggctgaggctggtgctactgctggtcccgcggagctgtccgcgcgcgagaaactagcaggccacgcgcgcacggccgtcccttggggcctggcccctgagccccgggcgttgctgcgcacggccttactcgctggcctttttgggcttcctaagagcagcagctctccgcctcggcggccggctcctggggaccagcaggagcaggagcaggaa

SEQ ID NO: 108134 - DNA, 641 bp, Zea mays
  Clone ID: MRT4577_30112C.1
ccggccggggctttcccccgattgattctacgatttccagcagttttgtgttatcttctctctctcttttgggaaaaaaaggtggttcaattctgttgggcatcgactcaccgggttttgaggtttttcgtgggcggctttgatcctcggtcgatccgatctgtgtcaggctttcaccagatgttgcaaaatccgctcgcaaccatcagcgaacatgggaacccgcggcgtcgccctgctgctcctcgcggcggtgctgctcctccaggcgctcctcctcgcgtcgtcggagggcctggtgcgggtcgcgctgaagaagctgcccgtcgaccagaacggccgcgtcgccgcgcgcctctccgccgaggagaggcagcgcctcctcctccgcggcgccaacgccctgggctcaggcggcgacgacgactccgacgtcatcgcgctcaagaactacatgaacgcgcagtactttggggagatcggcgtcggctcgccgcagcagaagttcaccgtcatcttcgacaccggcagctccaacctctgggtgccgtcctccaagtgctacttctcgatcgcttgctacttccactcgcgctacaagtcagggcagtcaagcacttacaagaagaacggaaaacctg

SEQ ID NO: 108135 - DNA, 254 bp, Zea mays
  Clone ID: MRT4577_30113C.1
ctcgcgggccgatacaagcctctacactgacgtcgtactactacgtccaccaaatcgtctcttcaagcttacgagtacttctcaatggtggggaaaaagtggcactgttgatttcaagtactagtgggggcaccccaacggactgacactctagtcggtgcttgctgggaatggaagtgctacaaaagttgtccgacaatttatctgctcgcccgcaggatcatgacatcgggattgagacaatcattgtcttc

SEQ ID NO: 108136 - DNA, 380 bp, Zea mays
  Clone ID: MRT4577_30114C.1
tgttgctacctttctcttctgctgctcgccctcggttcctgatcgcgaccatgggaccccgcggcgtcgccctagcgctccttgccgcggcgctgctccaggccctcgcccccgcggcggcggcggcggcggcggcggcggggggcctggtgcgtgtcgcgctgaagaagcagcccgtcgaccagaacgcccgcgtcgccgcgcgcctctccgccgaggagaggcagcgcctcctgctccgcggcgccaacgccctgggctcggccggcggcgacaacaactccgacgtcatcgcgctcaagaactacatgaacgcgcagtactttggggagatccggcgtccggacgccgtcgcagaaggtcaccgggatctttgacac

SEQ ID NO: 108137 - DNA, 431 bp, Zea mays
  Clone ID: MRT4577_30115C.1
cccttgcttaagtagggcctcttgctttttctctcccctggcgggggggccccccgggggggggccaagggggccccggggcggggggggccgggggggcccgggcccgcggggggggccccccggcggaactttgcacagggggctttggggccgggggcggccccggcgctccccaaaaaaaaggcccggcccccgcccggggggggagtacgggccacaaggagccccgggacagcgccccccggggcccccggggcgcggggaacccacacctcggggtcccggggtccctcacccccgggagccaaaatcccccgggtaagtacccctttttttcccgaaacccggggaccatgcgcggccgggccgggcctcaatgcccccgggggcctcgccttcagggttcccccggcccgcgggggcgggcc

SEQ ID NO: 108138 - DNA, 857 bp, Zea mays
  Clone ID: MRT4577_30116C.1
cattgggtacctcgaggccggccaggagcgctttccccatcggcgaaggatctgttgtgcgatctaactaagtccccttcgaatctccccacggtctaggctaactccgccgctcgccgtcggccccgctttcggttgctgcagatcgcgaccatgggaccccgcggcgtcgccctagcgctccttgccgcggcgctgctccaggccctcgcccccgcgtcggcggcggcggcggcggggggcctggtgcgggtcgcgctgaagaagcagcccgtcgaccagaacgcccgcgtcgccgcgcgcctctccgccgaggagaggcagcgcctcctcctccgcggcgccaacgccctgggctcggccggcggcgacgacgactccgacgtcatcgcgctcaagaactacatgaacgcgcagtactttggggagatcggcgtcgggacgccgccacagaagttcaccgtcatcttcgacaccggcagctccaacctctgggtgccgtcctccaagtgctatttctcgatcgcttgctacttccactcgcgctacaagtcagggcagtcaagtacttataagaagaacggaaaacctgctgccattcaatatggaaccggtgcaattgctggttttttcagtgaggatagcgttaaattaggtgatctggatgtgaatgatcaggaatttattgaagctacaaaggagccaggccttaccttcatggttgcaaaatttgatggcattcttgggctaggctttcaggaaatatctgttgggaatgcaacacctgtgtggtataacatggtaaaacaaggtctcatcagtgaccctggtttctctttctggtttaacgacatgct

SEQ ID NO: 108139 - DNA, 695 bp, Zea mays
  unsure (1)..(695): unsure at all n locations
  Clone ID: MRT4577_30117C.1
agccttgactgcatccggcggtgtctgatgcgtgctgatctgcttgtttccgcgcgttcgtagttgtaatccgcctttgatcctcgatcgatccgatctgcgaggcttttattttagacgttgtaataaactccgcttgcaaccgcaccgaactaatcgcgccagtatcagttacttctaggagcagtcctcccgttgttccagccagcgctttccccatcggccaaggatctgtgcgatctaactaagtccccttcgaatctccccacggtctaggctaactccgtctccgccgctcgccgtcggccccgccttcggttgctgcagatcgcgaccatgggaccccgcggcgtcgccctagcgctcctcgcggcggcgctcctccaggccctcgcccccgcgtcggcggcggcggcggcggcggcggcggcggggggcctggtgcgggtcgcgctgaagaagcagcccgtcgaccagaacgcccgcgtcgccgcgcgcctctccgctgaggagaggcagcgcctcctcctccgcggcgccaacgccctgggctcgggcggcggcgacgacgacttcgacgtcatcgcgctcaataactacatgaacgcgcagtactttggggagatcggcgncgggacgccgccgcagaagttcaccgnnatnttcgacaccggcagctccaacctctgggtgcc

SEQ ID NO: 108140 - DNA, 976 bp, Zea mays
  Clone ID: MRT4577_30118C.1
aggcaagtctaggcaccggcagcggcagttgctggcacgttagttgctttgctcccccaccttctcttctgctgctgctcgccctcggtttctgatcgcgaccatgggaccccgcgccgtcgccctagcgctcctcgcggcggcgctgctccatgccctcgcccccgcgtcggcggcgggggggcctggtgcgggtcgcgctgaagaagcagccagtcgaccagaacgcccgcgtcgccgcgcgcctctccgccgaggagaggcagcgcctcctcctccgcggcgccaacgccctgggctcggccggcggcgacgacgactccgacgtcatcgcgctcaagaactacatgaacgcgcagtactttggggagatcggcgtcggggacgccgccgcagaagttcaccgtcatcttcgacaccggcagctccaacctctgggtgccgtcctccaagtgctacttctcgatcgcttgctacttccactcgcgctacaagtcagggcagtcaagtacttataagaagaacggaaaacctgctgccattcaatatggaaccggtgcaattgctggttttttcagtgaggatagcgttaaattaggtgatctggatgtgaatgatcaggaatttattgaagctacaaaggagccaggccttaccttcatggttgcaaaatttgatggcattcttgggctaggctttcaggaaatatctgttgggaatgcaacacctgtgtggtataacatggtaaagcaaggtctcatcagtgaccctgttttctctttctggtttaaccgacatgctggtgaaggagaaggtggtgaaattgtgtttggtggaatggattctagtcactacaagggtgatcacacctatgtcccagtcactcagaagggatactggcagtttaacatgggtgatgtcctggttgatggaaagtccactgggttttgtgctggtggttgtgcagcaatagcag

SEQ ID NO: 108141 - DNA, 1556 bp, Zea mays
  Clone ID: MRT4577_30119C.1
ctggccgggaaaaaaaactctctcttttgggaaaaaagggggttcaatcctgttgggcatcgactcaccgggttttgaggtttttcgtgggcggctttgatcctcggtcgatccgatctgtttcaggctttcaccagatgttgcaaaatccgttcgcaaccagcgttattatcagccggaaacagtccttttcttggttgtactgcgctttccccactgatgcatctgttcgatctaaccggccttcgctccgccttgggctgccgcagatcagcgaacatgggaacccgcggcgtcgccctgctgctcctcgcggcggtgctgctcctccaggcgctcctccccgcgtcgtcggagggcctggtgcgggtcgcgctgaagaagctgcccgtcgaccagaacggccgcgtcgccgcgcgcctctccgccgaggagaggcagcgcctcctcctccgcggcgccaacgccctgggctcaggcggcgacgacgactccgacgtcatcgcgctcaagaactacatgaacgcgcagtactttggggagatcggcgtcggctcgccgcagcagaagttcaccgtcatcttcgacaccggcagttccaacctctgggtgccgtcctccaagtgctacttctcgatcgcttgctacttccactcgcgctacaagtcagggcagtcaagcacttacaagaagaacggaaaacctgctgccatacgctatggaactggttccattgctggttttttcagtgaggatagcgttacattaggtgatctggttgtgaaggatcaggaatttattgaagctacaaaggagccagggcttaccttcatggttgcaaaatttgatggcattcttgggctaggctttcaagaaatctctgttgggaatgcaacaccagtgtggtataacatggtgaaacaaggtctcatcagcgaccctgttttctctttctggtttaccgacatgctgatgaaggagaaggtggtgaaattgtgtttggtggaatggattctagccactacaagggcgatcacacgtttgtcccagtcactcggaagggatactggcagttcaacatgggtgatgtcctggttgatggaaagtccactgggttttgtgccggtggctgtgcagccatcgcagattctggaacttccttgcttgctggccccacagccataattactgaaatcaatgataagaattgtgctgctggtgtagtcagccaggagtgcaagactgttgtttctcaatatggacagcagatcctagatcttttgctagctgagacacaaccaacgaagatctgttcccaggttggtctgtgcacttttgatggcactcatggtgtcagcgctggaattcggagcgtagtggatgatgaagctgggaaatcaaaagtgcacagaccaacctgggaacagatcttcgttggttgtgtctcagctagcaaaagatctaggatctgctgtccatattgagaaacaacagtcttgcactcctggctgactacaccagcagcaccaatcttttcattgatttcagtaattatg

SEQ ID NO: 108142 - DNA, 664 bp, Zea mays
  Clone ID: MRT4577_3011C.1
actcatctactgaaaatcaaacttgtttatcttcgtatattgtcttattgaggatactattacaggaagcagatctgaatgcaaagagaatacacaatctagtcctgatcaagacagtactgtaagaaagaccttcctgggactaggtgagagtggatcacagaattcttatatacttaccaagtttgcacttgacttacttcgtaatcgtctaaagagcatcaagcttgacaaggaagatgaacaactcgtgaagatgttggatccttttgttgaccttctgcggaagtgtatgagttcgaaacatgcaagtgtcctctcagtcacatttagatgttttgccttgttggtgaaacttccgttgccatctctgagggacaatgcaattactataaaaaatgtacttatggagattttacagagagctggaaactccaatggtcatttagtcacatcctgttttaagctacttgctgatctacttagaggattcaggatttcactttcagataatgagcttcagatgcttgttcatacccctatgtttgtagatcttcagacaaacccttcccctgttgccttatcgcttctcaaaacaatagtcaggctaaaattggtttctcacaacatttatgatatagttgttaagataggagagttgatg

SEQ ID NO: 108143 - DNA, 2006 bp, Zea mays
  Clone ID: MRT4577_30120C.1
ggaaaaaagggggttcaatcctgttgggcatcgactcaccgggttttgaggtttttcgtgggcggctttgatcctcggtcgatccgatctttgtcaggctttcaccagacgttgcaaaatccgctcgcaaccagcgttattatcagccggaaacagtccttttcttgatcagcgaacatgggaacccgcggcgtcgccctgctgctcctcgcggcggtgctgctcctccaggcgctcctccccgcgtcgtcggagggcctggtgcgggtcgcgctgaagaagctgcccgtcgaccagaacggccgcgtcgccgcgcgcctctccgccgaggagaggcagcgcctcctcctccgcggctccaacgctctgggctcaggcggcgacgacgactccgacgtcatcgcgctcaagaactacatgaacgcgcagtactttggggagatcggcgtcggctcgccgcagcagaagttcaccgtcatcttcgacaccggcagttccaacctctgggtgccgtcctccaagtgctacttctcgatcgcttgctacttccactcgcgctacaagtcagggcagtcaagcacttacaagaagaacggaaaacctgctgccattcgctatggaactggttccattgctggttttttcagtgaggatagcgttacattaggtgatctggttgtgaaggatcaggaatttattgaagctacaaaggagccagggcttaccttcatggttgcaaaatttgatggcattcttgggctaggctttcaagaaatctctgttgggaatgcaacaccagtgtggtataacatggtgaaacaaggtctcatcagcgaccctgttttctctttctggtttaaccgacatgctgatgaaggagaaggtggtgaaattgtgtttggtggaatggattctagccactacaagggcgatcacacgtttgtcccagtcactcggaagggatactggcagttcaacatgggtgatgtcctggttgatggaaagtccactgggttttgtgccggtggctgtgcagccatcgcagattctggaacttccttgcttgctggccccacagccataattactgaaatcaatgaaaagattggtgctgctggtgtagtcagccaggagtgcaagactgttgtttctcaatatggacagcagatcctagatcttttgctagctgagacacaaccaacgaagatctgttcccaggttggtctgtgcacttttgatggcactcatggtgtcagcgctggaattcggagcgtagtggatgatgaagctgggaaatcaaatggtggtctcaagagtgatccaatgtgcaatgcctgtgagatggctgtggtatggatgcagaaccaacttgcccagaacaagacacaggagctcatcctgaactacattaatcagctttgcgagcgtcttccgagtccgatgggagaatcagctgtggactgtggcagtcttgcgtccatgcctgacattgcgttcaccattggaggcaagaagttcaagctaagctgaaaccagagcagtacattctgaaggttggtgaaggacaggctgcccagtgcatcagcggattcacagctatggatatcccaccaccccgtggccctctctggatcttgggtgatgttttcatgggagtctaccacaccgtcttcgactatggcaagctgagggttggcttcgcagagtcgacctagggatatggtttggcagcaacccgtccagaggcaaacgcgtaatttgtgtgtttatgcgaccggcgatgtgtgtatatatgctactacatgtttagtcatgctttccgagacctgagacaacgcccgtctgttttaacgtggcgcaagaataattatggttctcgatgtattctccgtacacaaaggcgtgtctgatgcaatggtgccccaaaaaaaaaaaaaaaaaaaaaaaaaaaaaaaaaaaaaaaaaaaaaaaaaaaaaagaaaaatccgagggggagaaacggggtt

SEQ ID NO: 108144 - DNA, 783 bp, Zea mays
  Clone ID: MRT4577_30121C.1
cattgggtacctcgaggccggccgggatctcttgtctagtatttatcaattcatatctgctctacccgtttgtctgactgttgaatcccgtgagtcgatattcaccccgccaattccactttgcttttcaacagagcaaactctagctagaagacgtatctcaagcctcacacatttgacactcatcagcctaccaacatggcacccgagacgcagtcctcagccccgtctcaatgcgtcggtcctgagtaccgtccatctgctctgaagccaactgcaaccggctcgactcctatgcaaacagagcaatgtccacatcctgcctcaaagccctcagctggtagcactgctcactatgattcgcgaccgcaacacaggccgtgcagacttcatcttctacagcaatcgaatcattcgtcttctggtcgaggaaagtctcaaccaccttcccgtggaatcgcaagagatcactactcccgtaagccgcacttattcgggcgttaagttccaaggcaaaatatgcggtgtctctatcatgcgtgcgggagagtccatggagcaaggtttgagggattgctgcaagagtgtgcgcattggtaaaatcgcgatgccaagagatgaagagaccagcaaacccaagctgtactatgacaaatcgcctgaagacattagtgaccgatgggtactgcttctggatcccatgcttgctaccggtggttcggcgctcatggcaattgacgtgctcaagtcccgaagtgtaccagaaggacacatcctcttcct

SEQ ID NO: 108145 - DNA, 2018 bp, Zea mays
  Clone ID: MRT4577_30122C.1
ggttgcgatcataccagcactaaagcaccggatcccatcagaactccgaagttaagcgtgcttgggcgagagtagtactaggatgggtgacctcctcggaagtcctcgtgttgcattcctagttgctacctttctcttctgctgctcgccctcggtttctgatcgcgaccatgggaccccgcggcgtcgccctagcgctcctcgcggcggcgctcctccaggccctcgcccccgcgtcggcggcggcggcggcggcggcggcggcggggggcctggtgcgggtcgcgctgaaggagcagcccgtcgaccagaacgcccgcgtcgccgcgcgcctctccgctgaggagaggcagcgcctcctcctccgcggcgccaacgccctgggctcggccggcggcgacgacgactccgacgtcatcgcgctcaataactacatgaacgcgcagtactttggggagatcggcgtcgggacgccgccgcagaagttcaccgtcatcttcgacaccggcagctccaacctctgggtgccgtcctccaagtgctatttctcgatcgcttgctacttccactcgcgctacaagtcagggcagtcaagtacttataagaagaacggaaaacctgctgccattcaatatggaaccggtgcaattgctggttttttcagtgaggatagcgttaaattaggtgatctggatgtgaatgatcaggaatttattgaagctacaaaggagccaggccttaccttcatggttgcaaaatttgatggcattcttgggctaggctttcaggaaatatctgttgggaatgcaacacctgtgtggtataacatggtaaaacaaggtctcatcagtgaccctgttttctctttctggtttaaccgacatgctggtgaaggagaaggtggtgaaattgtgtttggtggaatggattctagtcactacaagggtgatcacacctatgtcccagtcactcagaagggatactggcagtttaatatgggtgatgtcctggttgatggaaagtccactgggttttgtgctggtggttgtgcagcaatagcagattctggaacttccttgcttgctggccccacagccattattactgaaatcaacgaaaagatcggtgctgctggtgtagtcagccaggagtgcaagactgttgtttctcaatacggacaacagatcctagatcttctgctagctgagacgcaaccagcgaagatctgttctcaggttggcctgtgcacttttgatggcactcacggtgttagcactggaattcgtagcgtagtggatgacaaagctgggaaatcaaatggtggtctcaagagtgatccaatgtgcaatgcctgtgagatggctgtggtatggatgcagaaccaactggcccagaacaagacacaggagctcatcctgacctacattaatcagctttgtgagcgtcttccttctcccatgggagaatcagccgtggactgtgccagtcttgggtccatgcccgacattgcgttcaccattggaggcaagaagttcaagctgaaaccggagcagtacattctgaaggtcggtgaaggacaagctgcccagtgcatcagtggattcacagctatggacatcccaccacctcgtggccccctctggatcctgggcgatgttttcatgggagtctaccacaccgtcttcgattacggcaagctgagggttggcttcgcggagtcggcctaaggaacgtatggtttggcgcctcctccagaggaggcaaaacgcatgcgccgagagaaaagcttcgcttgtttttaacttgtgtatttatgcggccggcggtgtgtgtgtatatatatgctacatgtttagtgatgctttccgagacctgagacaatgcccgtctgttttaacctggcacaaggaaatttctcgatgtgtttgccaagccaatcttgtacccaattgtcaccgtgcatcctggcaacgtgtactcaaagtatttttccttgtgttatgcgtgagatctggctg

SEQ ID NO: 108146 - DNA, 1951 bp, Zea mays
  Clone ID: MRT4577_30123C.1
atcctcaccaaacggtcggtcgacctcacacgtcccccggatccgacggccaacagtgcgcgtggcccctctccgccggcacctctgtacaaaatacccgccccaccaggccaccaccacgccgaatccgccctctagtgactagttcacgtcagttgctgctccccccaccttctcctcctgctcctgccctcggtttctgatcagcgaacatgggaacccgcggcgtcgccctgctgctcctcgcggcggtgctgctcctccaggcgctcctccccgcgtcgtcggagggcctggtgcgggtcgcgctgaagaagcagcccgtcgaccagaacggccgcgtcgccgcgcgcctctccgccgaggagaggcagcgcctcctcctccgcggcgccaacgccctgggctcaggcggcgacgacgactccgacgtcatcgcgctcaagaactacatgaacgcgcagtactttggggagatcggcgtcggctcgccgcagcagaagttcaccgtcatcttcgacaccggcagttccaacctctgggtgccgtcctccaagtgctacttctcgatcgcttgctacttccactcgcgctacaagtcagggcagtcaagcacttacaagaagaacggaaaacctgctgccatacgctatggaactggttccattgctggttttttcagtgaggatagcgttacattaggtgatctggttgtgaaggatcaggaatttattgaagctacaaaggagccagggcttaccttcatggttgcaaaatttgatggcattcttgggctaggctttcaagaaatctctgttgggaatgcaacaccagtgtggtataacatggtgaaacaaggtctcatcagcgaccctgttttctctttctggtttaaccgacatgctgatgaaggagaaggtggtgaaattgtgtttggtggaatggattctagccactacaagggtgatcacacgtttgtcccagtcactcagaagggatactggcagtttaacatgggtgatgtcctggttgatggagtgtccactgggttttgtgctggcggttgtgcagcaattgcagattctggaacttccttgcttgctgggcccacagccataattactgaaatcaatgaaaagattggtgctgctggtgtagtcagccaggagtgcaagactgttgtttctcaatatggacaacagatcctagatcttttactagctgagacacaaccagcgaaggtctgttctcaggttggtctgtgcacttttgatggcactcatggtgttagcgctggaattcggagcgtagtggatgatgaagctgggaaatcaaatggtggtctcaagagtgatccaatgtgcaatgcctgtgagatggctgtggtatggatgcagaaccaacttgcccagaacaagacacaggagctcatcctgaactacattaatcagctttgcgagcgtcttccgagtccaatgggagaatcagccgtggactgtggcagtcttgcgtccatgcctgacattgcgttcaccattggaggcaataagttcaagctgaaaccagagcagtacattctgaaggttggtgaaggacaggctgcccagtgcatcagcggattcacagctatggatatcccaccaccccgtggccctctctggatcttgggtgatgttttcatgggagtctaccacaccgtcttcgactatggcaagctgagggttggcttcgcagagtcggcctagggatatggtttggcagcaacccgtccagaggcaaacgcgtaatttgtgtgtttatgcggccggcgatgtgtgtatatatgctactacatgtttagtgatgctttccgagacctgagacaacgcccgtctgttttaacgtggcgcaagaataattctggttctgcaaaaaaaaaaaaaaaaaaaaaaaaaaaaaaaaaaaagcggcc

SEQ ID NO: 108147 - DNA, 538 bp, Zea mays
  unsure (1)..(538): unsure at all n locations
  Clone ID: MRT4577_30124C.1
gccgggccggggccgttcactgatattttcctccacctgcgtgccatccttatctctcctgcgcggtcttcttttccctgctcagattttctttcccagcggctttatctgcacgtgcatagcttgctccagctcggtgtcctcctctgccgcggcttcctccagctcgtcttccacctccgtccgtcacctcgccctcggcgctcgcccctgatgcctgcgctcggctctacccgtcttcctttgccgcacgccatacgcccagccgagcggttcttccccacagcgcgcccttctccccatcgcgacgctccggttctgctcatccatggcggctccagctcctgcgcccggctggatctcccctcggctcgccgcacccctcagctgcctactctgcttgccgcacgcgctctccctgctgctgctattccccggcgcgttcctgctccagctccggtgccgcggagctcccgcgcgcgagtccctctgatggccgtcgcgctccctagtgggtgagntgcccgggctccctctc

SEQ ID NO: 108148 - DNA, 337 bp, Zea mays
  Clone ID: MRT4577_30125C.1
gttgggccccttctcggcgttccagcacgtggagctgttgccggtcgccgctggggaggttgcgccgctgcggctcatctgctgctcggttagtatcgtgcgtccgaagagcactagccccgccggcttggcgtcgggcttctgcctgttggcacccgtcgacggaggagcgcacgggaagtcgtcgtcgtcgtcgtcgcgcgccgccgccgccgcgcctccgatggtcaggtccgtgctgactcttgccgggatcggggtcgtcggaccgacatggtcgggacggcggagcctggggtacagcaggctcggctgcaagtgggtgaggtggagttct

SEQ ID NO: 108149 - DNA, 378 bp, Zea mays
  Clone ID: MRT4577_30126C.1
caaattaccggccttgatcactccaattcaatgacgcatgttgttgaagccgcccgcgtgcagtacgcgattaatagagggccattgatgttttcataagtcttccaacgacttcaaaatgatgccacggcatcactccagcggattttccaatggatatccgcgcgccgacaccttcgagatttccccccatagattccaaccgagagctaccgtccctcttcacaaaaagcgtaagaggactgcgatccgtatcggtatcgtggtggccatcattgtccttctcatattctggtttggacagcccaaatccgtcgcttctctgatctcgctcggcattttatccggatatgaggacttgaaacttgaaacggtgcg

SEQ ID NO: 108150 - DNA, 530 bp, Zea mays
  Clone ID: MRT4577_30127C.1
ttgggtacccctcgaggtgccggccggggccgagttctgtagcgagagcttgtaacccgagcgggggcattaaggtggtgtggatgctttgcgatggctttctgggcctgggctcggtatgtgccactggccggcctgcccgtcccaagttggtagtggctggtgggggctctagcgaaagcttgggtctctccagacctgaagcggcaggaatggcgtgaggctggcttcacagagcagcgatcactgcccgcttccaacggtgggaggataacaggccgctgcacttcgagcccaactcaggcccagagcctcactaagcagaccaccatctttttttaaaaaaaaaaaaaaaaaaaaaaaaaaaaaaaaaaaaaaattatttttgcatgtttctatgcgtttcacaactgatttacctttgttactcaatcctatcattaatcttctctttcgttgttgatactgtttgttggtgggatggagaaaaaaagattatattttttgaaaaaaaaaaaaaaaaagcggcc

SEQ ID NO: 108151 - DNA, 660 bp, Zea mays
  Clone ID: MRT4577_30128C.1
cccagcgtccgccccgcgtgcgtccagcgtccgcccacgcgtccggtgaagagccagccaaagcgcccaagctacgaaacgccaactcgtcaagaaccccagttgttgcccggccgcgcagccatgaggtggggacttagaagcagctgtaagcaacggcacaaggaatccctgcaaccactggagcaagagagcaaggggaagagcaaggccagcttctcgtccttcttgcccctggcatggcttgccaagctcacggccaggaacggcgtgcccgctaccaaggtcgtgcatgcgacgtcgtccgcggcgaagaacacggctcaggccgccaccgcattcccgtcctgcttccacaagcccgccagccccagcaccgcgtcggcgtcgcgaagcagcctgagcctggcctcttcgtcatcatccgccgccgacgcagaggcagccggcattgtcccttgccgtcgcgacgacgctaccggcggggacacggtggcaggcatcgccccgcgccgccgctcggtgggcaacgatgacgccaggaccgaggccgcgaccgcgaccgcgcggcagctgtaccacagtcgtcgccactactcggtcggtggcgaccgagaccttgctcacctggggcaccctgggattcctctacgcggaccc

SEQ ID NO: 108152 - DNA, 262 bp, Zea mays
  Clone ID: MRT4577_30129C.1
atatgcacacgcaacatagctctgcatatgcataccacacttatgcctaagttggtgtctaagaatttaaagctcgaaagagctcagatgaggaggtgtctgaaccacaggacgaatggtcttacataaaaatgatgaacgacgtgaagcggcaccgggggacagctgatgatcaatgacaggaagtcggtacatggacagcacggaccactcctttctaaggtgacgtgataaaccacattcttgctctatcgtgataaca

SEQ ID NO: 108153 - DNA, 264 bp, Zea mays
  Clone ID: MRT4577_3012C.1
tcctcttccacaaacgagaacgatcggcggaggattatttaactgtaccgcgtttgaccaaacaaacaccaagacttcgcttttaatttaaaaatcaagagattgcccagttctaaaccttaccgaaactcaagtagtcttaagacacctactgtgaaaagagaaagcctttcaatagttcttcttcccaacaagatatagccttgcatcaaaacctggttacactccgacacagaatgtcaattttatgccaagtaatgacgt

SEQ ID NO: 108154 - DNA, 349 bp, Zea mays
  Clone ID: MRT4577_30130C.1
cgcacatgttgttaactttgaaaaccttaacaccaataacgttgtgggcggggatgttgagggggacatcactaaggtggtctaccacttccagaataaccttggaaatattgttgatggaaatacccagattcagatcatacactgtgagctgaccaaacaacttaaacctgaccacatatttaacattggagcagggaaacaggctctgaataatataaatctaattgcttacttattcaatatacaagataatccacttccttattagacaaaggagcggggcatagttcttgaaattaatcttaatgatctggaacccaatttagcttgagtaagcacagaatgg

SEQ ID NO: 108155 - DNA, 510 bp, Zea mays
  Clone ID: MRT4577_30131C.1
ggcgattcccaacccaattccgacccacagtctcggaggctccacagcggagagcgccggctccccgctccctcctctccctctctctctttctctctcttctctctctctcctccttccactgcctccttccagtttccacgacgccaagcgaaaccaaaaaccatcgacgcgctccgcccagctcccctctctcccccgcaccctcctcacctccgccgcccagcctagccgcaaaccctaaccctagatgggcgccgtcacctcgacggtcgcggcgcgcttcgccttcttcccgccgagcccgccgtcgtacggggtggagctgccactgccgccgccaccgccggcccctgccgcccccgagctggcgggcgaggagaagggcggcggcggcggcggcggctcggtggtggtcgagctcacgggcgtcccgcggagggccaacgtggaggcgcggcggctgcggaccaagcggggcacccaggcggtcgcgatcgcacgtgcgcc

SEQ ID NO: 108156 - DNA, 696 bp, Zea mays
  unsure (1)..(696): unsure at all n locations
  Clone ID: MRT4577_30132C.1
cggccgcgtggnngtcaaaaaaaaaaaaaaaaaaaaaaaaaaaaaaaaaaaaaaaaaaaaaaaaaaaaaaaaaaaaaaaaaaaaaaaaggggcgggcccgctcgcgaacctaaaaactagttctaactatcacccccatactattaaaggccagctcccaatccaccttcgcgccgccagttcttcgagagaaaagaaccgccgccgccatcccctttgctgctacatgtcgctcaggttccagataattgctcactgcgtgtgccagtgcgtgcgcaagtcggtggagtcgaaggaaggagcgaaacaccggagcaccgacgggaatcgctcgctagagtactatccttgccgcggatccgcctgcatcgtggccgggagtcatcacctgcttcaacaccgagaacgatctggttgaagagcccgaagaactcgctggagaagcccctgagcagcagctggttggaggttgtctgcattgcaaccaatgctcaggagaagatgaagccgtggaaggagacttccaggagttccaaaattacgacgagttttaggcatgggttagcggcaacccctagtcggctgtctgtgaaggccgcgtgtatctatgtttcttttccgcactttgattaatgtaaagactatgtggatgtctcagacatatgatgtaatcgactattattacccttttatgtt

SEQ ID NO: 108157 - DNA, 656 bp, Zea mays
  Clone ID: MRT4577_30133C.1
ggcccgggaaaaaaaaaaaaaaaaaaaaaaaaaaaaaaaaaaaaaaaaaaaaaaaaaaaaccaaaaaaaaaaaaaaaaaaaaaaaaaaaaaacctgcacccccgaaccaaagcgaggcgaccccgaggcccctaatttccggcgaaggaaaagggcgaccgtcccagggaatctgatctggcaaattgggaggaaaaccacctccttcctggggaaccagtttggcaccggcaatgccaaggggcagttaaccaaggagcccaacaccctttacaatgaacactcctacaagacctctggtttagcaaacaagaaaactgtaccgacccacccagctgttgaaagggactcggttggggccctctttactaccaagaccaagaagcagaccacccccgcgaagctaacccacaagtttgtgatgcccagggagttccgaaggatgcccaaggctgtaaaaaaccaggttggcgacaactattacaggcctgatctgaccaagtcgccctttggaaggctgagctctgtgacccgaaccctccaggttgccaagtctggtgtcaagaaaaaaaacaggcagcctacgcactaaccctgtgttctgccgttgggccccatagcctaagcttatatttatccaatgtctccaacagttt

SEQ ID NO: 108158 - DNA, 5165 bp, Zea mays
  Clone ID: MRT4577_30134C.1
atggacgccggccgcctcccccctggcgcggaccccgccgccgccgtcgctcccaacgcggctccagccgccgctgctgcgcctggcgcggccctggccgcaggggcccccagccgggccgccgtcacgcctggcgcaggcctggccgcaggagccacccacttggccttcactgccgcccctctgtgcgcggccgggtccctgcacgccggcctcgcgtcccccacggccatcggacctccaccgcccggtctcactgccccccgcagcgatcgcaccggtggcagccccccgttcatcgacggcctcgggcccctccgcgatgccactcccatggccctgcgccgtggctctccgccgggatttcccaccatgccggtacccgccgagcacaacccctcactcgtcgccgccatcgctacgatccaggccgctgtggctgcctcgcgggagcgtgagcgcgccacgtccctcgccctcgagcacgagcgtgccctgggcgccgctctgaccacccagatggccaccgcacaacgcctcctcctcggccgcccgtcggtcgctcgtgaggaccccccgacgcctcctgcggccatccccgccactggcctcgacgtcgaccacatcggtgctctccacgctcaggccgccggacttcacaacatccgggccctcgtgtccgtggtgttggacccggcgtcctcccactacccccgttggcgaggacaggtcctcctcacactgcggcggtatgccctcgccgatcacgtcctcgacgacctcgacgctccgccgactccctcctggtgcctcatggacagtgtcgtcctctcgtggctccacggcaccatcaccgttgagctacaggacatcatccgcgaccaggcggacacggctcgtcaggcgtggctcgctctcgaggaccagttcctcgggaatcgagacgcgcgggcactccacctcgacgcccagtttcacctgttctctcagggggacctctccgtgggagagtactgccgccagatgaagggcctggctgactctctccgcgatctcggcgagcccgttgccgatcgtaccctggtgctgaacctcctgcgtggcctcagcccccgctacggccacctgaaggctctcatcaagaggagcgtgcccttccccaccttccacgccgtgcgtaacgagcttctcctcgaggagctcaccatggcgaatgaggcacccactcctgcctcggctctctacagcgctcccaccagtggtcagccgccttcagggggcccggccacccgtcctccgtcgactggggctcccacccgccctcctcctaccgtcccggcggcccctcgtccgacttccacgaccgacgggggtcgtcgctcccgcaagggcggccgagggagcggcggctcctctcgtggtggttcctccggccggggtggcggccaagcgtggccgtcattctacaacccctggaccgggaccatcgccatgtggccgggccaggcaccgagtaccccccgtcctccggcgccagccctcctgactacacctcactacggcgcacctccgtatggtgttcccgtcgtgccccaggctccgcccgcgctcctgcccccggggacccccacctcgacgccttggtccccgccggccggtggttgggacagcgcctcccttgctgctgccttcagcaccatggcgatgaccccacccccctccgactgggtgatcgactccggtgcctcgtaccacaccactcccacggcaggcacgctctctcgctctcattcccccctcccctctcacccttcctcgatcgtcgttggaaacggttccactctgccagtcacctcagtaggtgcctcggttctccctgggccgttttacctcaacgatgttctcgtagctccccacatcacccacaatcttctttctgttcgtcgcttcaccactgacaactcctgttccattgagtttgacccctctggtttttctgtgaaggatctggccaccaggacccttctcgcccgctgtgatagctcggggcctctctacacgctccagccctccgccgccggcgtgtctccacctcctgccctggtctccaccacctcctccaccacatggcatcgacgtctcggccatcctggacctgacgtcatgaccaagattaccagtagtcttgatctttcatgtaataggggacattttgagggtctctgtcatgcttgtcagttaggccgacatactcgtctcccatttactacttcttcttctcgggctgagcaggcttttgatctggttcattgtgacctttggacctcccctgtactcagtctttctggttataaatattatctggtgattttggatgatttttcccactttctctggaccttcccgcttcggttgaagtcggacacattcaccaccctcacacacttcttcacctgggtttccactcagtttcgtcgcccggtccgtgctctgcagtgtgacaatggccgcgagttcgataacaacgcctctcgctccttcttcctcactcatggcgtccagttgcgtctctcgtgcccctacacttctgcccagaacggccgagccgaacgtatgatccgcaccaccactaatatgctccgctgtctcctcttccaggcgtctctccctgccagctactgggcagaggccctgcatactgccacccacctcctcaaccgccttccctcgaaggcggtacaccaccctaccccccactttgccctttacggcaccaccccttcctatgaccaccttcgcgtgttcggctgtgcctgttaccctaacacttccgctaccgctccacataagctttcccctcgctccgcccgctgtctcttccttggttactcccctgaccacaaggggtaccggtgtttggacctcacctcccaccgcatcatcatcactcgtcatgttgtctttgacgaagatgtgtttcccctcgctggctccaccccacccaccgatcttgactccctcctcgagtccgatccggttccacccccaccttcggctccccgtcttgcgccgttacctgctcctcgtgcggcccccacgacctcttccgcgccacgcgcggccccgtcgaccccgcctgtgccacgcgcggccccgtcgaccccgtctgcgccacgcgcggccccgtcgaccccgcctgcgccacgcgcggccccgatgctcctgcctgcgccacgcgcggccccgtcgaccccacctgcgccacgcgcggccccgtcgaccccgcctgcgccacgcgcggccccgtcgactccgacacgattcgccaaccccgccctcgtctaccatcgtcgcggccacgccactacctcggcgccccccgacgcgggcccatcgacggacgcggcccgcttcgccgaccccgccatcgtctatcaccgccgtgagccggcccctccagctgctcccgacactccggtggcaccctcccactcctccgcataccccccggtctcctgcaagcgacacgcacgcttcgaccacctcaagaggacttgagacactgccggcttgcctctggccatccatcatctcagtgatacaataacaagccaaatcgatctaccagaagtgactccgatgctcaccgtaggtcgaactggactcgcagtgcatcgtcatcatcggacaatggtggatgtgtgaaggggattaaagacaaaggtctcattaaaatagcttctgcaccgaccagacatcaatgggtttgctggcatgtaagtgtttcacgacacagataaatcagacgcttcccccctacacgaaaatggacctaagttacttcgaggaattggtgatcacggtgtaaatcacagaccctcttcactcaacgatcaacacacttaagcgggcattcgcgacgaagaaggcagggcccgtacacatcttcatcggcaccatcgcggaggccagaacacagagtcctctttatttaccctggcgaggacttaccactaatgctgagacaccggcggaatctaaaatgcaagccctgatctgcttcgctggtctcgcaggtgagactacgtcagtactcagggactccggcagagcacacaccgtcttgatgcagcttgaccatccagctccaataactctcgttctacagacagagcatagtgaaagtcacctagaagtgatgacagcataaaaaatcttcgctacctccatgacactttgtcctgcagatacactgatgaactctcttcggcctgtccatatcctcctttacgcagggtaaacctcaatgcttccaccacgcttctagaaaggctgcataccaagccgttccgcgaactgttagcacctcaagcagatcagatttagatgctctccttaaaatctacagagaagcatctgaaccacagcaagaaatcacgtgtcttaggctccctgtcttcatcgccggatcaggatattgttttggaggcattgaactttatgtttactgatgaggtgcggaatcaagattcattttacataccttggtggcattagcttagaaggacggagaaattgcatggacctggttgaaggaaaactgggatcacgtgttgaagacatggaaatcgagttcactcatatcagacttcattgagtccattgtcccacggtttacctccgcaggagaaagctgtcgaggttaccgagttctttgctggccaagttaagccatcattcgagagagcactgaagcagagcctggagagggtgcggatcagcgcgagatggatcgagagcattaggagtgagcccaagcttggtcagacagtgcaggagctgctgcaggccgatgcgtaaacatgtggcctggaaggtagcggttcctcagtgtgatcatctcatacgggctgttcgggtcaggattaaagtcggttgtttagattgctgcagttataatctatagagataaacattgtagaaacagtagaagtcggtataaattaaacctaaacgaccaggcctataaattcttgaaaaggttccaggtgggcttattctacattgtattggcagttgcttgcgtatgatttgttgagggaaaaaaactgatgcaatgacgtttgtttccgataacatccagtcacatcatctgtacaggatag

SEQ ID NO: 108159 - DNA, 653 bp, Zea mays
  Clone ID: MRT4577_30135C.1
gactagttttagattcgcgagcgggccgcccctttttttttttttttttttttttttttttttttttttttaaggctgaacatgtatgtgaaaatcgcatttacacggcaaaagattcacagattaaacgctgtttacattgggaagtagtacataggtacaggcggcgtacagcatgcaatgcaacatacaacgctgcatgcatgtgtgcacgtgtagttgattgagctcagcgccgcttgacgggatcgaagttagagacagcgacgacggcgccgacgatggcgacgagcacgacgcctccggagacgatgctgaggaggaagttcttgagcgacggcgagatcccgggcgcggcctccgcgacctccggcagcaccagcgccgccgccacggccgccgcggccgcccactccttggccgggtgctgcttctgatgcgcggacgacgcccggacgacggccatccgggtcgccgaacgacggggcgcgagcgcgacggcccggcgcgacgtcgcgttcctgccggcgcagagaggcttcccgagaccctgcgccacggacagagacgccgcgacggcggtgacggccatgggtcctgggctccgctcaggcgctgctctcgggacgtgtgatggcagtggcaggagcggc

SEQ ID NO: 108160 - DNA, 1846 bp, Zea mays
  unsure (1)..(1846): unsure at all n locations
  Clone ID: MRT4577_30136C.1
cattgggacctcgagccggccgggnaanaaatttcnaaaaaaaaaaaaaaaaaaaaaaaaaaaaaaaaaaaaaaaaaccaacgccgggccggaatgccggctcaattcggcacgaggccggtttgattttttttccacgcgtccgatttcttttcgtctctctcgctctcgccttctcggcgcagcgcagtactacgagctagcagcaccaggaacctcttcccacacttccgcgctcctccctctctcgactctcgagaatggttgtgtaggcgggcgcaggagggagggaggcgagagggggagctagggtttttcgccgccgccttctgttatcctcaggctctgaaccccctccggtccggtgcgcggcggattagactccgatggggaagtctccggcgaagtggatcaagtccgtgctcttcgggaagaagtcgtcgtccaggtccggctccaccaaggccaaagatttatcgaaaggtgcgagtaacaaaggagctgctgctgcggggaaggagcccgtgttctctgagagctccccagtgatctcggagcctgtgcttgttagcgcccacaacaatgagaccgtgcgggaggtggcgaagggtgagaattccagcgtgcaagaagtgccagtgaccgatgtcagtcaagacttggagaagcagggcagtgtggggtctgatacgtccaatgatgctgagagggtgagggaagagcgagcggccgtgaaggcacaagctgccttccgtggttatctggcacgccgagcattccgtgccctgaaagggatcataagactacaggcattgattcggggtcatcttgtaaggaggcaagctgtttcaactctccgtgcaacatggttgattgtgaagtttcaagccctggtccgtgggaggaatcttagactttctgaagcttccattcaagcaaccatggaactttcccaacagaaccttgcgggttctaaacctggttcctggaaggagaagttgtcttcaaatgcatttgctcggaagcttctctcttcaccaattgtggttgaggctcttcacgtccagtatgatgagatggaccctaattcggccttcaattggttagagaggtggacaataagtcatgtctggaagcccatttcccaaccaaggagagttggtgctgatgctaagcctcatacaaggaaggccagctatgcaatggaaacagagtcagtgaaattaaagcgtaatgcacggaggagctctgcagtgccatttgaaccttctcaaacaaacaccaccattgaaattgagaagacaagacggaatccaaggaaattaagtagcactcctgctgagtcagttcccgatggccagttaacagaacttgagaaggttaaacgtagccttaggaaggttactagttccatggttgaaacctcaaaggtgcctagcccaacaactgagattcctgaccatcaagaggtacaatgtgagagaccactaagaagtgcaaagcaagctccaattcatgttgagaatcaagaacctcagaatgttaatctatcggacaatgcaaagatggatattctggtaccagatatccagcctgacgtggaagttgcttcagatctagtcacaatcactaatgaagaaaaagttgatgaaccaccgtctgttgttgctccagcggcggaaattatgcccctgcaagacatcaacagcgatgaaaatgctttggtgaatgatgtggaagagagatccaaagaagaacattcatctactgatagcctggaagggaacaagaggaggtcttcattctcagctaagcccgaatatccagaaaatggctccaaaaattc

SEQ ID NO: 108161 - DNA, 469 bp, Zea mays
  Clone ID: MRT4577_30137C.1
ggtcccggtccgggccccgtcccgccagatcagatcggatcgctccaccacctgctggtctgatggcgccgcctccccccttctagatctcgcctaagaaacctctcactgtgtctctctcagagtatcgctttagttttgccgatccgggcgcccatgagcgcccgccgccgcctcctccttccaccctgctgcagaggagtgcgtcagtccgtccatccgtccgtcgttttcagattttgtttccccatcttgggttcgtttggttcgtagaagaactcaagttaagttatcatcatcgagtgtgcttggtctcgttgtcagtcgttgttaaggttttaagaagaattgagaagtgagatggattggtcttgtgttgccgaggagatgtcaaatctgcctctctctctttttttttgtggttttgttcttccagactgaggaagggagatcagatgattattatccc

SEQ ID NO: 108162 - DNA, 485 bp, Zea mays
  unsure (1)..(485): unsure at all n locations
  Clone ID: MRT4577_30138C.1
cccaanccaagccggccccaaacccgaaccccaaggcgccccggaacggaggggcccaaggccgagaagaagcccgcggcgaagaagccggcggaggaggagcccgccgccgagaaggcgccggccgggaagaagcccaaggcggagaagcgcggcccagggggcggaggcgccggcaaggagggcggcgagggaaagaggggccggaagaagggcaagaagagcgcggagacccacaagagcnacaccnncaaggggcngaagcaggggcacccggacancggcagcnccncnaaggccagggccancangaacnccnncancaacgacancnncgagaagcacgccgccgaggccgccaagcacgcgcggnacaacaagaagcccaccancaccncccgngagagccagaccnccgngcgccncgnccnccccggggagcgcgccaagcacgccgncnccgagggcaccaaggccgncaccaa

SEQ ID NO: 108163 - DNA, 300 bp, Zea mays
  Clone ID: MRT4577_30139C.1
ccagcagaagttgcagggaagcccaggaaagcgctctttcttgtcgattatgtggccgttggtcccttcgtgctcgagatccagactcttaccagtccgaacagagtggtcatgagcctgcgatctacgatccaaaccagatagacatattgtgagcggcacatatgctcactgactgaaaccctgaagaatgtgcaagctatctactataagaacgttcaaccctaaaatttggagaggcattcctcagatgacattggctgcttatggtataacaaaaagctggttcttgcctttatg

SEQ ID NO: 108164 - DNA, 223 bp, Zea mays
  unsure (1)..(223): unsure at all n locations
  Clone ID: MRT4577_3013C.1
taggggccttttttttttttttttttgttttttttttttttaaccatgtttgtatgcttattttatttatatgaattacatgcttcatatgntttgtgttctcatgatccctattgttatggatatttttgagatccccttttccatgtttgattatctattattctgccttcctcctaatgctaatttatggaattaaaataatacataatacgcctatatt

SEQ ID NO: 108165 - DNA, 337 bp, Zea mays
  Clone ID: MRT4577_30140C.1
ctctacgcgagcgggccgcttctgccatccattcgcgcgcggcgtactcggaaccggagagagggaggggaaggagcgcgagatggacaaggccaataagctgagcaccggagcgtgggagaaggctaccaagagcaggagccacgggttcacggcgctgatcgtagcggtggactacgcgttactgctcgtcttcgacggcttgctcgtctacctcgtcaggtcacggatcctctactccgccgccggctccgcctagaccgggccgcgttcgtggatctctctactatctttcacgttttttcggagtccatggctgctggagcaccgggatctt

SEQ ID NO: 108166 - DNA, 437 bp, Zea mays
  Clone ID: MRT4577_30141C.1
atttcttttcgctgatgtcatctacatatgtcacttgttaaatgattttataatggaaatgtatggttgtgaatttgtcaatttatacttaggcccgtttgttttgttggaattgaattccattataataatcataatttagacaaactaattaagttaatatatttatatatttaatatattagtatattatcctgaatcatatgagagatatagttatacgctacacgtatgctatagagaagtaagtataagagtgtgctataagttgtatattagaaaagtagcatgtaaatttatagaaccaatttttatctctcaccctatgaatttgagatagacttatatataaactttgaaaagttatggaatgtcacattctaaaaaatagcctactccattagttagattccaattcttcgaaatgaagaaacaaa

SEQ ID NO: 108167 - DNA, 380 bp, Zea mays
  Clone ID: MRT4577_30142C.1
accacctggccaaccggagcgtgagaaccgtacggtgtacaccgattgagatgacagccacgtacgacttcgagacgtacgcggaaatggagcggttcatttgagagcggctgctgaacacgcagcatacctatagcggagcgctaccgggcgctcttatcactccgaagcctccgcggagatgcgccgggccgtgctctgctgcaaggtttagactatggcgcctctgtgagatacatacacgtcagcaccaaagaaagagctgtaagggatccttgtaactagctcgcccatgaggctgcattcgcacttagacagatgcaggatgctgaggctattcctgcactggtggcagtactcaaagagctttcgctacatcc

SEQ ID NO: 108168 - DNA, 580 bp, Zea mays
  Clone ID: MRT4577_30143C.1
gggcgggggccctcaaatccaagattactggaaaaaattttttaccctggtttttggggggaaacccctttcctttgggatccgacggcggggggggtttacccccgtaaaccccaaaacgtttttgggccgttttttttaagccaaagggggttcagccccatttacacttccaaaaggcccaaaaaaaccacttttttccccggtttttggaggggggggataagaaaaggggacgaccgtacaagggaaagggggggggggacgctaaaaggtttttttttgcccgaaaaacctccgggggaccccaaaaatgaaagccttggtaaggaccccctggtaaggggggcaaaaggccaaagggaccgcccccccaagcaaaaggagcctccccgttggggggttcctgggggggggttttttgttttgggtttcctgggcgtggtccggggtttccggcccgtcgccgccgttggaactggacaacaactggggagggaaaccgggggggctgaccttgggggttgatccgggccataagggcgctccgggacggggggccccccgcggcccggccttg

SEQ ID NO: 108169 - DNA, 544 bp, Zea mays
  unsure (1)..(544): unsure at all n locations
  Clone ID: MRT4577_30144C.1
accttcggcacgagtggaaacctctcaaccctagcagcctcctgcaagtttcagagcccaggaacctgcgccacggcgattgagaccggagacccttcgcactttcaggcctgagactcaaccagcctgctcttcattactcctcaaaacccttcttactccaacaaggaagctcttcctccgcgagccttctctccaactcttccgctgcgcctggaccagaatccaggttcgagatgtctccctgacaagagcaagcttcgaatgcgcaagccttgagcctttttcactccaccctttggtcccagaaaaagggccaacgaaacaacgcttcttccaatcaatcgaccagcggcattcggcatgaacaaagtccgaccctttgtcaaaaacctcggtacatcgccaggtccgggaacaaaggaattcttggaagcccttgctgccggccttaatgtgtccatgattggccagtncggcggtcggtttcttctttgcctacctcgtcgcgatagagttggtcgtgaccaccagcacaacgata

SEQ ID NO: 108170 - DNA, 350 bp, Zea mays
  Clone ID: MRT4577_30145C.1
gccttccaccactcgtgagacaaagggtatttacaggcgtggtctgttgaattagggggtattgggtcggcttgcccacaggaaaaagttttgagacatggtgagggctaaggagctttacgcggtgtctcagttccattacatgcatgtcgcagagatggattctatgtatgacagctgcaagactcatcgctcgtacatcaacaacaatgcctgcggcatagcataacggtatttgtaacatggtgcacggacagactatgatcatagggtacggctttatcagcatgactagaacggtaggagaagacacctattggttcaccgaccagaatatcgatgatctgcat

SEQ ID NO: 108171 - DNA, 608 bp, Zea mays
  Clone ID: MRT4577_30146C.1
ctggagctggtgaacctccaggctccagccccatcaatttaactgtgaaccgtggaaaacagacataagcgacatatttgtcacctctgcagtttcacaaaaattaattttggtggtgcactctacgatagtcagcttctccccatatttagataaaaaaaaagaatcatcgcttccattttttttcaaccctcagcaatcactacgtctacccaagaaaaccgactcctcttgtataccagtagtctacgtaaatgctctacctaggccacccaagcctttgaatcttacaatcaatcatcgccgcctccatcgtcagcatccatatcagcatcatcgtctcgccctgcgtctgcatggtcggcagcatcatcgacattcatgagctcctgccttacaacttcttggttgatctcttctagtactcgagcattcagctctggcggaggacgcctttccaccttcatagtcttcaggttatcctctgcaaagaatgcggccaatggcttggggaccttgaataagcagtttcgctccttggcactctcaacaaggttgttccagtgtttatcttgcttcaatgttgaagcagaacctacaaccagtac

SEQ ID NO: 108172 - DNA, 1063 bp, Zea mays
  Clone ID: MRT4577_30147C.1
tttttttttttttttttttaagagaaaacaaatactggagctggtgaacctccaggctccagccccatcaatttaactggtgaaccgtggaaaacagacataagcgacatatttgtcacctctgcagtttcacaaaaaataattttggtggtgcactctacgatagtcagcttctccccataattagataagagaaaagaatcatcgcttccattttttttcaaccctcagcaatcactacgtctacccaagaaaaccgactcctcttgtaagcgacatatttgtcacctctgcagtttcacaaaaattaattttggtggtgcgctctgcgatagtcgcttctccccataattagataagagaaaagaatcatcgcttccatttttttttcaaccctcagcaatcactacgtctacccaagaaaaccgactcctcttgtataccagtagtctacgtaaatgctctacctaggccacccaagcctttgaatcttacaatcaatcatcaccgcctccatcgtcagcatccatatcagcatcatcgtcgtcccctgcgtctgcatggtcggcggcatcatcgacattcatgagctcctgccttacaacttcttggttgatctcttccagtactcgagcattcagctctggcggaggacgcctttccaccttcatagtcttcaggttatcctctgcaaagaatgcggtcaatgcattggggaccttgaataagcagtttcgctccttggcactctcaacaaggttgttccagtgtttatcttgcttcaatgttgaagcagaacctacaaccagtacagcagattttgctcttgtgatggcaacattcattcgtcgaaaatcagaaacaaagccaatcttttgttccttattgcatcttacacatgaaaaaatgactatttctttttcacgtccctggaatccatcaactgtgcttacatctatcaattcctttgattgatccccaaaggttgatcgaaaactgtccttcaatagttttacttgatgcctgtatggtgatataacacccactcaggactagatttgag

SEQ ID NO: 108173 - DNA, 336 bp, Zea mays
  unsure (1)..(336): unsure at all n locations
  Clone ID: MRT4577_30148C.1
caatcgactatctgacctatgcacccactcctctccctcccaaactctctcctcgcccaatctttccattatatatcctttccactctcattcgcttaattgcaggatggacatacacactctcagccatatggctattatggctactgttgccagtggcattgatattgaggccaatattgagggctttgaaagttccttcctatcactttccagaggactatggcatccgcgcctatgctcgctgtttcctgtttacantggnggatatcagtggagatggagggcagcggttctgaccccactgttatcctctccaatcacctctctgccctc

SEQ ID NO: 108174 - DNA, 422 bp, Zea mays
  Clone ID: MRT4577_30149C.1
gatatttttgtttttttttttttttttttatttgttccattttttgctataacaagcgggctcccttggggagagaactaacattctgattttaagataggcccaggctgctttcggtggtggcttaaaagcttacccccgattattatatccgtccttccaaaccattgggtttttttttttaaacaaaacattgtttgccctgatacacagaagggccaagtggatggaattcccttagaacagttggcctcattggcgcaaaaaaaggcgagggggggggccgccatcttgcaggagtgccggtgaagtccgcggacttggcccaagaggaaatggggagggctagggacatcgggcaaaatgcccacaataatgttagcctggggaatatctcccccagaaccaacaggggggggttg

SEQ ID NO: 108175 - DNA, 591 bp, Zea mays
  Clone ID: MRT4577_3014C.1
atcacccataatattttgagcattcagaaacacaccaagcgaagcgcactagcaacgacctaacaacaatggctaccaagatattatccctccttgcgcttcttgccctttttgcgagcgcacaaaaggcttcattattccacaatggttaattggttctaaggccattatttcacaggttcttccaacaagtactttaatgggctttgaacacctaactgggccaggcatcatgcatcaacaagggcttggggggaggggtttaccacaaccaattggccaaatggaacaaccattcttggcacatttaacaatacaagccattacaacggaacaggaacaacaggttctaccaagactggacccactaaccatggggaaccctggcggctacttggaagagcaggtggttggattcaacccaattggtttggcgaacggaggtggaaaccaagaaccacaaccgcttcaacaggttctggccacggttaatcaaataggcatggggaaccctggcggcttactacaacaacaacaactggttttatttaacccggttggtgggggccaaggacctacataactggaaca

SEQ ID NO: 108176 - DNA, 2499 bp, Zea mays
  Clone ID: MRT4577_30150C.1
agaacgagttcatgttgcttgcaaggaaataattacattggaaaaacagaccaagctacttgaggaagaagagaaagaaaaacgtgaagaagaagagcgcagggataggaggagaacaaaagaaagagaaaagaagaatagaagaaaagagaggctgaaaggaaaagacaaagataaagaaaaaatattggttcggtcaaaaaaaccaggtctttcaacattttctccgagcagccaagcagcaccaagtagtaatgagtctcaggatgttctagacttgagatattcagatagcgaagaggaagacaatgttgtggtcagggaacactatcctgattcttcagctgatcaatcttcaagcaaggatactgatgaacgaagcaatgagcatgaatgcagtgcaacagcagaatttgttccctcagattgtgatggctcattcttatgtgatgagtctaattcatcaagaaacttgagatttagatgggacttcccagaaaaagatgtcagttattggtatgaagattgtcgtgttgattctggagatactcaattgcagtctagggagaggatcagaaataacactagaagttacaacactgtatttaatacaaataaccgaacaagagacaagtacaacccctgcagctgtggccatcaagaagacttcagatatttttccacagcaactagatcaagtagggagacaaagatttccaggaaaacagtggctgagaaacccaggttgcaataccgcaggtgctatcctccagaaagcttcgctgtgtcaaatggacgtgttggtggtacaccaaacaagaacacaggtccaaagcaagtatgggagccaatggatgcaagaaagaagatagggaatgggagaggatcagaaataacaccagaaactactggtgctgctgatggttcagatcaagtggaatgctcaaaggacattagtgaatgtgagaagcttgaggtagtgtgtgaaacacttgctgaaacttgttgtgagatatctgcagaagcctgtaagtcagatcaaccatgtagacaaggtgagaaaaatcagtctgcttgcagcgatggatctaaatgcgtagataagccaaattgctgcttgacaaaggacactgttaggacaacaaatttaaccagttcagacagcttttcgtgtctaagtgagggagatagagacagcagcatgagtagcatgacctcactgagtgctcagaatgtagaatcttcatctacatctgattcagatgagtattcagacaggaacgatagcagcccaggcgatccaccagtgaagaatgtttctcgttcattacttgagatgtgtgcaggaaatggtttcagggagtaccaaccgaaaggcttgaaccctcctaatggcaaccaatttggatttatggtggcacctttacaggaccagatgttgcaccaacagaagatccatgcaccgccgtactcgtcaccatttgtggggttccacaatcaccccttggcagttccaacaaatgggtacttgccatatcctcagccaggtcacttctaccctggccttatgacccctgttggatgtggagtcgctggcagccaatgcgttgactttccaatgcagtacagcaataacattcatccttactcgggccccgaatttggttttctgcctgcaaaaccagttcacaagaccccagtgagcttccatgctgtgccagtgccaccactggccccgctgtgtagaagcgaggtgccagtggtgataaatcaagagaggcagcagggctctgcaccccctaaattcaaacaggcagtgctggtccctgagaacggctgttcagcagaagacaacaccttcaaacagaaaggtgatgacacagacagcacacccttctccttgttccagttcaacctgcctattgcccctcccaccctggcaacatccaaagaagagcaaagtggagcgatgccgtcaatggcactgccaccagctcagataactcgagcccagctgtgctccagggaggagaccaatgtcaaggagtacaaccttttctctgggtgtaacggagtgatgtttcagctcaactagaggcgaagaaaagtgagcagctattcaatatacatacatggtgaacgatttgtattctagtaaaacagaataaagtaggtcgaggtttttactgtgttgccctcgaatatttatttcttttttaattttgatttgttgtgcttcccctccctgtttttttgtgtgtatggaaaactgaaaagacagtgagtggtatagattctgcagttttgacactagaaaaaaaaaaaattttacccaaaaaaaaaaaaaaaaaaaaaaaaaaaaaaaaaaggaaaaaaaaaaaaaaaaaaggcccctagggcctttgccccttaatggttatgtggtataaacaaggtttctccagagacggacgaacagagaataaaattaggttaagcgtcgtgttgtgattgtaaaaa

SEQ ID NO: 108177 - DNA, 1930 bp, Zea mays
  Clone ID: MRT4577_30151C.1
aatgctctcaagagattatgttgtgtatgaagagtcgtgtagagacgcactattcacgaatagccgtttcttgtgttttttacatttaacccctagagacccctcaaaagacgggtattaaatgaggttacatataccattaagaaacagagaataaaaatacattctttgtaattcgatctagagatagttatgcctcatatactagtacggagggagtagtcaagtacactctgtagcgtggtgactttgtgtaagttaggatcaaaatctaagcaaccagttgctgtaggaattgtttttttggtggtattattatcgctatctatacgatctagagaaccatgttcaatctaatggaataaggtttcgtattgacctaggcaattttccctgggattagtcattttgttgaaagactctgtactatactctgtagcgtggtgatttttgctagatggcatgcttccatttaggaagaagagatacttttcatctgccctcatgtttacaattaccatgctgtagttgttctatataataaaagaagtgtttactctatcagcgatttggtttaaacagcttgtttcgatccgagatagggagcatgatagatttaaagcgctactgaaatcatgttctgggatttgactgtctggatattggctataatccaatcagtgaagttgtaaaaatgagcttttaaatatatttctatggtatagaacacagaatgcagatgtgattaggaaaagaagttcttcgctgttgaaaagccatctttaatcgacacgacaaaggtagcttatgccatgattcctgcaagtggcacttgcagcttggaccatggctaaccgtcaatggttcttgtttggaaatgttaacattcattgccatcttaagatcgttaaactcactttcggacaatattgttcctccaatttcaatagaaaattttagttgggccaacagttcagctgacttctctgtgagttggatagcatttgtccaattttctgtcacctttttgctaacttaaacgtggaaacacttgttgcagcagggacgcgtggtcttgatgcaggggaccgctatttgaaaccattcgtcattccaaaaccagaagtcaccgttgttcctagggcgaaagatgacgactgcctcattcttgcaagtgatgggctgtgggatgtagtgtcgaatgaagaggcatgcaaagctgcgcgtcggcagatccagctgtggcacaagaacaacggtgtcacatcatcattgtgtgacgagggtgatgaatccaatgatcctgctgcacaagctgctgctgattatcttatgaggctcgcactgaagaagggtaccgaggacaatatcactgtcattgtggttgacttgaaacctcgaaagaaggccaagagcaactcataacactgggatggatccatcacggtagagctgaccatgatatgtccaaaggcttctgctgctagttgttggtcgtccgcaagagacttgaccccacaggtttttttcgttgggcctcaagaactgtaggtgcattttccatggagggttatgatgcttaaccccactctggtttctggtggctaaaacattctctccagtcggcttctaccatgagccctggcacttagtatattcctaatgttgtatgatagttgaacttgtaaagagacaagcggctgagacggtcactaaaattaacatattgttacttcatgattcaagtactatccaacagcctctccagccggcaagaactccgtgagccccccctggcacttagtatgcccctaatgctgtatgatagtcgagcttgtaaagagccaagcggctgagacgatcactaaaattaacgcgctgtaaccttcatgattcaaaaaaaaaaaaaaaaaaaaaaaaaaaaaaaaaa

SEQ ID NO: 108178 - DNA, 234 bp, Zea mays
  unsure (1)..(234): unsure at all n locations
  Clone ID: MRT4577_30152C.1
gaaaacccggctggacgcactcattcgncggcaccaacctcagatcctcactgcttttttacgcgtacttgcgacggcctatttcggctatttctacacctacgttggcttcactgtccgtcgccttcccattacgggcttcccatatctcattcagtaccaacaagtaccaactgctcgtatacggatgctccagcacctcctggacaacagattattgccctactctttcac

SEQ ID NO: 108179 - DNA, 404 bp, Zea mays
  Clone ID: MRT4577_30153C.1
aaaaccggccaaaaaaaatttttggttaattaatcctaaacagggggggcttaaaagtttaaaaaatccggggtccaaattgtacccatttattgcagcccgggggcacccccaagggtcccttgaatttgggttggcaataaaaaaagccagttaaagccagttggttgtttttgtagaaatcttggaaacattttttttttcgattaaggtttggggatccagttttccaagggggggaagttttttggggccaaattttttaagggggcaattttgttcttcccccttggcagacgtggcagtcacaacaggttctttgccgttttaaaacctttctttgttttgggccaaaagagtttaatcagtggggagtttaaaatcatctttagggttgccatttg

SEQ ID NO: 108180 - DNA, 391 bp, Zea mays
  Clone ID: MRT4577_30154C.1
tacatttctaaaaaaaaaaaaaaaaaaaaaaaaaaaaaaaattgttgtccactctcccggggcggcctctaaaaaagggcagatttgctgcagtactccatacctggcggggcgcctctaccagcctgcttttaggggggacccaattccccttttggggggtggtttttcatattactggccgcttgttttacactgtcgtgagtggaaaaaccctgttgttccccaccctaatcgccttgtacacaatcctcctttcacctgggggggttttgtcgaggagccccccacacatcgtcctttccaattgttccccacctttggtggagaatggcccccccctttgcggcctctttttgcgcggcggtcgtggggtttccccgcattgtga

SEQ ID NO: 108181 - DNA, 172 bp, Zea mays
  Clone ID: MRT4577_30155C.1
agacgtggctctttattcgtgagttttccatttacctccgctgaacctagagcttcagacgccctatggccggcctcgacccaaccggcggccttgagcgctgagcaagcaaaggcctctcctcgcggaggtgatccaggcgttctccgccccggagaatgcagtgcgcatg

SEQ ID NO: 108182 - DNA, 276 bp, Zea mays
  Clone ID: MRT4577_30156C.1
ttcataccacccacgccataactctagaatcgctttttcaaaccaaccgaccgattaacccaccacctcctcacctcatcttcgctctcttcctcgtacaaagccttgtcctttcatcttgagtcattggactcactttcacgcatccatgaacggcatcaaccccaacctcggattcctgtcgtactgcaacatgtatagctactcgatgtgcatggccaccgtcatatcgtctatcttcttctcgttcctcgaacgctactccttcatccacct

SEQ ID NO: 108183 - DNA, 1499 bp, Zea mays
  Clone ID: MRT4577_30157C.1
ccccccgccgccgccgtggacacggtccacatcaagatgctgagccacataactccggtgggtgtgggtcggccggccaccacctgcacgctggccccccgccccgccgcgggatcaaatacgccgcctccgcccgtccactccctcgccgcccccgtctcctctcctctcctctcctccccccgcatccacggccgcaggccgcagccagccactcgacgatctagtcgtctctctctccccgctctgccgcctcgctgccgcggcttcccgtcggctggaggatgaaggtcacggtcgtgtcccggagcggccgggaggtcgtcaagggcggcatcgacctcaaggactcggccaaggtcgcggacctgcaggaggccatccatgccaggactaagaagtattatccttctaggcagcggctcaccctcccccttcaacctggaaaaggcgggaagccagttgtcctcagtccgaaggccagcctgctagaatactgcgagaagggttctgggtcactgacagtggtcttcaaagatttagggccacaggtctactacagcacactgttcttcttcgagtacctgggtcctctcatcatctaccccatgttctactatctgcccgtctacaagtacttcgggtacgagggggagcgggccatgcaccctgtccagacctacgccatgtactactggtgcttccactacttcaagcggatcatggagacgttcttcgtgcaccgcttcagccacgcgacgtcgccgctctcgaacgtcttcaggaactgtgcctactactggaccttcggcgcttacattgcttactactgcaaccacccgctgtacaccccagtgagtgatctgcagatgaagattgggtttggttttggggtcgtctgccaggtcgcgaacttctactgccacatcctgctgcggaacctcaggagcccaagcggcagcggcgggtaccagatcccccgcggtttcttgttcaacatcgtgacctgcgccaattacaccaccgagatctatcagtgggtcggcttcaacatcgccacgcagaccgtggcaggttacgtcttccttgtcgtggcggcaggcatcatgaccaactgggcgctcggcaagcacagccgtctgaagaagctgtttgacggcaaggatgggaggcccaagtaccctcgccggtgggtgattctccctccgttcctgtgaagaggtggtggtggtcggcctattgtgattcgatgtctacagacagttgtactgtactaatcgtgcctgtttagcggttgaacttggattccgttgtccgaaatttctaatccgaaagatggatttcattgtcttcttcttcttagcattatgtcactatctcacgtcgtcctgtctcaatacagtctaaggttcatgtgatgttatccccatttgtccacgcacaagtgaatgcagtcactatttcgatccgaccaaaaaaactgcaatcgtgtcccccta

SEQ ID NO: 108184 - DNA, 1498 bp, Zea mays
  Clone ID: MRT4577_30158C.1
ccacgcgtccgcgccgtggacacggtccacatcaagatgctgagccacataactccggtgggtgtgggtccaacgccccccacctgcacgctgccctcccccgccccgccgcgggatcaaatacgccgcctccgcccgtccactccctcgccgcccccgtctcctctcctctcctctcctctcccccgcatccacggccgcaggcagcaggcagccactcgacgatctagtcgtctctctccccgctctgccgcctcgctgccgcggcttcccgtcggcgggaggatgaaggtcacggtcgtgtcccggagcggccgggaggtcgtcaagggcggcatcgacctcaaggactcggccaaggtcgcggacctgcaggaggccatccatgccaggactaagaagtattatccttctaggcagcggctcaccctcccccttcaacctggaaaaggcgggaagccagttgtcctcagtccgaaggccagcctgctagaatactgcgagaagggttctgggtcactgacagtggtcttcaaagatttagggccacaggtctactacagcacactgttcttcttcgagtacctgggtcctctcatcatctaccccatgttctactatctgcccgtctacaagtacttcgggcacgagggggagcgggccatgcaccctgtccagacctacgcaatgtactactggtgcttccactacttcaagcggatcatggagacgttcttcgtgcaccgcttcagccacgcgacgtcgccgctctcgaacgtcttcaggaactgtgcctactactggaccttcggcgcttacattgcttactactgcaaccacccgctgtacaccccagtgagtgatctgcagatgaagattgggtttggttttggggtcgtctgccaggtcgcgaacttctactgccacatcctgctgcggaacctcaggagcccaagcggcagcggcgggtaccagatcccccgcggtttcttgttcaacatcgtgacctgcgccaattacaccaccgagatctaccagtgggtcggcttcaacatcgccacacagaccgtggcaggttacgtcttccttgtcgtggcggcgggcatcatgaccaactgggcgctcggcaagcacagccgtctgaagaagctgtttgacggcaaggatgggaggcccaagtaccctcgccggtgggtgattctccctccgttcctgtgaagaggcggtggtggtggctcactgttggtggtcggcccattgtgattcgatgtctacagacagttgtactgtactaatcgtgcctgtttagcggttgaacttggattccgttgtccgaagtttctaatccgaaagatggatttcattttcttcttcttcttcttagcattatgtcactgtctcacgtcgtcctgtctcaatacagtctaaggttcatgtgatgttatccccatttgtccacgcagaagtgaagtgaatgcagtcactatttcgattcgac

SEQ ID NO: 108185 - DNA, 320 bp, Zea mays
  unsure (1)..(320): unsure at all n locations
  Clone ID: MRT4577_30159C.1
ttccncaacctccgcagccggtccaccgtcntccantccggctgccgaatcgaancgtcccgatccagatcatgagtgatggatngacgcgnacaagcgccagagtgggatncagcagttgctggctgcggagaagaggctcagcaaattgtgaatgccgctagagtgccaagtcagcaaagctcaggcaagcaaaagangaggtgaacntnttttagccgatacctgcccagatngagctgatttcagagnaaggtgcagagacancggcgantcggtgcaaagtcagcgttcnngannaaaggcgcgagtcgaacaat

SEQ ID NO: 108186 - DNA, 1454 bp, Zea mays
  Clone ID: MRT4577_3015C.1
cggtccggaattcccggttcgacccacttgtgccggtctttcccctttcccctctcgcctctgctgccctcgccgagtccacccaatcccccgcgcggcgacgctagtcgcctccgatggcagcccggcgcgggccccacgtcatcaagcttcacgatcccaacccgcccctcctcggacgggcgccgggggccgcgccggccgccgtccccgcgtcctcgcgcgatgagggcctcctcgcgcagcacctgcgcgcctccgcggcgcacccggccttcgccctcatcgaggagcgcctcgccgcccgggaccaggatatccaggagctcctcgtcgacaaccagcggttcgctgccacccacgtcgcactccagcagcagctcatagcggcgcaacacgagctccgggcggtctccgtcgccgccaccagggcgcgcgccgagcgggagggcgaggtgcgctccctggccgaccaggcggcgcatatggaggctgaggcgcgggccatcgccgctgcgcgcgcggagatcgaccaggtccacgccgacgtccaggtgctcgccgcggcgcgcaccgacctcgtcaacaggctccaggtcctacgggagaagctcgcgcacaagaaggctgaggcgagtaagaccgattccgtccgtccccagattgaaaccatgcgccgggagatccagaacggcagagctgcggttgattttgaaaagaaggcacactctgataacctcgaacaaagtaaagcaatggagaaaaatatgattgctgtggctagtgagattgagaggcttcgaggagagcttgcaaatgctgaaaaaggggccactgctgtcaacccagcagcagctgttggtaactctgggtatgctgcgccttatggcaattctgcgtcaacatatactggaatgtatggcaatcctgatgcaacgtataccgcgcaggcttatcctgacgcttatagcactaatcagggtcacatgcacaccgtcgccaatccgcattacatgagtcaacctgttccctatggacaatacgagagccagcacaccaatgttcaaagatgactggctgcaagagatagctttgactcgccctgccatctcattgtaaaaggatagtcgcagaatccaccatgttacattgaaagtgctgaagtcctcatgttcatgatttttttttatttatttggctaatttgttccagaatcgatgggttgaattttggagcaaaaacctctcgcgcctctccatgtactaccataacgatttgtcagttaattctgcagattggtgtggtgttattcagggccgaatgatgcctctagccatttgtgtacatacgtataaatgaactaggtgagtgcccgtgcgttgcaacggaaccgtataataacccgataacttatggacatatgtgtgttatattgttatgagaaaatgtttcag

SEQ ID NO: 108187 - DNA, 306 bp, Zea mays
  Clone ID: MRT4577_30160C.1
ggggtacatagcgcgctagctacataaagtgtctagctgaccgctgtgggaaaaggatgtgcggtaacactcccacacacaatgcgagacgtgagcatctatcgcaaagcttgtcaagcctaattagacacctaacatacatatattgtggtgtgctaactgcccgcttttagcatgcatgacctgatcctcttttaggttatggactggacaacaagcccttagagtccagtaggatactgtgacttcttacgcttcctccgtgaatatctccatgaactagaacattgagtttctgatatcgat

SEQ ID NO: 108188 - DNA, 397 bp, Zea mays
  Clone ID: MRT4577_30161C.1
aaaaagcaggccccaaacggaattttttttcccgcccgggggaggggcgccccagaaaaaccccagaaaaaaaaaattgaaaagttccccaccccgggggaagtaaagaaaaaaacattgaaatttgtcatgtccccaacaaaaaactccccttgccccccttaaaaaaaaacggctttaaaacccccaacattggaaaaaagaaaacggcccccaacaaaaaaagcggggggggcagtggaccccccatctcgggttggacagctatcacctttaaaaaattctaaatctgggggggggaaagttccggcaaaagcaccctgggaaaaaaggaaaaacttgggggggtggaaaaaatggcgaaaagggggccgctaaccaaccccggggaaaagga

SEQ ID NO: 108189 - DNA, 357 bp, Zea mays
  Clone ID: MRT4577_30162C.1
atcaattttagagttaaactcattacgagacctatgacactgcttctgttaatgctagtatgtgaaaatggccagagtgaaacccacctgacataatttgtcaattactaggtacatccataaatttcttttggtcataggcttttgatatggaccatgaaacgggctgttagttccagattggctggtaacatcaaatttgattatttgatggatgatcagaaacagcagtcatatcctacagaagccttgtgtggagattaaatatcatgtgtcatgactcttagcatcttcaaggaacttatctatatatttatttgttttttatatgcatgcttatttggtttaaccaaaaat

SEQ ID NO: 108190 - DNA, 323 bp, Zea mays
  Clone ID: MRT4577_30163C.1
aaccgaaagggcccaaaagggggggccggccatttttgggtgaaaaaaaattaaccccccacgggtgggttttttttctttttttttcggggggctggttggggaaaacaaaaaaacctgacccccgggtgatctagctggatgataataatggtaataataagcaaacggaacaaaaggaacaatggtttttaaattttttgggggacccttgaacgaaaccaaacgggagggaacgggcgccttaaccctaaagggttccaaaaaagggggggttcggggaacatgggggggaccaccttggggtccattttggaccccgg

SEQ ID NO: 108191 - DNA, 372 bp, Zea mays
  Clone ID: MRT4577_30164C.1
atgccgtcgacaatcgcgtccctggtgcgtgtgctgcagagcgcgacctcgcgggaggcgcgtgtcggcgcggcgatgctggcggagtcgctgctacgcaatgcggtgccggacgcgtgggcggcggtggcggattctgaggagctggtctgcctcaagggccccgtgatgcgaagaaaagcggcctggacaggctgccgtggcagccggatgtcgtgccttgccgccgtcgcggcgcgcccgcgtcgagatggtccagctgggggagtgggagagaacacagaacaggggtgcggggccatgggatcgacgcgagagggggagggggagcgggggcatgattgtggtctacactatcgacttaatagatag

SEQ ID NO: 108192 - DNA, 246 bp, Zea mays
  Clone ID: MRT4577_30165C.1
cctctatctataactagtaactagtattgagatcaaatttccctcgaccatgactcccatggttcatcttattaaaccatgctcaccaagtttccatttatattaacattcgacctggccatatacatttactacttcacattcttacataccaagtgaccttaattgccttatcctaccgatctgatcccccttaagcattctctgtcgctagtacataatctgtttgctttcataccagatcaa

SEQ ID NO: 108193 - DNA, 489 bp, Zea mays
  Clone ID: MRT4577_30166C.1
atacattcttttttttttgtttttgggcggactaggcgactaattaaggcatgcaaccttaacacaacctgtaactttatactgaaactcgagcataattaactaaaaagcacacccaccgaccgcgggggaattgagtacaaaacctcaatgggatacacatacatgccgccgcaaagcaaaacacggcacaaaccccctatctatttaaatccacccctttgtatgcctatgggcccccaaaaactaggcgttagaggcactttaactccaggtttacctccaatgcttacgcatccacaggcgcccacacactgaatgctgacagctaaaccttgacggactcagcgaccatttccttacttgaaaccgggacaaactcagtctctgcactaggctgaggcgggcctctcaaacgctcatttaaaagaaaagacaatgttattacggcatcctaaccaatggttgaacatgaaacatataaccctt

SEQ ID NO: 108194 - DNA, 2467 bp, Zea mays
  Clone ID: MRT4577_30167C.1
ggccatcctgcctcggcagccgtgcgcaccccacccacaccacacactctccgtctccgactacgaccatggtccatccatggcgatcaactcaaggctgacaaatccattcatccattattatattattatatactgatgatgactcgtgcaactgcaggcggtgtccgacgaggcgcgcgccatgtacaacggcgggcgggcgggcctcaccttctggtccccgaacgtgaacatcttccgggacccgcggtggggccgcggccaggagacgcccggcgaggaccccgccgtctcggcgcgctacgccgccgcctacgtgcgcggcctccagcagccctacgccgccccgaacggcggccaccgcaaccgcctcaagctcgccgcctgctgcaagcacttcacggcgtacgacctggacaagtggggcggcacggaccggttccacttcaacgccgtggtggcggcgcaggacctggaggacaccttcaacgtccccttccgcgcctgcgtcgaggacggccgcgccgccagcgtcatgtgctcctacaaccaggtcaacggcgtgcccacgtgcgccgacgcggcgttcctgcgcggcaccatccgcgggcgctggggcctggacggctacgtcgtctccgactgcgactccgtcgacgtcttcttccgcgaccagcactacacgcgcacccccgaggaagccgccgccgccacgctccgggccggcctcgacctcgactgcgggccgttcctcgcgctctacgccggctccgccgtcgccgcgggcaaggtcgccgacgccgacgtcgacgccgcgctcctcaacaccgtcaccgtgcagatgcggctcggcatgttcgacggggaccccgcggccgggccgttcgggcgcctgggccccgcggacgtgtgcaccagggagcaccaggacctggcgctcgacgcggcgcgccagggcgtcgtgctcctcaagaaccggcgcggcgccaagcacaacagggacgtgctcccgctccgccccgccgcgcaccgcgtcgtcgccgtcgtcggcccgcacgccgacgccaccgtcgccatgatcgggaactacgcgggcaagccctgccgctacaccacgccgctgcagggcgtcgccgcgtacgccgcgcgggttgcgcaccaggccggctgcaccgacgtcgcgtgccgcgggaaccagcccatcgccgcggccgtcgaggcggcgcgccaagccgacgccaccgtcgtcgtcgcgggcctcgaccagagggtggaggccgagggcctggaccggaccacccttctcctccctgggcgacaggccgagctcatctccgccgtggccaaggcgtccaaggggccagtcatcctcgtgctcatgtctggcggtcccatcgacatcgcgttcgcgcagaacgaccccaggatcgatgggatcctgtgggtcggctaccccggccaggccggaggacaggcgattgccgacgtcatcttcggacaccataatccaggtgcgaagctgccggtgacatggtaccatcaagactacctgcagaaggtgccgatgacaaacatggcgatgcgcgcgaacccggcgcgcgggtaccccggccggacgtaccggttctacacgggcccgacgatctacccgttcgggcacgggctcagctacacccagttcacgcacacgctcgcgcacgcgccgacgcagctcaccgtgcgcctctccggcagcggccactccgccgcgtccgccgcctccctccccaacgcgacgcttgcgcgccccgtccgcgccgtgcgggtggcgcacgcgcggtgcgagggcctcacggtcccggtgcacgtggacgtgagcaatgtcggcgaccgcgacggcgcgcacgccgtgctcgtgtaccacgcggcgccctcgccctcgcacgctgcccccggcgcggacgcgcccgcgcggcagctggtggcgttcgagaaggtgcacgtgcccgcgggcggcgtggcgcgcgtggagatgcgcatcggcgtgtgcgaccggctcagcgtcgcggaccggaacggcgtgcggcgggtccccgtcggcgagcacaggctgatgatcggcgagctcacgcactcggtctcgctcggcgtcgagcagctcggggtataaccggatgcttgaacggaaggtggaggatccagagtaataattgtgatgtgatgtgttgtttcgggtggggggtattattggcttctgattgccggggtgcttgctgctgtctctgcaaaggtggagatgggagatgtagaaggcaccggattactgaaaattgctggattgaaaacgaaaacgattgaaatggaaggaagacagaagaatgttgtttccctcctcaaaaaaaaaaaaaaaaaaaaaaaaaaaaaaaaaaatccccgatgtttttttctgatctttatctaaacaaatccaatgctttcttacgtc

SEQ ID NO: 108195 - DNA, 790 bp, Zea mays
  Clone ID: MRT4577_30168C.1
ggtccggggtacccgggcgcccgggggtacttgttgagcgcggagagaggagaggcgcagagcatcgacgatggcgagcggcagcatgaagagggagatcagcgagacccacgacaccctccgcttcggcctcaatgccggcgtcaaggccgacctcgcgccgccgcacccgctccagtccagcatccaatcggaggccaagttctgggcggacaagaagaagtttgggacagaggccatctacggatccgccttgaacatccgcaaggatctcgatgcccaaatcctctcaaggttccaaaggccccctggtgctttgccatcatctctgcttggatatgaggcactgacaggttccctagatgattttggttttgaagattatcttaacatgcctcaagattttgaaggtttccgtcaacctgacatgcaccacggaatggaggttcgccttggtttgtccaagggacctatctgccctagcttcagttgaggcagtgaatgtagttcagcggttctgccgcacgttgatgcaccttagtccagtacactcgggtcaataaaagaccacattaggatggtgaaacggtgaaaactgatggcttgcatatgatcaaagtgttttgttgtaatgaacgcatattgcgaagcatcgcagttgagcttcaggatctctacagctgcaggtggcttcttccgtacttgaattagagttggctgtgaattgcaatccttttgttttccataggaatttttaaagaaaattgatgagattaaatcctgtgtttcg

SEQ ID NO: 108196 - DNA, 501 bp, Zea mays
  Clone ID: MRT4577_30169C.1
cggacgcgtgggggggacgtcgtggaggagctcctcatcggggtgggccgccggggcgagcccgccgcgcacgccgccgcgcccttcaagggcggccgcgccgcgctgcagaagctcctgcacgcggcctacaagcgcggggagacctccgtcgaggtccgcgtgcgccgctcctccgcctccgcgcagctgcagcgccagctcgtcgccggcgacagcggggagctgcaggtggcggacgacgcggccagcatgcaggcctgcatcgtgccgcaggagtccgtcggcgggatcggccggacccgccactacgtgctccgctccatccgcgaccccaacttcgccgtcggcctcgtcgaccgcatggagagcgagtgcatcgccatcagaggctcgaggagtcgagggttggtgtgcgcgctgagcaaggcgcagctgcaggacggctatcgtgtctacccgtgggagaagaagatgcgggaggtgctaccgatccccaac

SEQ ID NO: 108197 - DNA, 203 bp, Zea mays
  unsure (1)..(203): unsure at all n locations
  Clone ID: MRT4577_3016C.1
cccttcgcctggggggcttcttgcctcctcgtccgcttgcccggcggggggcggtgtccccccgcgggcggccttggcctttcgcgggctttgcctcggtccctttctgcgttcctgcngccctcgcgttgggctccctggggctccctgtgccgcggcctctttcccgcgtcggcctggccgccccctcgttggccttgtgg

SEQ ID NO: 108198 - DNA, 832 bp, Zea mays
  unsure (1)..(832): unsure at all n locations
  Clone ID: MRT4577_30170C.1
aaattcttcgtttggaaaccgtcgcgtcgacacgcacggccaatctcagcagtgagcgacgttgtctcgtcccgactgggtccctccgacgccaagccaccgtcggtgcccatgccgccgagacctccgcttcccctctccgccgccggcgccgccgtcgccgtactctccgtcctcctcctcacggcggaggcggtgcccttcgtcgtcctgcacgggattggggaccagtgcgccaaccgcggtgtcgccgagttcacccgcctcctcgccgactggtccgccgccgacggccactgcctagaaatcggaagcgggacatgggactcctggctcatgcctctccaccaacaggtctgcttccacttcaaccagcacagtttttttgtcatatttgtccatctgtacaaaaataatcagaatctttgtttgctctaactgttgtaaaatccactaaccatactgttttccctatacatgtcattttttcaacaggctgatgccatttgcaacaaggtcaggtgatcgattcggcgcttcgggccctgatgatgttctttcctctgctgcatgctgggtagatagagatattcatcatccctgcctgcctgcctgcctggtaatttgtttttgcaggtgaaggagatgaaagagctgagcggcggctataacatcgttggcctgtctcaggggaacttgattggncgtgcagtgctccagtattgtgatgatggaccaccggtcaagaattccatctcactcgcgnngcctcatgctggcaccgcttccgtggcgcntttgtgggtctggnattttctgtgttattgctgat

SEQ ID NO: 108199 - DNA, 264 bp, Zea mays
  Clone ID: MRT4577_30171C.1
ctccttagaggaaggaagaaaatccttaacccttacttccttactttattgagaaccggcccttcttttttcatatgaacgaccgtcgggccccccccggccggatcgatatggatctatacgcccaccaagtgcgcaagaccgaccggaacttacttgcgctctgcacggacgagaaaggcgggggcaagtccgggcaggcagtccactacataggctggatcttccaccgagcgattcccccgttcatgtatcagggcgggg

SEQ ID NO: 108200 - DNA, 717 bp, Zea mays
  Clone ID: MRT4577_30172C.1
agcgcgcgaggagcaggcggagagcatcgacgatggcgagcggcagcatgaagagggagatcagcgagacccacgacactctccgcttcggcctcaacgccggtgtcaaggctgacctcgcgccgccgcacccgctccagtccaccatccaatcggaggccaagttctgggcggacaagaagaagttcgggacagaggccatctacggatccgccttgaacatccgcaaggatctcgatgcccaaatcctctccaggttccaaagacctcctggtgctttgccatcatctttgcttggatatgaggcactgacaggttccctggatgattttggatttgaagattatcttaacatgcctcaagattctgacagtttccgtcaaccggatatgcaccacggaatggaggttcgccttggtttgtccaaggggcctatctgccctagcttcaattgaggcagtgaatgtagttctgccgcacgttgtgcacctcagttcagtactttggtcaatagaccatattatgatcgtgaaacgtgaaaactgatggcttgcatctgttcagtgttgtgtttcaattaacaccaaatttaatatttttctagtttgaacttcgattccaaatttaatagtttttttcgcaaaaaattgtctggtactattaacccaagaacggtacttttaaaccaagaacgtttgaagaacgtattcttttttc

SEQ ID NO: 108201 - DNA, 378 bp, Zea mays
  Clone ID: MRT4577_30173C.1
gtctgtccacctatggctcgtggaggagccaaagacatacatgcggcaacctctaacatggcgacgggggctgatgctgctacagccatgtgctaggttccaggcccgaccggaatcatgcggcgccgcgcattctggacatggaaaaaagacgatgcttcgcgcgtagattattgttacgtcgagcatgtcgctagggcgtgcgacgcggacgtgcacagcgagaatctggtcgggcccgacaggtcggacagcgagctggaggtggccgaggacacctacgtgctcgacgccgtggaggaggccagactgtagctgccctactcgatccgtgccacttcgtgcgcgacgtgcgcggtgaagctggcgtgcggcaag

SEQ ID NO: 108202 - DNA, 942 bp, Zea mays
  Clone ID: MRT4577_30174C.1
gggaccctcgaggccggccgggacttgttgttgagcgcggagagaggagaggcgcagagcatcgacgatggcgagcggcagcatgaagagggagatcagcgagacccacgacaccctccgcttcggcctcaatgccggcgtcaaggccgacctcgcgccgccgcacccgctccagtccagcatccaatcggaggccaagttctgggcggacaagaagaagtttgggacagaggccatctacggatccgccttgaacatccgcaaggatctcgatgcccaaatcctctcaaggttccaaaggccccctggtgctttgccatcatctctgcttggatatgaggcactgacaggttccctagatgattttggttttgaagattatcttaacatgcctcaagattctgaaggtttccgtcaacctgacatgcaccacggaatggaggttcgccttggtttgtccaagggacctatctgccctagcttaagttgaggcagtgaatgtagttctgcggttctgccgcacgttgatgcaccttagtcaataaaagaccacattaggatggtgaaacggtgaaaactgatggcttgcatatgttcagagtgttatgttgtaatgaacgcatatatcgcatgattggtagcctggctagctgtgcgcaggcttagtggaagcatagaccggggtgcaggtcggcgcgagctcggctcttatgggtgcatgaaccaatcacgccgattgcgaagcatcgcagttgagcttcaggatctctgcagctgcaggtggcttcttccgtactcgaattagagttggctgtgaattgcaatccttttgttatttttctctaacttgtacggaggaaagcaacccataggaaattttaaagaaaattgatgagattgcatccccaaaaaaaaaaaaaaaaaaaaaaaaaagggcgaccg

SEQ ID NO: 108203 - DNA, 324 bp, Zea mays
  Clone ID: MRT4577_30175C.1
cgtccttttttttttttttttttttttttttttttttttttttttttttttttatcaaattggtccacgcaaattgattgttttacgaactgaccttacactcgagcacaggacaaaacatagcaaatccagatccacggtatcggtcccagcctgaaaaggtacataaaagagctacgggtataatgcttcgaaaggatgccattattagcaggctaacatacttcactggttccttgccgcgacaatgttgtcagcctttttattacaggctcttccttttctgacagaattagctcaatgtggcaaggggaggacatgtta

SEQ ID NO: 108204 - DNA, 1028 bp, Zea mays
  Clone ID: MRT4577_30176C.1
tgttcggggcagtgctcgcaggccgggccgggaaaagagcagaccctgcgtttccttacttcctggtaaagaaagaagcgaagccaggtacttgttgttgagcgcggagagaggagaggcgcagagcatcgacgatggcgagcggcagcatgaagagggagatcagcgagacccacgacaccctccgcttcggcctcaatgccggcgtcaaggccgacctcgcgccgccgcacccgctccagtccagcatccaatcggaggccaagttctgggcggacaagaagaagtttgggacagaggccatctacggatccgccttgaacatccgcaaggatctcgatgcccaaatcctctcaaggttccaaaggccccctggtgctttgccatcatctctgcttggatatgaggcactgacaggttccctagatgattttggttttgaagattatcttaacatgcctcaagattctgaaggtttccgtcaacctgacatgcaccacggaatggaggttcgccttggtttgtccaagggacctatctgccctagcttcagttgaggcagtgaatgtagttctgcggttctgccgcacgttgatgcaccttagtccagtacactcgggtcaataaaagaccacattaggatggtgaaacggtgaaaactgatggcttgcatatgttcagagtgttatgttgtaatgaacagtgttatgttgtaatgaacgcatatatcgcatgattgatagcttggctagctgtgcgcaggcttagtggaagcattgactggggtgcaggtcggcgcgagcccggctcttatgggtgtaggaaccaatcacgccgattgtgaagcatcgcagttgagcttcaggatctctgcagctgcaggtggcttcttccgtactcgaattagaggtggctgtgaattgcaatccttttgttatttttctctaacttgtacggaggaaagcaatccataggaatttttaaagaaaattgatgagattaaatcctgtgtttcgaaaaaaaaaaaa

SEQ ID NO: 108205 - DNA, 245 bp, Zea mays
  Clone ID: MRT4577_30177C.1
gttgtaatagggtaaaaaacgcgggttttcccccagggcggataaaaatttaatagaattttgtttaagcggtagctctaccggaactatggcctattcaatgatagtcacctcctcttgggcctcctggggctttttgtccgccacgttcccaagtttgaccacacggcccacgcggaccggctcatttttttattccaggagccaaaaccaaaacacgccttccctattttttttttaaaaag

SEQ ID NO: 108206 - DNA, 256 bp, Zea mays
  Clone ID: MRT4577_30178C.1
ggcgacgagtgtttcatccgactgcacgcctcgtacgccaggcttgcggaccccgacgagcgcgcgcgctatgaccgggcctcggtggttcggagcctgatcagggcggggcctttggggtgcggggcagggttccggcctttgtggtgggagacagaccagagctgtttgcatcgtagcattctccacatatacgtagttgcgccagcgtgtgaccgagagtcacggtacgcgctccgtggattggtgcggtccc

SEQ ID NO: 108207 - DNA, 425 bp, Zea mays
  Clone ID: MRT4577_30179C.1
aaatctatacaagagaattaaataaaaaaaagcctataaaagcgttccatataccgggggcaatcttagacacgcgcgcttaccaactcctagctcttcatatatactcacctaaattacaatacactcatcattatcaccacaacgatttgactggaaaaactcatcacttcacccaacttaatctccttgcagaacatcccactactgccatctacataaatctctacaaggcccccacccttcaaccttcacatcagccacccagcctaaatcctgactgacactctccttaccacgcaccatatactcccgtgcaaacgttctctactcgcattataacccatacaattgccacaagtttatctcccgtttctttccctttcttcccatcctatctcatcacgttatcattctcttcccct

SEQ ID NO: 108208 - DNA, 670 bp, Zea mays
  Clone ID: MRT4577_3017C.1
ccggccggggcaaagattgattccatctaatccctatctctctctctctctctctctctctcaagccatcggctagggggtacaccccaaccagcgaagaatgacgaggggggcataaccccgccagctgccacgggccgagactacgaactttgtagtcgaggtccgacgtccttgggcacgtacgcccttgacaggcaattctctggaagggctaatcattgagatatctcttctacttggccctggacggctagctccgcctacaactgcgtggacaacatcccgcccgacatcatctcccagctcctcgcattctccaacaagttctgctatgagggcctgaagccaacctacgacaaccgggttgcagccatggtgcggggtctcgacgatgcctgatccctcatcgacattagccactaggaggcctcccacctcctcgtcgcctcgtgcctctaggcgcttctatgggagaccccgaagtagctcacccacctagacatcgcgcgtgttgttataggagtatcttaaattgcatagtgtttaaaattgatcacgcgttttgttataggagtatcttaaattgcatagtgtttaaaattgattttggtggtaagtatgtcacaatatagtcagtttttttaaaaaaaaaaaaaaaaaagcggcc

SEQ ID NO: 108209 - DNA, 1925 bp, Zea mays
  Clone ID: MRT4577_30180C.1
gattgggtacctcgaggccggcccggcatccggcccgattcgactagggttttagcactcccagtcccggctcccgccgtcgcctcgacgcttcccccctcttcctccgccgccaacccagcgagagagctcccagtccgcgaagacatggcggggaagaagcgcaagtccggctccgagaagccgacgaagcaccgcctcccgctgggagccgatgccgacgctgtcgccgaagcctcgaagcgccgccgatcgggcgccaccaagcagcaccaggcggacgaggaagcgtccatcccgccctctctcagcgccaagatcctccgcgaggcgcgcaagcagcaggaagaggagatgcgcgccgactccagcgacgaacagcgaccctcagccgtcgaggcgaccgcggggccgtccacgtcgtcctcgtttcccgtccccgccgccgacggcgagaatgagggggacgacgtcgatgagttcgacgggtttgacgcgctgagcgagtacgatggcggtgaggtggagatcaacgaggaggacgagaaggccctcgctgctttcatgtcaaaggacaaagctgccgagcgcacccttggcgatatcattctccagaagatcagggagaaggacgccgaggtcgcaactggtgaaggacgacctcgtgtaaaattggacaacagcattattgaactttataaagaggttgggaagttcttaagccggtacacgagtgggaaaattccgaaagccttcaagcgcataccatcgctggagtgctgggcagatgttgtgcagctaacggagccagagaattggtctcctaatgccgtgtatcaagcaacacgcctcttctcttcgaacatgaacacaaagaatgctgagcggttctatgaagccattttgctaccccgtgttcgaaatgacataaggaagaacaagaggctgcattttgcactctaccagtcgctgaagaaggccctttataagcctgcggcatttaacaagggaattttgctaccactctgtcgggaaaggaattgcaccctacgcgaagcagtgattattgggagtattatccagaaagtttccattccatttctccatgcaagtgtagctctagtaaaactagcagagatggagtactgtggcactacaagttacttcatcaagctatttctagacaagaaatatgctttgccataccgtgcacttgatgcagtgcttgcccatttcatgcgttttgttgatgatgagaggatcatgcctgttatatggcatcaatcactgcttgcatttgtggaaagatacaagaacgagttagagaaaaaggataaggagaaacttgcacgtttgttggatcaccagaaacactatttagttactccagaaattcgaagggagcttcgagggagctgcaacaggggtgaaaaagatacaaatttgcatactttgtcacctatctccgtcattaccaagcctatcgaggaagacaaatgggacgtaccacaagtgccaatggaggaagattagccagattctccaacatcgatttttacacttcatttgtttttgaattaaatttctaaagatattgctgtattttattgggcgtgaacttttagtgccaatattggggtaaaataggttcccagtagattgggcccccaatgttctgagggcattttgcagtcggaatgtgattcacacacagaaaagtttgttttgatcatttggagcattccaagggggcattcagcatggacatgtagcatactgtatttcgcagaagtgggtaagaaatggttgatcatgttactttgtagctgcgacaactaaaggtgtaccatacttgaaccagaaatgaaaatgaataacccggagttcgtttggtttttttttgttcaccgcggtggcggccgctg

SEQ ID NO: 108210 - DNA, 419 bp, Zea mays
  unsure (1)..(419): unsure at all n locations
  Clone ID: MRT4577_30181C.1
tcgttgtggaggtggtgaaggagccgtatcgtgagagctccgaggcggagacgaagaagaagaagcctgagtaggagcaggtggactgtgccgcaaagaagaagcagtccgaagcagagtttttaaaggaggtggagatagtggaggctaagacagacggcggtgactgtgagggagctgagacgaagtacgccaagggcgtagcagtagatgcccgcaaaggaagcccctgtccctgacggcgttgccaatgactaggacgaggcaaagaagagcgacatggtcaaggacgtcggcacggaggagcctgccgtcgtgacacgnacaggtcctccttctggtgccggcgtcggcgccaaaggactcgtacgagcatgagtaccggtcgcctactacgccacgcccgtcattcggtgctg

SEQ ID NO: 108211 - DNA, 333 bp, Zea mays
  Clone ID: MRT4577_30182C.1
tttgggctgatttatgtgcttgtttatgtgcttgaccgcccccgctctcacggaccatagtcataatagctcaaacagtcgaccgcaacttgaagtgaatagcttaaatagctctccgccccgagccattaagggaccccccgcgcgatctcgacaaaagacgcaatcgaacgccccaccacagcccacattacccgaattgcatccccaccgtctgttaaaaaaaaaaaaaaaaaaaaaaaaaaaaaaaaaaaaaataaaaataaaaaaaaaaacgacaaaaaaaagataaacataacactctataaaacaaggatacgcattaccgaaagc

SEQ ID NO: 108212 - DNA, 344 bp, Zea mays
  unsure (1)..(344): unsure at all n locations
  Clone ID: MRT4577_30183C.1
cccgggtcgccccgcgttcttttgcatccaagcagcttgtgtgtaggcacttcttgcnnagaagaagagaaccccgtcgtgcagacttgngagagagcttattcntgtccatccccatttccatggcgaggtggctagcctccgcttcctgtcccctccgatcgtctcgncgtccttcgcggcgcgccnccgcgtgtgcntggcnctgccgcctccttcctncttccccggcgtcgtcgcttcccttgcngcccttgtcggcggtgtcgcggtctgttttgctgtgcttgnctccttcgtcgtcgtcccgggcgccgttgccgctgccgccgcccgctgccgcc

SEQ ID NO: 108213 - DNA, 2015 bp, Zea mays
  Clone ID: MRT4577_30184C.1
catttgctttcactgttggagaaagccttggaagaggaagaaaaaccaaccgccaattctgttgacggaattcccgacatcatacgccgtatggccgttgcatgggccgagagcccgtccgacgcgcccttatcggcgtgcctactcccgccatatgagacggcaaaagccttcccctcgttccccaatctcctctccatcgaaaccctagcacgacgcaattcccgtcttcccacgccgtgtcgccgttgctatgggcaagaagcggaagctcgagcccaaatcggcggcagggttcacgccggttaaggcctccccgaccaccaggtctgccaccgctaaggccgctggtctatccgaggtcctcgcccccgtcgaggctacgatggagaagctgccgcagggggcaggcggcgaggatgtagaggaaatcgaggaggtggaggtcgaggaggaagtggaagtggaagaggaagaagaaggcgagagcgaccaggcttcgatccaggcgctgctggattcgttccccaaggaccagctcgtcgagctgttacgcgacgctgccatcgctcacggcgacgtgctaaccaccatccggcgcgtggccgacgccgacccggctcagcggaagatcttcgtacacggcctcggctgggacaccacaaccgacaccctcaccgaggccttcggcccatacggcgagatagaggatctcaaggtcgtcaccgaccgcaacacgggcaagtgcaaggggtacgggttcatcctcttccgtcaccgctccggcgcccgagctgcactacgcgagccccagaagaagattggtaaccgcagcaccgcctgccagctcgcctctgttggccctgtccctggtggtgcgcccaacagcgctgcaccagccccggttcaattgcagttgccaccagtgtcagagtatacacaacgaaagatatttgtcagcaatgttggtgcagatatcgatccgcagaaattgcttcagttctttgcgaggtttggtgagatcgaggaaggcccgcttggtcttgacaaggtcactgggaaacccaagggatttgctctttttgtctacaagaccattgaaagtgccaagaaggctcttgaggagccacataagcattttgagggagtgatgctgcactgccagaaggcgattgatggaccaaagccgaacaaattaggaggagctggaggttttttcggtgctggagcttcaagtgggggcaaggggtttgctggttatggagctactagtcattctctgcccggaactgttggtattgtccagccaatgtcacctctggcacctggattggcttcattgcctggtggtatttctgctgccccaggtgtggatcctgctctggggcaggccttgacagctttgcttgccacccagcaggggggtgggctgagttttaatagcattctgggggtcggtgctaatggatcggggttgcctccgcaggggccaactggtgcattgggtggtagcagcgtgcaggggatgcaaggtggttatatgggtggctacggtggttctggtgggtatgggggtgcttcttcaggaggccctggaagacattacatgggtcattaggatgattataactattttactgtggccagaatgccagatgattctacatgttcctgcttggcacttataaacttgctgttttaagctgtttctggctactcaattatggctgtggtcaaagttttcataggaactttggttccctccacctatcatttcaaaacgaaattaccgtttagattttcaaaagggcatcttatggctgcaagactattgtagaagacttcatgtggatctaaagcattgtggtatttaatgatattactgtttttgtacggttttcaaaaggccaaattaaggcttgcaaaactattgtaaaagacttcctgtgggtttaaagcactgagctatttaatcacaacggttttgtttcataaaaaaaaaaaaaaaagcggcc

SEQ ID NO: 108214 - DNA, 441 bp, Zea mays
  Clone ID: MRT4577_30185C.1
aaaacaggcctataaaaaaattttttttcccaaaatcgggggggggggcaaccatgctttatctaaaacttcgggggggggggcccgaccgttttttatgaggcccggcacaagaccaaaaaaagtttgggttaagggccccccgtccgggatcccccaaagccccaggcgggggccaggggtcaaataaaaattatcagggcttcaggggaggggaagggatcggagaacctccttaaccatgaacagaacacacgtttttttggggggggggggggtttcccgggggagggccgggcaaaaaaaaaaaagcgggagttttggaaaaaaattccctccttggaaaaagctttccaaggggttcgtttttaaaaaacccaaaaatttcccctttgactaaaaaaaaaaaaagcccccaacgggcccttataaaaattaccc

SEQ ID NO: 108215 - DNA, 314 bp, Zea mays
  Clone ID: MRT4577_30186C.1
aaaacacaatcccccaatcaatctatgttgtctttttattagcaaggccaaacacgggcggtggtactctctcaacaaccggagaaagatcatgcgatccactgatcgcctactacaggctcccatcacaacaatcgtacatgccccaatctgtgtttaaccctgatcgttagactatgccacaaaatctttgctttagttcacgcccgcgcaactatgtccattgcacctaacactgtaaccatgattgcgcccacatacttatcctcacagcggcaggaacactactagatatgcactggtgttcatcaagc

SEQ ID NO: 108216 - DNA, 158 bp, Zea mays
  Clone ID: MRT4577_30187C.1
atagcatgctatgattctaacactgttttattgttatgttaattctggacatttttcacagaaccatctttgtagcatttccctttttttatcctcgctaacaaatgtaaaaatacggatcttgtgatgctgtcttagttatttgatctggtgagctg

SEQ ID NO: 108217 - DNA, 264 bp, Zea mays
  Clone ID: MRT4577_30188C.1
tccgggaagagagctagagatggagacggctgagtgattaataagcgctaagtaaatgcgccctccctgcgacctttaaccacaagccagaagcgtgaggacgagactattgggcgcgctccacgtacccatccgtccgtggcagtggcaagcagcaggccgcgatcacatcgtgccgtgcagctcgtgcttgcagacggagcattattctactcgtttgcttcttcttctttgatataaaagataaagtgttggttttagttc

SEQ ID NO: 108218 - DNA, 169 bp, Zea mays
  unsure (1)..(169): unsure at all n locations
  Clone ID: MRT4577_30189C.1
cgctgtnncggggcagcccccgccgctgaccgctgnngccgagttcaaccactcggcngnngcagccagggaccttctacccgacatctcnnggtcatcgaccggctacccaaccnnncgccatggcccttctcnnctgcagcaccgnngcgtgcggcttttggtgtgc

SEQ ID NO: 108219 - DNA, 427 bp, Zea mays
  Clone ID: MRT4577_3018C.1
gctcaaccaaaactcatatagcttcaatatggaaaacacataaacaatgggtattgtgcaacgctagatctcagctaccacaatcaagtagcttagtggagtggcagcaaatgggtctgctgctaactgatagaaaattaaggaaaaaacataagattgtcaactgttgtcacatgattctctataataataaagtaaggaacgatgttgttctaattgcgtttttacgaaatataaagtttgacgattctgattggaccatgtattcttgcagcataaacagaaacaaaaaaataagaaaaataatgcaggaagagaatggctcgtacctgttgggagtgccagccgctccgccatagcggtggacaccctcttcaccatggatagcgccaccccagcagctgtgagagagatgtttaccctctcg

SEQ ID NO: 108220 - DNA, 217 bp, Zea mays
  Clone ID: MRT4577_30190C.1
gcccttaaaaaaagctatttgcgggctacaacaggcaaagatagccgtaaataaaggctaagtccactgctggggggggggccaggagcccaaatcaaaacaggcagcacccccacttagaagatgcagccccaaaccccccaaccccgggcccgaccccccgaagggcaaactgccagccaccgggggcccccggtgggaggcacgcgcacctccc

SEQ ID NO: 108221 - DNA, 348 bp, Zea mays
  Clone ID: MRT4577_30191C.1
ccgatgctcaaggtatcagtggctccattcacacgagacatctcgtgtgtatgtttgatgtactcgtacgcagtcgacgctggcagatgtacgtagtgcagtcccatgaatggtgtcggcgacgaggaacttgatcagtgctggtggagcggacaaagcgagcagtcgcgagtatgctccccaaaaacctgatcgcccgcacacccgtgcaagtgtctctctgcgaatggcgatttcgaaggcctactctcccacactctctgtgctcgcagaaggtgggacgggaatagctgtgcgcaacgcgtctgacactgttcggtgcagaacgagtgcgtactgtgttgtcgt

SEQ ID NO: 108222 - DNA, 780 bp, Zea mays
  Clone ID: MRT4577_30192C.1
aaagcttaattgcacgttagtttttgcctttggattagaattcctaatccttttcttttaaatagagttcgcatgtttacaataccaagcacttctacagcaaccacatgtaacttgaaaaagaagtattcttgcaatattgctgctccaaaatatcgattgtttctgggacctaggggacatcaggaacaagaaatggctattcccgcttgtcctcctcagcctcatcttctaagccgaaagcactccccacaccagcatttctgtccttgtcaatttttaccatccctacttcaccatctcctttcgtcagagattgagattcctcatcgcaaagatatgcatattctggtgaagctgctgacgatgacgatgaggaatctcaatctctgacgaaaggagatggtgaagtagggatggtaaaaattgacaaggacagaaatgctggtgtcagcagtgctttcggcttagaagatgaggctgaggaggacaagcgggaatagccatttcttgttcctgatgtcccctaggtcccagaaacaatcgatattttggagcagcaatattgcaagaatacttctttttcaagttacatgtggttgctgtagaagtgcttggtattgtaaacatgcgaactctatttaaaagaaaaggattaggaattctaatccaaaggcaaaaactaacgtgcaattaagctttacatacaaccgtgctgcaattaaactatcgaaagtcatgtttttttaaatatataaattcactattattttgtgtttg

SEQ ID NO: 108223 - DNA, 648 bp, Zea mays
  Clone ID: MRT4577_30193C.1
aataaaaccccgcgcccggctgctcgctccccctgcttcctctttctccccctcctcgactcctcgtcaagctcccctgaatcgcggcagcagcaccggggcagcaaggcgaggattttcctgctccgaatctacccggctcggcccgatgggctcgctgatgtcctgcctctccgacccaatcccgtcggggaacaggtccccgccgccgcagccgaagcggcgctcctccacctcttcccgcggccgtggcggcggcgggagggactccgctaaggcctccgtgtccatagacgaggaggcgcttactgcagcagcggcgctcgtgctggggcagaggggcgcgtccggtggcctgggcgcgttcgagcggtccgcgtcggtgcggtactcggccaagcggcagagccagggcccgccgctgccccgaagttgcagcacgcggccgaggtccctcgctgaccccgagctccagccacagcaactcctagccaaggatttgaatactaaggatttggaaaccaacgtcattgttcttgttcatggtggtggatttggcgcttggtgttggtacaagactatatcacttctcgaagatagtgggttcaaagttaacgccatcgacttaacaggctcagggattcacca

SEQ ID NO: 108224 - DNA, 292 bp, Zea mays
  Clone ID: MRT4577_30194C.1
atatttttttttttttttttttttttttttggttttttttttttttttgggggatgaagccagtctggagattccttttggttatgattattcatcaaatatttgaacatgttttgaaaatgtctgattggccgttgaactatatttgaacgaaagccatcggtgttgcaacgcttcgctggccgttggactgtttctgggatttatttgcagcgggtaagacaaaaagctaacaaattttttgtctgggcactgtaagtggctgcctaaagaggatttttttgggatcaaa

SEQ ID NO: 108225 - DNA, 327 bp, Zea mays
  Clone ID: MRT4577_30195C.1
cacttcacagtcaatatgtcaaaggtagagacaggtcttcatgtgtgagaaagtatagcgagagcagatcatctttagattatgcttcagacagtgagcagtcaagtgttcaggccacacagtcagcccaggaaaaagagatgcagggccaaatggacagaacacataatagacaagacaaatacagaggtgaagacaaatccaagtctgaacgggaatgccctcattcaaaaaaaggaactttggaagagaatctttctgatcaccttagatatggcagtaagcccaaaaggtagattatgctggtcagtaatgggacctgagtca

SEQ ID NO: 108226 - DNA, 456 bp, Zea mays
  Clone ID: MRT4577_30196C.1
tttgaaaaaaagaatgaggtgggtcatttatagggagcaggacgtgcgacttcctcaaacgaaacgcatgtggctttcgtgataaggcaaatccttcgttcggtacaatcaacatattgaatctacgctcgctcggctcggtgctgaatgaactccttcattgattccgggctgctcgtagggggactgtgaaagcaagcgtaggagatcaaaatgtgagtccgatgggtaaaaaagggaagcaggaaagggttctgatgtgaattcttcttgtttgtatatctatctgcttgaaaacctaaaaattcttcccttatcacactacactttctcttccttattccatttcactgagctaagcaacactttttcacgtattcaccttagataaattggtcatattgatctgtcgtcttgttctcgataggaacttgctgctgtcttggttggtttgag

SEQ ID NO: 108227 - DNA, 376 bp, Zea mays
  Clone ID: MRT4577_30197C.1
cactgctgagcatttgatgcttctggaagctgataatcatgtggtaaactgcctgcagccacatccgtttgacccaattttagcctcatctggcatagattatgacataaagatctggtcaccattagaagagtcaaggatttttaaccgaaaacttgctgatgaagttataactcgaaacgaactcatgctggaagaaactagaaacaccattacagttccagcctctttcatgttgaggatgttggcttcacttaatcatatccgagctgaccggttggagggtgacagatcagaaggctctggtcaagagaatgaaaatgaggatgaggaataataaactctttttggcaagcacttaaatgttctgaaattt

SEQ ID NO: 108228 - DNA, 272 bp, Zea mays
  Clone ID: MRT4577_30198C.1
gtcaacaataagcctatcttgcattatcatgcaaggggagcgacgctcttgaacactctcccgtgaggacactaagggccaccttggacacaaggagagccaaaaccaagggggttacatacaattaataactaattatcttattcaaatcgcacccatatggattactcaacgaaaagacgtggtttttaagagaatttgacttgtcaaactagccctaattaatggtaactgatatcatcatcgataccagcgaagatgcaaatatggag

SEQ ID NO: 108229 - DNA, 282 bp, Zea mays
  Clone ID: MRT4577_30199C.1
ggcccctctgcagcaaaaaccagaggccgcggcaggcacggacacttcacgcgcaggccgcggactagcgccatggcgacgtgccggtgccccgagccggcgcaatgccatcacaggccgctcctctcgacggccaagggctaccctaagctgcacgaccgcccgaggccggcgcccggcagcgtcctcgccgaggtggccggcattctctgcctcaccgggccaatggtcggcgcggggatcctgttctacatgcgctccctggtgtccatggtgttcctc

SEQ ID NO: 108230 - DNA, 652 bp, Zea mays
  unsure (1)..(652): unsure at all n locations
  Clone ID: MRT4577_3019C.1
gtaccggtnccggnnattcccggggcgccgttgngtaatgctgagccccaccacctgccgcgnatgcagnaccgcgcacggtagtgggtcggctcccgctggcaccgcggccaggtaggtgtcggcggagatcgccagacccctaagctccaggtgccggattacgtcacatgagagagcgtgaagcgtgactggtgcgtcgtgcacgtgctcatgctgacacccgacttacaggccctggagctctactcccaccagtgtctgcatgtcaaggcaagttgctcaatggagtagtctggctgagaaactcgacaggctgcgagaacgactgcctgttcaatcctgagagaggttctttccaccgctctggactgcgtctatgagggcgaggggagtagccccggagcatatggagggatacaggaggcaggtgattctagctatacagtttgctcagcaagctattgtgtgttattggcagtagctgctttctcaggcagacagcagctccctgtctctgagagaaacctgtgttgatcagtgtgtcttttgatgtggaaaatccttgctgttttcgtgttaattcgggagtttcattgcccagctctcctatgggactggcatctctttcgcgttggcatcgacgctatat

SEQ ID NO: 108231 - DNA, 361 bp, Zea mays
  Clone ID: MRT4577_301C.1
attcggctcgagaggtagagtgctggtttttattcggcacgggcatctgcctgcagcactacctgctcctgctgtgccgaccaccccaatggggggggcctggtcggtcatctgctcggtgctgggaaggaccagtgggcccagggcacagggagcaacaacgacttgcgtgctaagtgttccccatcaactcatgttggggaatctcgctgcgtcaagctgcaattaccgccacggcgttcaagggggacctccagaacatgctcgccaccatcgaagggagatcatgcacgctagtgggcggagccacatcttgctctggttggactaccaataccaccagcggcctctgccgaggact

SEQ ID NO: 108232 - DNA, 901 bp, Zea mays
  Clone ID: MRT4577_30200C.1
aggtcgcgtgctttattttcagaccgatcgggcgtgagtgcgtcacgcaggcggacggagaaggctagtcagccctctaatcccccaacccatccgccgccgccggcggcgaccaccaccggagctctccaatccctaccgccagccgcccgcaccggcctcgatctctcctcagaggcaatctcttgcagaacctatggacagttctaaatctccccaaccattgaagaagagccgtactagtttgtctggtacggatggccaccaatttgagaatgacgagcttccgtctgaaactgcatcagataaaacgcctggtttgaagtttgaaacagtagataaagcgcaagatgaatttggagaagacagttccccattgcagcaatcagctgcttccaacgtgtcataccgtggatcgccatgtattggggcattcactatccaatgtgctaggtgcttcaaatggagacttattccaacgaaagagaagtatgaagaaatacgcgagcatattatacaggaaccttttgactgcgaaagagcccgtgaatggaaacctgatgtaacatgcgatgatcaagaagatatttctcaggatggaagcagactctgggctatcgacaaacccaatattgcacagcctcctgctggatgggaaaggcagattagaataagaggtgaaggaggcaccaaatttgctgatgtgtactacacttctcctactgcgaggaaactgaggtcactggttgaagttgatcggtacctccaagaaaatccagagtatggagcgcaggtgttaacattagctcattttccccttcagattcctagacctctgcggcagactatgtcaaaagcgccccaagaacgcagtgtcctgatgatgacacaccaactaagt

SEQ ID NO: 108233 - DNA, 869 bp, Zea mays
  unsure (1)..(869): unsure at all n locations
  Clone ID: MRT4577_30201C.1
tggggatcaggtcgcgtgctttattttcaggccgatcgggcgtgagcgcgtcacgcaggcggacggagaaggctagtcagccctctaatcccccaacccatccgccgccgccggcggcgaccaccaccggagctctccaacccctaccgccagccgcccgtaccggcctcgatctctcctcagaggtacttaggccctaataatttggaagttgtgcaggcaatctcttgcagaacctatggacagttctaaatctccccaaccattgaagaagagccgtactagtttgtctggtacagacggccaccaatttgagaatgacgagcttccgtctgaaactgcatcagataaaacgcctggtttgaagtttgaaacagtagataaagtgcaagatgaatttggagaagacagttccccattgcagcaatcagctgcttccaacgtgtcataccgtggatcgccatgtattggggcattcactatccaatgtgctaggtgcttcaaatggagacttattccaacgaaagagaagtatgaagaaatacgcgagcatattatacaggaaccttttgactgcgaacgagcccgtgaatggaaacctgatgtaacatgcgatgatcaagaagatatttctcaggatggaagcagactctgggctatcgacaaacccaatattgcacagcctcctgctggatgggaaaggcagattagaataagaggtgaaggaggcaccaaatttgctgatgtgtactacacttctcctactgcgaggaaactgangccactgggttgagttgatcggtacctccaagaaatccagagtatggntgcgcagggtgtaacattagctcagntttcttccagattct

SEQ ID NO: 108234 - DNA, 1612 bp, Zea mays
  unsure (1)..(1612): unsure at all n locations
  Clone ID: MRT4577_30202C.1
ctttggttcgccagaaagctcttgcttatgggtccatctttccacggttgattctggtcgcccggcggccagaagcccagaacctttgctggcaggccgcgaaccaaccaaacagctgaagtctgacgacgagccttggttcagagaaacagggcactgggtttagagcccttcggatctagtattgtcgttcaccggcggcgaccaggccaaaccctagaaccttgccaagatgaggtcgttgcgagcggcgcagaccctagtctcccgttcccttttctcagcgcgccatctaagcggcgcagcctcccccgccacggccgccgccgcgggcgcgcggtggtgtgcagcgccggcgccaccgccccgttcgccgcttccatcctcgagggtgatgcctgccggggttgccggcgcagtatccttctcccttaccttcgctactgtagcggcggcggaggccaaggccaaggagcgaccgcaaccggatctgttgccgcagaacgtggtgctgtaccagtaccaggcgtgccccttctgcaacaaggtcagagcctttttagattatcatgatataccatataaagttgtggaagttaatccattgagcaaaaaggaactcaagtggtctgattacaagaaagttccaatattgacagtagatggtgaacagcttgttgattcatcagatataatcaatatactacagagcaggatcaaccccaatgacgaactcactagtgacgaggaagcaaaatggcgaaggtgggttgatgagcaccttgtgcatgtcttatctcctaacatatatcggacaacttcagaagctctagaatcttttgactacattgcaaaacatggtaatttcagttttacagagaggtttgccgtgaagtatgctggtgctgcggccatgtacatggtatctaagaaactaaagaagaaatacaacataactgacgagcgtgcttcattgtatgatgctgccaatacatggatcgacgcactgaacggaagagatttcctgggtggctccaagcctaacttggcagatcttgccgtcttcggtgttctgagacctatccgatacttgagagcaggaaaagatatggttgagaacactgaaatcggcgattggtaccgacgcatggaagacgcagttggagaaccatcaagaatacaggatgcagaaggaaactagaattttgacaacattcttttaaatactttagcggtatccgtgcctatgcatggaggctattcaaattttttgccagaatcaagtgtatgcaataatgctctgccagattattaagtatactagcacctgaggaacagtgtttgacttgggaacttggttgtgttactgtgtaaggttttgctcccctagctgttcacgtctgtattgtctgcgatgtggttttgaagattcagcatcagcgattctgctgtgccttgcatacagtttaaagaatttcggaatgctggatctaccgaagcgatagattcatggttgtttaattaattaatgacaatctcatgtggcttattgactgggacatgttccagttttaaaaaaaaaaaaaaaaaaaaaaaaaaggnnnannntaat

SEQ ID NO: 108235 - DNA, 634 bp, Zea mays
  unsure (1)..(634): unsure at all n locations
  Clone ID: MRT4577_30203C.1
ctaaanaaaatttcctcttttcaaaagtcttcaattgttgattctcttgatttttctaggtacacactttacaagattacattttcattacaagatgcttgattgcagccaatattttcatttctttggtgcttgtgtagaagtatcgccttgcaaagtatataccagactctcatgctaaaggttttaaggacgacaagaaagtttgagtgattccctctcgaacatggattatgtaccatattctgaaatgtgtttagaggattgcaaatcaatgaggcactaaagatgcaactggaagttcagaagcggctacacgagcaactggaggtatttgaaggtgtttgagataaataatgatgctaaaatgaaaaggacaatgcgacgtcccctaccatctggtcgtgttagttctacacatgctgccatgtgggctacaagtgcaggaattgcaggaacaactttgctggcctctcgaaggttagcgctatgtcgtggtgctccactttaaagatgtgcatgccacgtctacacttcccgtctctgattatagattaggtctttactccctgatgtttagccagtgcgtgctgttacccactaggtctagccgtagtcagtgactgcacaacca

SEQ ID NO: 108236 - DNA, 252 bp, Zea mays
  Clone ID: MRT4577_30204C.1
cccacgcgtccgcgtggtcatctgatcgctgccgatggttctccgtttgcgcgacagacaggtggtgggggtgacggtgtcagtgcttgcttgctttcatgccaatggcgccgtcgtggtgggggcgggacgcgagggccaacggcgtttttggcggcatgcactcccttggtggtcatgatggaaaaccccaactggttcatctcctaggtcgccgccgcgtcgtcagaggtggacacgcctccgccagca

SEQ ID NO: 108237 - DNA, 253 bp, Zea mays
  Clone ID: MRT4577_30205C.1
tttctttgtctttttttttctgtttaacttttttgtcaaatgctttgttttttccttcttctttttcaagaactcgcaaagggaacttcttatttttgggtggccccctccattattcaaaaaactttttttttgaattcccactcctaagcgacttaaaaggggggcccccccactatcttgtgaggcgcgggacccgccggttcttccaaatgatctacgccctaaagcaccaattcctgtgaagccaaaa

SEQ ID NO: 108238 - DNA, 177 bp, Zea mays
  Clone ID: MRT4577_30208C.1
gcgtacgtaggctcggaattcggatgagaggctctaccgacgcacacgtcatgggaagaagcagcagcgccatggccgggccgtttacggccgttcgggcccgcctactcccgcagccagagacctggacggcagacagtaccaccggccggacggtccctacgaacaagaacaaaa

SEQ ID NO: 108239 - DNA, 375 bp, Zea mays
  Clone ID: MRT4577_30209C.1
ctgctatacatcatgcagacctctcttttccttgggcgcgcgtaatcgcgtattcctacataagtacgctctgatcttcttccagcgagcgagctctgatcttcttccagctcgctcgctcgctcgatcgcgcgcctgtagataaatttatatatctatacacatcatggggcctgagcaaggccggcggtcgaacggcggcgcggcggcgcggagcaaggaggaggggggcgcgaaggtggtgcggtaccgcgagtgccagcgcaaccacgcggcgttcctgggcgggcacgccgtggacgggtgccgcgagttcatggcggcgggcgcggacggcacggcggcggcgctcgcgtgcgccgcctgcgggtgcca

SEQ ID NO: 108240 - DNA, 447 bp, Zea mays
  Clone ID: MRT4577_3020C.1
ggggcccaaggacttaaaaaacgggggacaccgggacaaaaaagggacaaaagggggggggggttttattaaagggacgagcataaggggggtaaaaaaaaaaccaggcctgaggcaccccatgcctgaaacgacgggttataggaaaaccaggtttaaacggggattagaaaagccacacactggtttaaagcaccactactagggggaaaaaatgggggggaaaaaagggggggggccaacccaaccgaaaacaaaaaaagggcctgcaaaggtttcccggcgccctttttaaaaaaaaacaaaaaggggggggggggtaaaaacgcccggggggtaaagggggggggggggggtttttgacggccttggggggggggaaccaaaccttttgggcaaaaaccgggcctcttgagaaatccggggcgggggggggggggccaaaaa

SEQ ID NO: 108241 - DNA, 694 bp, Zea mays
  unsure (1)..(694): unsure at all n locations
  Clone ID: MRT4577_30210C.1
gcagcgctggagctgcacagggtgccgttgnccaccaggtcctcatccatcacttcttgggcagcaacaacagtatcaacagatacctcagcagcaacatccccagttttcgcagccaccacctccaaacatgccccaactgcaggcaccagctcacatgctttcacattcacaaggatctcggcctacccttccccagcttccaccaatgggtggaccatcagtgccatcacaagtgaacccaccgcttccgcctatgcctcacccaacggtattgttcattgatacctttaccatgttgttaaactgagggaggtacaactgtttacttagcatgttctgtctttctatttatctgagctgataagtgataatcgaaaaccaaatgcctcgtctgcaaaccttgcaagtttgcatcaaaagaccgttttcagtgaacttgtttttttctaaaaaaaaaactccaattgacctccaaaattgttagcatgtctgctttagttcgagataagcatgaatatgtatgaatttgatatgaaacatgaatacatctgagtttaaggtgaagaatgaatacatctaanaacattgcatcatcaaggcagagctatttgttgcagcagtctaattccaagatcaaaaattttgaggcgaggaatggaatcattgattttcagaaccatgatcaaaacac

SEQ ID NO: 108242 - DNA, 425 bp, Zea mays
  Clone ID: MRT4577_30211C.1
tcgttttggctttatgtactggtgatcgctttcatagggcatggaggctgggctgttcctcgcatcaaggacactgatttgtcagatgaccagacgcttgaaagacactttgagatatttacaactgtgcggactctttaccaaacccacattctggtccatggtgatttgagagaagacattatgctatatttagagggacacttgcctattattgatgtgtcacaatccgacgattttgatcaccactcacggtttggatcttctgaaggaagattgcttgcatgcttccgactgctataagaaacacggagttgctgtcatgacagttacgggcttgtgtaatcttgttattgagcaaacgcatttctgatgaacatgatgatgtttacctgatacaggctaaccgacagactttggtaaat

SEQ ID NO: 108243 - DNA, 721 bp, Zea mays
  Clone ID: MRT4577_30212C.1
cgccggtgttcgacgtcctgcgcctcttcccggacgactgcgcgttcccgacggtgtgcggcgcctacggcgtgtgcacggacatgcagtgtagctgcccccacgcgtccgcggacgcgtgggtggacttccggaggcccaaccgcggctgcgtcacggtggcgccggttgccggctgcggcggttcgcaccccccggcgcggctggtgtcgctgcccgggctggcctacttcaacgaccccgccaccagcctcagggcgctggagagggtgagcgacgccgcgtgcaggaaggcgtgcctggacgactgcgcctgcgcggcggcgcagttcgtctacggcaccgacgccggcgacggcttctgctacctgcagtcggaggtgctgtcgctggagacgtcgcggccggaggtggtgcactacaactccaccatgcatctcaaggtgcgggccacgcggcgtccgtcaccgtcagccagattttagttggattggaccactcacaaggacaaggtcacacacagccacacagagcagtacaccacttctatattatcagtctgttgtcttccaattttttttgtatcagtctacagtccaaacacttgttgatccaccgatgtcaaaatgaagtccttttctttttctgtgtctgttatattcttagtgcgagttgaaaatgacaacgtgcagaaatgacagaataaaagtcgttctaatgc

SEQ ID NO: 108244 - DNA, 3911 bp, Zea mays
  Clone ID: MRT4577_30213C.1
ttttgacgcgtgggcggacgcgtgggcggacgcgtgggccggcgagcggcagtcgacgcggatgcggatccggtacctggacgcggcgctgcggcaggacgtgtccttcttcgacaccgacgtgcgggcctcggacgtgatctacgccatcaacgcggacgccgtggtggtgcaggacgccatcagcgagaagctgggcaacctcatccactacatggccaccttcgtggccggcttcgtcgtggggttcacggccgcgtggcagctggcgctggtcacgctggccgtggtgccgctcatcgccgtcatcggcgggctgagcgccgccgcgctcgccaagctctcgtcccgcagccaggacgcgctctcgggcgccagcggcatcgcggagcaggcgctcgcgcagatacggatcgtgcaggcgttcgttggcgaggagcgcgagatgcgggcctactcggcggcgctggccgtggcgcagaggatcggctaccgcagcggcttcgccaaggggctcggcctcggcggcacctacttcaccgtcttctgctgctacgggctcctgctctggtacggcggccacctcgtgcgcgcccagcacaccaacggcgggctcgccatcgccaccatgttctccgtcatgatcggcggactggccctcgggcagtcggcgccgagcatggccgcgttcgccaaggcgcgtgtggcggctgccaagatcttccgcatcatcgaccacaggccgggcatctcctcgcgcgacggcgcggagccagagtcggtgacggggcgggtggagatgcggggcgtggacttcgcgtacccgtcgcggccggacgtccccatcctgcgcggcttctcgctgagcgtgcccgccgggaagaccatcgcgctggtgggcagctccggctccgggaagagcacggtggtgtcgctcatcgagagattctacgaccccagcgcagggcaaatcctgctggacgggcacgacctcaggtcgctggagctgcggtggctgcggcggcagatcgggctggtgagccaggagccggcgctgttcgcgacgagcatcagggagaacctgctgctggggcgggacagccagagcgcgacgctggcggagatggaggaggcggccagggtggccaacgcccactccttcatcatcaaactccccgacggctacgacacgcaggttggggagcgcggcctgcagctctccggtgggcagaagcagcgcatcgccatcgcccgcgccatgctcaagaaccccgccatcctgctgctggacgaggccaccagcgcgctggactccgagtctgagaagctcgtgcaggaggcgctggaccgcttcatgatcgggcgcaccaccctggtgatcgcgcacaggctgtccaccatccgcaaggccgacgtggtggccgtgctgcagggcggcgccgtctccgagatgggcgcgcacgacgagctgatggccaagggcgagaacggcacctacgccaagctcatccgcatgcaggagcaggcgcacgaggcggcgctcgtcaacgcccgccgcagcagcgccaggccctccagcgcccgcaactccgtcagctcgcccatcatgacgcgcaactcctcctacggccgctccccctactcccgccgcctctccgacttctccacctccgacttcaccctctccatccacgacccgcaccaccaccaccggaccatggcggacaagcagccggcgttccgcgccggcgccagctccttcctgcgcctcgccaggatgaactcgcccgagtgggcctacgcgctcgccggctccatcggctccatggtctgcggctccttcagcgccatcttcgcctacatcctcagcgccgtgctcagcgtctactacgcgccggacccgcggtacatgaagcgcgagatcgcaaaatactgctacctgctcatcggcatgtcctccgcggcgctgctgttcaacacggtgcagcacgtgttctgggacacggtgggcgagaacctgaccaagcgggtgcgcgagaagatgttcgccgccgtgctccgcaacgagatcgcctggttcgacgcggacgagaacgccagcgcgcgcgtggccgccaggctagcgctggacgcccagaacgtgcgctccgccatcggggaccgcatctccgtcatcgtccagaactcggcgctgatgctggtggcgtgcaccgcggggttcgtcctccagtggcgcctcgcgctcgtgctcctcgccgtgttcccgctcgtcgtgggcgccaccgtgctgcagaagatgttcatgaagggcttctcgggggacctggaggccgcgcacgccagggcgacgcagatcgcgggcgaggccgtggccaacctgcgcaccgtggccgcgttcaacgcggagcgcaagatcacggggctgttcgaggccaacctgcgcggcccgctccggcgctgcttctggaaggggcagatcgccggcagcggctacggcgtggcgcagttcctgctgtacgcgtcctacgcgctggggctgtggtacgcggcgtggctggtgaagcacggcgtgtccgacttctcgcgcaccatccgcgtgttcatggtgctgatggtgtccgcgaacggcgccgccgagacgctgacgctggcgccggacttcatcaagggcgggcgcgcgatgcggtcggtgttcgagacgatcgaccgcaagacggaggtggagcccgacgacgtggacgcggcgccggtgccggagcggccgaggggcgaggtggagctgaagcacgtggacttctcgtacccgtcgcggccggacatccaggtgttccgcgacctgagcctccgtgcgcgcgccgggaagacgctggcgctggtggggccgagcgggtgcggcaagagctcggtgctggctctggtgcagcggttctacgagcccacgtccgggcgcgtgctcctggacggcaaggacgtgcgcaagtacaacctgcgggcgctgcggcgcgtggtggcggtggtaccgcaggagccgttcctgttcgcggcgagcatccacgagaacatcgcgtacgggcgcgagggcgcgacggaggcggaggtggtggaggcggcggcgcaggcgaacgcgcaccggttcatcgcggcgctgccggaggggtaccggacgcaggtgggcgagcgcggggtgcagctgtcgggggggcagcggcagcggatcgcgatcgcgcgcgcgctggtgaagcaggcggccatcgtgctgctggacgaggcgaccagcgcgctggacgccgagtcggagcggtgcgtgcaggaggcgctggagcgcgcggggtccgggcgcaccaccatcgtggtggcgcaccggctggccacggtgcgcggcgcgcacaccatcgcggtcatcgacgacggcaaggtggcggagcaggggtcgcactcgcacctgctcaagcaccatcccgacgggtgctacgcgcggatgctgcagctgcagcggctgacgggcgcggcggccgggcccgggccgtcgacctcgtgcaacggggccgcgtaggacggaatggatggatggatgggtttggttcctcgagagattgatgggtgaggaagctgaagctccggatcaaatggtggtactccatgatcgcaacaatgaggggaaaaaaagaaaggagaaaatacggtggttcatatgattgtacaatttgacgatctgtttgagtcggggttttaggatgatgtaaaccttcactcgccttttttttactcttgtttctcatccgcatcagtatcatctatctacatacagtgtcagagatgggaactgatccgcatcatcatctacctcccaaggcaccccagattgtattaatgtacttagttagcctgttttatatatacttataagtacc

SEQ ID NO: 108245 - DNA, 324 bp, Zea mays
  Clone ID: MRT4577_30214C.1
aatgactacaccagccacgaacgcaattctcggcagctataactacgaaccgcgcgggcaccacggaagcagccgggtcactcgttcctagcgggaggaagagatgatcgagggcgaggggccggcgctcggtatcgacctatgaacgacgtactcgaaggtcgacgaggggcaatacgaccctgtcgtgatcatcggcaacaaccagtggaaccgcaccacgccgggctacgccaactacaccgtcacctagctgctcatacggaatgcccccaagaaccatgtcgccaagaaccccaccaacaccgtatgttactcaaagcg

SEQ ID NO: 108246 - DNA, 1611 bp, Zea mays
  Clone ID: MRT4577_30215C.1
gctgtaatcatcaaggtggctttggacctggggacccgcttttatgattccaagacgctagtcatacgtctgaatcacggtaaacttgctgaagcaatttgctcttgggcaggggtttctcaggatcaaagacaaaatgttgctgagtttctgtcttcaactattgttcagtattggccaaatgaagctgaccgcaagtcacagtggagtttgattagggggcaacttttacaggatcttcgtctttctgaagaagttgttgagaagctacataaagcagatcagcggttttgtggctctgcagatctagtacttgctagattaagagggaccctgttttatgatgaatctgcttgcaaggctcttgatgatctatccgcgcttctgagatgtttgagagtatggtcggtagaacaaccaattactactattgatgtactcatgcctccgtcagaatgttactatacaaatttgtttttccaggtatactcaaaagaaggtaatcatggaccgggtttccatgaaaagttgctggcagttggtggacgatatgattggttggtggaacaagcttgggatgagacatctaaatctaaacccccaggtgctgttggtgtgagcattgcacttgagaaatttcttcctaacaatccttcatctgatcttgggttgcgaaggttactgtccagggttgaacctagcatcagtgtacttgtctgttcaaggggtggtggcggtctgttgactgaacgcatggaacttgtcgcagagctttggaaagctaacataatggctcagtttgttcctcaggaagatccaagtcttcaagaacagtatgaatatgccagtgaacatgatattaaatgccttgcaattatgactgaatctggcctgtcacaaacagaccttgtgaaggtccggcatcttgattttaaaaaggagaaggatgttgaaagagagggactaataaagttcctgtctgatgcaatgtgttcacaatacaaaaatcctacgatctggagctgaccaacggccctcccaagtgcttagtgtatttgttttcaggttctagcagagcatcaaaaaatgaatgagcctggtttgtggttaccagtgtctttcgaacttccgggtgaaagcaatgtttgctgttcgaacatgtgaaggcaatcatgcgtgttggcttccgtgcatacggtgaggcagctgttggctctctgcaggttgttgccaaacgttacgccctggtctttactgaagatgggcgccgacgtgcggtgatcggccaattggtataatcctggacctcttgattgttctcctgaggaccaatgccatgcaacaaggttgcttcagacacaaggtggcgtgtagttggtgcaattctgcagttttggggctgttggtattatatggatctgaaggtgcgcggttttctactacaacagatcctccgtttttgcctgtgttctctttcttgtgcatgtgattttctttttcttttccataggactaccttgtacatagttcgtttggcgtgagccatcatgtacatgcaaaatttttacattgttgggttactgacaatgaaatgctgaattttgcaactcc

SEQ ID NO: 108247 - DNA, 230 bp, Zea mays
  Clone ID: MRT4577_30216C.1
agcactagtaaatttggggaaactaaggttcaacaatggcaaacccggatcaaaccaatggtagccggaccgccatggatggcaattcggtaaccaacggtcaagaacctaaacctcccggaattgtacaaaacatccataattacaatggtagaaaccaacttggaggaaacctaataaaaacttccccgtaaatggaaaaccaatcggttaatgaaaaaaaaaataaa

SEQ ID NO: 108248 - DNA, 243 bp, Zea mays
  Clone ID: MRT4577_30217C.1
cctgtacgccgcagggtggaatctcctacgggcgggcgagacttgtcgtatggcttgctgattaactggcgggttacgccgattggctggttccaacaaccattgtgacggggcctggggcgacagggtcgggcttttttgcttaccctccagcggcgtttgcgagaacttgggcccggccgggctgagacgccttttcagacttcaatttgggcgggggggcggctgattcttaaggccggg

SEQ ID NO: 108249 - DNA, 190 bp, Zea mays
  Clone ID: MRT4577_30218C.1
gcattgtctataaatctacatgggggtttttcagggtcattgctatttaaaatgagaaaaaggcatccaaccaaccgtttttattttaaaagatatcaatagaccctttggagtctcttaaatgcacagtagggttcccgggtgctcaacggttcacacaggggaaacgctactcatgaatagtgggggg

SEQ ID NO: 108250 - DNA, 818 bp, Zea mays
  unsure (1)..(818): unsure at all n locations
  Clone ID: MRT4577_30219C.1
ccgggtccttattaggattacggcccggatcatctcatgccccctgatcagactccaaaagttcttttttcaactccaaagaaaagcaaccttgtccgtttttattcacaggcagatgaactggtgaaaatagaccttcaatgtcatgtccaaggtgatattgtcctggagtgtatccatctgtatgaggatctggatcgtgaagagatggttttccgaatcatgttcaatacagcattcatccggtcaaacatcttgatgcttaatcgtgatcacatagacatgttatggaatgcaaaagaccaattccctaaagattttcggtttgaggttatcttttccgatatggacatagttacttcacatgtcacaacagagcctgttattcaccaagagaaacaaggacttggggttgaagagtttgctaaggtgctagatatctttaaccatttggactggttggatgggaaaaaagacaccgtacctcacacaacccagctaaagatctcagcgattaccgatgaacctgagactttctttgatactcgtgaagaacttgaatctgaaagttcttctggtgaaatttattcttctagtgttgttctgaaggtcggaaatgaattggatatgcttgtcagcactaaaccgagacatattccccaagattcaagttcagctaatgttcaatccaaatcacaaactacagtgcagtctccttcgcgaatgcggcgcacagcattgttatcaccttctaggtntaagtttcaaanaccagtgcttcaccatggaactgtctttcagtacaatcatgccacaac

SEQ ID NO: 108251 - DNA, 315 bp, Zea mays
  Clone ID: MRT4577_3021C.1
ttactttttttgggaggtagggtttatttttttcattttaggaatcttttgatgcactaactaatatactatttgcaaaggaacaaccggcgagccaaaaacaataccatggacacaacaaactcccataagatgagcatcccatacctaaacacataaggatgttcgaacttgaaacatgggggggtggcctactaaacaaaactggggtatgggaccaataatcaactactcatgctttctgactggagcaacaatggcttaataccatggatcaacactgggacacgagttctaaaaatcagtacaggatgc

SEQ ID NO: 108252 - DNA, 1047 bp, Zea mays
  unsure (1)..(1047): unsure at all n locations
  Clone ID: MRT4577_30220C.1
ctgtattggactaccctggccactatgagggatgtgcactcctcaccatggaaatgatccactgcatcttgaagtccagcgaaagctggctttctttgggtcagcataacttactgctaatgcactgtcaacaagggagctggcctattctggctttcatgttagctgctcttctaatatacctggggcattattccgacgaggagaaagtgctggatatggtctacaagcaatcgtctttggagcttttggagatgatttcacctcggaatcccatgccttctcaaatgagatatttgcgctatatctcgacgaggaatgtcatgcctgagtggcctccagctgatagagccctcacattagattgtattattttgaggatggttccaaattttcatggccaaggtggtttccgtccaatattcaggatatacggcccggatcatctcatgccccctgatcagactccaaaagttcttttttcaactccaaagaaaagcaaccttgtccgtttttattcacaggtaattgtcttctgctgggtcattcattgttctgcttttaagctgttagctaatgctgtcttatataataattttccatgttataaatctcttgaaacataaattttgatttttttttaaatcttccttgctaacctttactagaaaggaattgaccatttctgaccttaggcagatgaactggtgaaaatagatcttcaatgtcatgtccaaggtgatattgtcctggagtgtatccatctgtatgaggatctggatcgtgaagagatggttttccgaatcatgttcaatacagcattcatccggtcaaacatcttgatgcttaatcgtgatcacatagacatgttatggaatgcaaaagaccaattccctaaagattttcggtttgaggtaagtgtttatgccaagtggcgaactagactattactgtaatacatggatttttacatgcaacttctgttgatgggtaggttatcttttccgatatggacatagntacttcacatgtcacaacagagcctgt

SEQ ID NO: 108253 - DNA, 364 bp, Zea mays
  Clone ID: MRT4577_30221C.1
gtttgtctcctaggtcgaagaacggcgcccccatctgcggcgctggagcgtggtcaaaagcgtcggcggcggtcgacatctcccggcagcgcgtgctcgtcgtcggcgaaacccatttcaagcacaagtcgtaaaatggaccagttcactgagggagaaccttctcatggccacgaaccttttgtttacaccgaaggaattgatttaactcaatttgatgatgatgcaaccttccacaacgcttgcaacattgatgtgaacttgcaggcatctgaaaacaatactactcctgcaactcaacgaaacaaaattgttaagaagacagtaacaagaagacttgcaaactacagtcaggctgaggatg

SEQ ID NO: 108254 - DNA, 1161 bp, Zea mays
  Clone ID: MRT4577_30222C.1
ggggggaccaaaagggcaggggcccctatttcattaagaaatagaacgatagagtttttacaaccaacacaggacacgaagcccgggcattcaacaaggatgggacatggttacatcccaacagagcaacaccaaaaaagggatcagggacacaggaatccagacttacaaccttatttagatcaactaagtcttaccaaacacttacttaatgggctacagccgaccactctaaggtgccaattcaccatgggatactttttggcaccggagcccacccatgcgcgcgattaaacaccttttttgccggctttttgattcgcttgcttcctgcctccaacatcttttttggtctccctggctttggatagaaaagcatctttggctgcaactctagaaatagctttctcagtcacattcatctcttcagaggtttccagtctgggactccaatgggacctagctgctccctacgtttcaattaagtaatgcagggcaatgaattataagtagataggacataatgggtcagaggacacttgccttcaccaaacagatgctcagggtcttcaatctcgtggaactcgaagaactggatcacttggtcgccaacgcttgatctttgatccctccaagctcgaaaacggatcgcaatctctctttctcacgcacatgcaggcaggagaccatccatggcgttgggtgctcgccggagccagttggctggcctggccgcagccgtgctgcagggggcatgctggatgccggctggccttgcaggcagcacggtggtgacggattcagaggggcacacatacgcgcaccgtctcgccgaaggacccggaggcgaggacgttgccatgggggctgaagaagacgcagaagacgtagttggtgtggcccgtgagcgtcttggggaggtgggctcctccgccgacggcgagatcccagatgcggatggtgcggtcatcagaggtgggggcaagtcggcaaggaggcgaccgtcgggggagaaagagaggtctgagacactctctccatggccctcgagctccgcaacgggggtgagatcggaggaagaccacgcgaagaagcttgtcggcggaggcgagcgtggctgcgacaacgcgcacgaccaggcaaggaagggagagacggttt

SEQ ID NO: 108255 - DNA, 158 bp, Zea mays
  Clone ID: MRT4577_30223C.1
ctcttccagcacatcgtcatggagctatgcgccggcggcgagctctttgaccgcattagcgccaagggccactacagtgagcgcgcggctgcgaacttattaagaccattgtcggggtcgcggagggaatgttattcgctctggggtgtgcaccggga

SEQ ID NO: 108256 - DNA, 355 bp, Zea mays
  Clone ID: MRT4577_30224C.1
cccctttacgtgtcccccccccaagttccacatggaaaacgtccaaatccttttttgacattcattagcgtgaattttatatagcctccctttatcaaccctaacaatgcgaatcttgggtcatggtcactttttttttctgctttaaatatagagcaccattactactcttttaaaggacccaagaccacataaaaaaaaaaaaataacaaaccaataacattctattaaacaacatcataaattataaaaaaccctacaattacccaacttaatacgccctttgaatcacatcccccttttccccaacctgcgcgaaaaaatcttaaaaaggcccccaaccctattcccccct

SEQ ID NO: 108257 - DNA, 481 bp, Zea mays
  Clone ID: MRT4577_30225C.1
attgttaaaatttattgtcttgaaaattgaaggacagtagagtggggaaggaaaaaaggggaaatcagaaacaaaagagcaggggggggagagcgaaagggggggggagagcggaaaaaaaaggggcgggggggggaggggggaggacggggggggaacaggaaagaagaaacgacaaggggaaaaaacgaagggaaaaagccgcaaaagaggaaaggggaggggagaaaggagaagggggaaaggagaaagctgagagggggaagggagaacaaggaagggggaacaagaaaaaaaaaaaaaggggaaaaaggacaagaaagggggaaaaacctgaggggaaaggggaaagggccgaagggagattggtggccgaacaaaaaaccacggagaactggggaaaaaaaactgacaaacgcgtggacagaaaccaggggcgggggacacaagggaaacccggaacaggaaacgggaaacccca

SEQ ID NO: 108258 - DNA, 521 bp, Zea mays
  unsure (1)..(521): unsure at all n locations
  Clone ID: MRT4577_30226C.1
gcgaagagatgcgagcgtcttttgcagcggggggggagggtgtgttccagactgcgggtgcaagcggcgggtgcgggtcaagcggcgagtgcggggagaggtgccctnagctgggggggacgagcgccgcgccgcagggcaccctgttgctctgggtgggcccctagaaaagagggccgcgggggttggtggagggcccgnggnagtccctggaggggccccacccgtgcgggtgcgggagcgccttcaactgcgacccctgcgactgctgagcacatcgatcgaggagcatgggtatgattattatctatctagcttgtgggggggggtgagcaataataagcgagggcggcgtggtnccatacatangtgttgtgtgnggtgtgagagagagagagaaacanagttcttcangttgctatctctctctctgcgtgggtggcgtgagtgtttgtgcgtctgtgcgtgtgtctacatgcgtgtgtggtgagccgagtgcgtgtgctgtgaccatatattaa

SEQ ID NO: 108259 - DNA, 281 bp, Zea mays
  Clone ID: MRT4577_30227C.1
gccgccgctgcttcttcatcttcctcgcagcgccggcgctccatcttactctccctggcttactagcgcttggcacgcaggtgacggctgcagcgactgcgttcaggctcgggctctcaatgacggcatcagcggcttccccttccgactcttggcagtcctatcgcgcactcgcctcgggtcctctgcacaccgtgcagtgaccgtgcgtgatggactggataaagtcttgcagcgatcttaccgcaagtgatgaggaacagcatgcattgcttgataat

SEQ ID NO: 108260 - DNA, 244 bp, Zea mays
  Clone ID: MRT4577_30228C.1
ggaccggtcctgataattcttggcgacgtgctactcacggcggccgccccttatttgtggggttgtaaagaacgcgggcgccatccgggcccgacgaacacacacgcaaagatacaagacccatggaacggagggagacagacgacacccaagctcgcacgcaaattgaagaggaccagttacgcagattctgacactgtgtgcaaggctggaaccaacgttgatagaggtcaacccctgaacc

SEQ ID NO: 108261 - DNA, 728 bp, Zea mays
  Clone ID: MRT4577_30229C.1
gcacggcccggcgtgccccttcttcggccacccgaacccgccggcgccgtgcccctgcccgctccgccaggcctggggcagcctcgacgccctcgtgggccgcctccgcgccgcctacgaggagaacggaggccgcccagagtccaatcccttcgccgcgcgcgccgtacgcctctacctctgcgaggtccgcgagcaccaggcccgcgcccgcggcgtcagctacgagaagaagaagcgcaggaagccgcagcagctgccgggcccgggcgacagcagcggccttcacggccacgcgcaccagccgccgcctccaccgcccgcgggcgccgcctgctgagctagctgatcgatccaccgctctttcgtgcgctctcccattcggccggtatgatgccagccagattgagcttgagcatgctcatatattttatgtatcattccgtgcgcgtatgcatgcatgtgcatggcgcagtgtagccatgcagctccatgctgctgatccgtctactctacctacctgctgctgagacctgagtgtactgcattgcttgtctttgtctgtgtttcgattcgatttagcattggtgttgtcgaatctatttccttgtaggagtgagcaagtgtttgctgtactgtcaactgagtatatatgtccctttgagatctactagctagggactgggagatacatatatggggatctctcttgctgtttctgttcgtgg

SEQ ID NO: 108262 - DNA, 376 bp, Zea mays
  Clone ID: MRT4577_3022C.1
gggaggaaaaccagtttgtctgatgtttgatagctaaattggtcatgccctattacacaagggtttggcttttatatattacggggggaatatcaagcgacccctaaatagctgacccactacttggcccatattgtctcaataaccttaacgtttggaccacggactcttttgtccccggacttggtctccctgtatgcccattgctcctggctgaaaagctgacattccccaccccttgaaatacaacttgtccccaaactgtgatattcataaccacccggatcccaaactaaaacttttaaattgccttggccacttgtggccgccccttgacttgaaaaaacaaggcaacagccctaccaatttctgaacc

SEQ ID NO: 108263 - DNA, 2297 bp, Zea mays
  unsure (1)..(2297): unsure at all n locations
  Clone ID: MRT4577_30230C.1
aattcggcacgaggaaaaaacaacaaacacttctcgggttcctttcttcgtgcgcactccactttcgccggcgtcgccatggacgccaacgtcgtgcagcgctgcctcgaggccggcggccgcgacttcctcttccaccatacctcttcccctccctctccgacctccgcctctgccgctgcatcctcctccatcctccaatctctccccctccacgtgtccttcgaccgcgggtattacctcctcgtcaaggcgatccaggagctgcgtgcgcgcaaggacggccacgtcgttaccgtcggcatcggcggacccactggctcgggcaagaccagcttggctgagaaggtggcgtcggtgctagggtgcgtcgtgatcgtctccatggaggactaccgcacggcacctggtgtcgacgacggcatcagcgacgtcaatgccgtcgatttcgacgcacttgctcgcaacctccaggatcttgtgaagggtaaagatacaatggtgccactagttgattttcaagagaagaaacgcaccggatggagggaactgagaatttcttcatctggagtggtgattgtcgatggtgcgtatgctctgcattcaacactacgatcattgcttgatatccgagttgctgtggttggcggcgttcattttagcctgctttctaaagttcagcatgatattggagattcttgctcattggactatctaatcgacagtatatttccattgtttagaaagcatattgagccagacctgcatcatgcccaaattaggattgataacagctttgtctgctcatttcgagacccgtactacaagctgaagtgcaaaaatgagtcatcagatggcaagaagttatattcttttgaacaaaataaagtggaaactgagaactttattgagatgtaccttaggccgcctttgcttctgaagaaatgaagattgatgattggattaaggttaggcaatgtggaataagatactatctatctctcggagaccaaaggattgttgacaagtacttcataatccgtccaaaagctgagtttgaggttgggcgaacaactcttggaggattgttggccttggggtacaatgttgttgttagctttaagcgtacatgcacatctgtcaatatagatcaattactgatagctgcagagaccattgacactctaaatgagacctttttggtattaaaaggtccaagcagaaagattgttgcagcagaggcttcaaagcttggtataaagggaccatggatcacaaaatcatacttagaaatgatcttggagagcaaaggggttccacgacttaatacaccaccaccggtatcaagcaaactgctaactgaaagtcaagaaaagaaaattgctgcacctaaacctattcgggtttctgctgaaaacattacaaatcttgatgacttgatgcaacctaccaagctgttgcatatattgaagcttctgcggtgatttaccaagatggaaagattttaatagaagttgaccatctacaaggagtgtcgactccatatcttcaaattaaagggacaaataaagaaattgttacctctgctggttctgcactctgcttggatggttcatacacaacaaagagttatcttcaaattattttggagagcttaccagctgatggtaatgtatctattggtattcacaatcaacaagctgcaaggctgcaggaactggttgagttcatccagtcacagggagggagctttaattcagatttatcgtcaccaatacgagaaacttcctctacagatagtgtgattgatgatatgcagtccaggataaggaagcttgagagatggaatacgataaacatggttttgtggactatattattgtctgctcttgttggatattccctataccagaaaaaacgtcactaggttctctggcagttttactgatagggtaggacgcatacctcattcatggcgtctgcagaactgacttgcacgcttcaggcacaaagttgtaagtgctagagaaaatgaaaagcagcatgtagatacaagatctaagacgtgagagatggcctgcgctcatgccatccctgatggcagtcttatttgtttgatcactcaatgtctgtaataatcttctcgtatgagatccatcaaaaaaatttgtgcagttaatgtgtatgaagcactaacgttgataatcttctcatatggtccatgggcgtttatgtattgtcatcaccacttaagtaggaaaanaaaaaagnaanaaaaaaaggggcggccgntctag

SEQ ID NO: 108264 - DNA, 1216 bp, Zea mays
  Clone ID: MRT4577_30231C.1
ccaatcaccagacgatgggcttatgagagtgagccagcaccccagcacagcaactgtgttaccggcatcactaccactgcgagagagctcaagaagccagcaggctccaactcccacagtacttgtgagaaccaaagctcagctgctcatccatggacatgtcgccgaaccccgacagcccctcgtcaggagggggcaacggcatcgggccgagcagcggaggcgcatcgccgtcggttggttccatgacgccgcagtcgccgagccggtacgaggcgcagaagcggcgcgactggaacacgttcgggcagtacctgcggaaccaccggccgccgctgagcctggcgcagtgcagcggggctcacgtcctggagttcctccgctacctggaccagttcggcaagaccaaggtgcacggcccggcgtgccccttcttcggccatccgaacccgccggcgccgtgcccctgcccgctccgccaggcctggggcagcctggacgccctggtgggccgcctccgcgccgccttcgaggagaacgggggccgcccggagtccaaccccttcgcggcgcgcgccgtgcgcctctacctccgcgaggtccgcgagcaccaggcccgcgcccgcggcgtcagctacgagaagaagaagcgcaagaagccgcagcagctgcagggcgacagcagcggcggccttcacggccacgcgcaccagccgccgccgccgcccccgccgcccgccggcgccgcctgctgagcctgagatgttccatcgtcgcctcgacggctcgtagcctcgtacgtacgtacgtacgctctcccatttggccggtatgatgccagccagattgagcttgagcatacatattttatgtatcatctcgcgcgcgtatgcgtgcatgcatgtgcatggcagcagtagtgtatgatgatccgtgtactctacccgtgagaagcactactatctagctggctgctgcgtgtgtactgcattgctggtcctgtgttttcgattcgctttggtgttgtcggatctatttgcattgcttgtaggagtgagcaagtgtgtttgctgtactttggactgaggagtagtatgtccgtcgtccgtacgtcctttgaggtctagctagggacagggagatacatatatggtgatctctctttgctgcagcttctgtttgtgggaaattcaaaagcctgtgtcgtgtgtgtgtc

SEQ ID NO: 108265 - DNA, 176 bp, Zea mays
  Clone ID: MRT4577_30232C.1
ctctcgtactttttcgtgttcgatctgcaatgttggggggaattttcagacccggctgcagatatcgccggaccagttagaccgaaaaccgtctagccatgagtgtaaacactaacggcagtgtctggggtatttgccttcacggtgatggttcccgattaatctatctcgggcat

SEQ ID NO: 108266 - DNA, 210 bp, Zea mays
  Clone ID: MRT4577_30233C.1
tggtctaaagagattcccgagatggagccaccacaaattcattagagaggagagcgaagagtaggaagaaaagcgaggagaacgatctgatcctggccatctcacagcgcatggctgagccggaaaaccagctcaactccctcctcttgaacattcttttcaagagggattccaaggcaagcagttctgagcccacacaaaaagagtttg

SEQ ID NO: 108267 - DNA, 175 bp, Zea mays
  unsure (1)..(175): unsure at all n locations
  Clone ID: MRT4577_30234C.1
cccactcgttcaactataantttttgcttttgttgcaacattcgattatcaagggttcgtatttaaaaatgttaattcaccgtttactgatcaagctatcaacctttcaatgcattcatcaatgatttaccatcatcaaagagataatctttcgccaatttcttagtatgatcag

SEQ ID NO: 108268 - DNA, 512 bp, Zea mays
  Clone ID: MRT4577_30235C.1
acgaagctgcacactcagctatccagcaaaacacatccaaagatagagtcatggccaccggcagcgccgccgtggtgaccaccatcgttgcccgcgccgcgatcgccacgcccaatgctctagggatggctgcgctgatggcgaggagctagatggtgcggtgcaactacgccaaggacgcggacctagtcaacaccagaggcgcaggctcctcgctcatcaacgaagcgctcgcggggaccgcgtcggtggcgcccgagctggcgctcgtgtaccagcgcatgtgcacggtaggacaccctgctgagcctgagcctcaacaacaacctgctgaggtagatcctcctggaggtgcttcgtcctcatctaggccttctacaccatctacaactgtgacctctaccaggacgaggagatgctcggcctctcactctatatccacctctctctcctgttaatgatactgaatgtaaacattgctgtggtcatcggtgtaaatttacacatggcta

SEQ ID NO: 108269 - DNA, 469 bp, Zea mays
  Clone ID: MRT4577_30236C.1
tcccgggtcgacccagcgtacgcccacgcgtacgatcacaagctagcgagtgacccggcgcggaataagagagagacgacgtattatgatatagtagttttatagctatctatcctaatcttattttatggtactctgcttatatttttagtttttttttttttatctggttttttttatttttctgttttttttttatatttctctcatttttgttttattttttttttttacttttttttttcttttttatatatttttttcttatattattttttattttttcttctatttatttttttttttattttatatttatttttttattatttttatattatttatattttatttattttctttttttatttttttttttatatttatttaatttttatttttatttttatttttattttattttattttatttttttttttattttttttttctttacttattttttat

SEQ ID NO: 108270 - DNA, 281 bp, Zea mays
  Clone ID: MRT4577_30237C.1
gggggggaaacaaagccttgaacattttattccccatgggggcaaatgttccccatgtttttgctaaaatacagcgtgcccccaaccaaattatatatggggcgtcataacagggtcccccccgcgtttatcgcccaacaattggaaaacccacctcttcccaagacaagggtgctaccaatgataccctaccaaaataacagggaggtgcaaaaaacaccccaaaaacctctgtgttcccctctcatccgggtgcatcacgcaaaggagctacttttata

SEQ ID NO: 108271 - DNA, 410 bp, Zea mays
  Clone ID: MRT4577_30238C.1
atcagaaggcgcgtacgaaaactaggaatacatgtgacacttgacgcaacggatatatgaccccttgcacagggccggtggaagctaaactaaggcacaagtgtgccgctagtcatctatccctggtgcccgacctgtacaacatggtggtccacacacagcaatcatcgaggcttggacaaagcttccgtgaaggacctgccgaagggaagagactgatctacgcccggtgcgccctttgcaagtcataagcaccccaggaaccatgccttggaccagttccatactgaacaaccaaacaagctggctccgctgcttgattaatgccatacctacgttctaagggttggcaggataaatggcctaggggttggcatagctttcattataaccttgattgacctgacact

SEQ ID NO: 108272 - DNA, 1672 bp, Zea mays
  Clone ID: MRT4577_30239C.1
cattggtatccgcatagcagccgtgaagttaggccttcttgtccgcttgtgttggcggcggcgatggcgacgtcggcgagcacgtccggcgagtggctcaagggcgcgctgcaggaacttcgggagcgtaagggcagctcgctggagttcgactcggatctcatctcgggcctcgtctccttctgcgagctcgcgcctccctccgacgccaccagctatctcgagaattttattgggaaagaagctgctcaggacatcattcaagaatacttgcggaggaggggtcacattggttcctcaaatggaactgagagctttcagtcatctaaccttcagccttatgttaagccttcagctgatgcagcaactacacaaacaaagaaacaaacacgcacgcaaaaagattcagcatcttcttctagtcagagttctaagagtcaatcagaaattgcagaatcacaagttccttccaagagaggttcaaaaaagaaaggagcaaaggtcatttccctcgctgaggcagcaaaaggttctattgtcttcaagcaggggaaaccttgttcatgccaagcacggcaacatgaccttgtcagcaactgcttatcatgtggcaaaattgtgtgtgaacaagagggcgagggaccctgtagtttctgtggcgcacttgtcttgaaggaaggtagcacttatgctggtctaagtgatgttgggctacccctttccgaagcagaaactgcagctgaagcatatgcaaagaggcttgttgactatgatagaaatgctgcagcaaggactaaagtttatgatgaccaaagtgactactatgaaatggaaggaaacagttggctctcttcaaaggagaggtcagtcctgaagcagcagcaagaggaagctgaggaagcagctaaaatccaaaagggtaaagtgattgttacatttgatttggtgggccgtaaggtgattttgaacaaggatggaagtactgaggtggaaacagagcacccgatcatgcgaccgccggaagagaaggaccagagccaccgcatacagcccaaccccacaatcagagagcaacctgtgttcgtcgaaacaagtccagtcaaaccaaaaactgaccgagcgaaacagagcaagaggcttgccaagaatggtctgtgcctggaggtaaccggacggctgcagcatgatgacaagggcatggagagcattctgagtggcaaggtgaagaagggtgatcacttggcttacagctcctttggtcaggcacgcgaaggggatgatgttgaatgctccccggattttgactgagcctttactttgaggtaaaaaacatgaaacagcctgtgaagttgctatgttccccatccaactacacatgaaagagcaccttttttccaacttaattccctgcaaaatgcaaactgtgagaatggcgcttcgtgtacatgctttacactataggctatggatcgaattttcataaggtcatgtttgtttattatataatccagtttaaataagttaagaggcaaacaaataacacatattattaggtggattgtataatttagatatctagattatgataattcataagtaagttattaggtgcttatataatctataagaccttgccctgttattcccattccacacggattgggtggaattg

SEQ ID NO: 108273 - DNA, 458 bp, Zea mays
  unsure (1)..(458): unsure at all n locations
  Clone ID: MRT4577_3023C.1
acgggtttcagtatgcgtaaccgtcaacgacttcgacatgctcccggctcacgggtttcagtatgcgtaaccgtcaacgacttcgacatgctcccggctctgtacaaatctacaaattgtgctgtttcttggcnaaccttatctattgcaagctgatgaccaaccttgtcctgtgctgagcttgggtgcccggatcgtttaaaggtcgtctggatgtgaccaactaacgttggaagtgtgttttatattgttccctgtcacctttgtggatttcttccccctgccccgaggatacctatatgttttgaagatgctacctagggccagaggtggcttgggctatatatcctgatgaatgttctggagtggcttcccctggggatgattgtaaaacggctccctacttcttccggtaaacgttgaaaacgggcacaaacgaaaataacatgggtatacat

SEQ ID NO: 108274 - DNA, 520 bp, Zea mays
  Clone ID: MRT4577_30240C.1
ctcctcctcgcgacgatcccagtcctaatagtcgcgctactcgtcctggtggtgtccaacatcatcgtgacgtacactctccccgtgatgctgaacgtcgtcgggctcgccggcgtctttggggtgtacgccgtcgtgtgcgtcctagccctcgcgttcgtgttcatcaaggtgcccgagacgaagggcatgcctctcgaggtcatcaccgagttcttctccgttggggcaaagcaagccaaggaagaggaggaggaggaggaggccagggaaggttgatcacccggacggccggacccagttaccggcaccgcctgtggggatttttgtggtctgcacacttcaccgtggttggtcctgtgatgatgtatttgtgaaaaaaaaaactttgggtagggggcagagatgatttggctgtacaatgtgaggcttgattctgccaaaggctggccttcagaactaggaagggtgtctgttatcttcttttgttgcttggagaccttgtgcttgtgttggttgg

SEQ ID NO: 108275 - DNA, 267 bp, Zea mays
  Clone ID: MRT4577_30241C.1
ctaacccatttagtcatctcacagaaggagaacttgaagagtataagaggacaatcgaacgtaaacaacaaggcctagaagaaaaccatgagctgttttccaagagcttcatctccatggaagtgcctgtcatggtataaatggcaaggatgatatgcatgatgttgaagatgagcttgctaagcgagtgagtaggttaagcacaagtacaaccatagaaaacatcgagattactattaagtctccagagaaaatcgaagaagtcct

SEQ ID NO: 108276 - DNA, 450 bp, Zea mays
  Clone ID: MRT4577_30242C.1
gacccacgcgtccgaagtgactgaagaaaagacatcaccacctttggaatctcaggcagagacttggctctacttcgacatctgcgagtccgagcctgactcacctactaacaaagaaaacggagaagagggtgaagtgactgaagaaaagacatcaccacctttggaatctcaggcagagacttggctctacttcgacatctgcgagtccgagcctgactcacctactaacaaaggtgaggaagtagcagacttttgctgcttctgtgctaaggtggttcccaacaaggaaaaccaagactgaagtgcgggaggactcggtcctccatctaggatcttttgtttattgtctttcgggagaagttggtgtctccctggtttgtataattattacttttaggcactcacttttagtctggtctgtaataaaaataactcaagcttgctttc

SEQ ID NO: 108277 - DNA, 521 bp, Zea mays
  Clone ID: MRT4577_30243C.1
agtgcgtccacgcgtgctttcttaactaacttttcttttgaaaaatgtgaaacagcatattcgataatttttctaaacttttatttggacaagagcagtcattcctaaggatgggaatttttctctacacggaaaggattctatacttttatgaagctctctctaaatctctcatggtgcaggagcaccatattatcttgaggaactatgatctacgatacttcacgtagacagtaacctgcttaaggactctaagaaaattaagttagtgtgaagttccatatatcaggcgtagtttcaattttccaaagaaataggcagaaatctaaatcattttataaatcctacttaaatgggtgaatcagggagtatatcaaacaagaatagttgcatagttcattaagcacttaataaatttttttaaccatagcttgcaggtactactattatcctttcatttccatactttaatcactaccctaaattaattaaaaacttctaaaatagtactagactatggg

SEQ ID NO: 108278 - DNA, 387 bp, Zea mays
  Clone ID: MRT4577_30244C.1
atgtattttcttgagagtaaattttgtttatcccaactttaaacccccatctacaacccgagggagggtgcccctaagctacaatttatctctacaatcaccccaataaaaaaaaggaaactcccataggtcacatgctacggctgatgtcaatacactctatactctattaggaacaatgttcttccccactgaattcacaaaaacaaaacgggccccccctacatgaaaaaaagatcaataatcccgaaccctcaaaaggaattctggaagggtcatcctgaatactcaatcctaaacctcaacaccaacacacttctaaccctaacaacagcatgcaatctccagtggagggcacaatgtccaaatgacacgatcacaaaaagg

SEQ ID NO: 108279 - DNA, 411 bp, Zea mays
  unsure (1)..(411): unsure at all n locations
  Clone ID: MRT4577_30245C.1
cgcgtncatgaacgaggtcctgatctacctcgaaacgctggtgtcgacggcgcaggagatcctgcgcgctggaagctctgtacaaggtggtttctggtgccatgagccacatctcggactccataatgaccacgctcctgaacgacggcgtgaagaggttcaccgtcaacgcggtcttagggatcgatattgacctgaagacgctggaagcattcgcggacgacaagttcgacagcacggggctgtcagatctgggcaaggagacgacttgcagggactgtttagttgagatcaggcagctcacgaatctcctgctcagcagccagcctgagaacttcatgaacccggtgatcaggcagaggaactacgggtctctggactacaagaagctggccatcatttgtgagaagt

SEQ ID NO: 108280 - DNA, 272 bp, Zea mays
  unsure (1)..(272): unsure at all n locations
  Clone ID: MRT4577_30246C.1
cctgggcgcgcgcccgcgcttggcccctatgttggaggccgcgatggtgatcttcatatctctcctccctctggggtcttttctgccccactgtcctaccagaattttggtgttttcctcggcctcttgtgggttgtcgatgacgatctcctttcctttgccctaatctgtcctgttgggccaaaccaaaacttttttatcctccaatttggtcgtttttattggacagggctcctgtgccccctgcttttcttgnnttctcctttggccct

SEQ ID NO: 108281 - DNA, 663 bp, Zea mays
  Clone ID: MRT4577_30247C.1
cgaccaaaacaccagggtcccagtgctcttggctctaagaggcggcgccggaaccggaggccaagctggaagccgtaaccccatctcggtcccacgagctgccaccggagtccgaatccgacgcccctgcctccaccggcagccaggagctaaagccgtgggagcagcacgccgcggtgatcaacctcccgcgctacgactaccgcgcatcagggtccctcctcctccgttcgcattccggcttcctcatcacgtgccccatcaagcgtgaaaaaagtgcaaccaaggaagccattcccatccttgaagaggtcattgctcatcatgttgctccatagtatttaattgtgttcccagttgataattctagtccatgaattttatcttagagaacgttgctatttcaatctgcgttttattttagcaatataccaaattatgttgcatttcattcactatttgatgcacaccctcaaactcaatgaagttttatattttattattttcccacctaatagtacttactggattaccggttccaccttctgttcatatggctttctcatgctatatgcttgagtgtgtaggttttttttacttcttttgagttgcactgtttgcaacttcattatgtagtcttttctccacgattgatagctcagt

SEQ ID NO: 108282 - DNA, 485 bp, Zea mays
  Clone ID: MRT4577_30248C.1
ggggggggagaaaaaaaattaagaaaaggaccacggctccccaagagccgggggggaagcgggcaaaacccggaaaaaacaggccaggggaacgcgggaacgggggcccaatcgaggaaagtcggggggccacccgccctttttatgggggggggggggggaacctggagaaacgggggggcccagggggggggggaaatggggggggccccgaacccggaaaaccggggcccctttgagaacgaggggaaccccgggtaaaacccctttttcccgggggggggggcccccaactgaaccatgtccacaggaaaaaaccccggcccctgggggggggcccccggggtgcccggaggccccgacccgagaagagaaacctgggctttttccggcgggggggatacacatttttaggacaggggggcccaagggcccggcctccaacagggggggacccacttggaggaggggggggaacggggggg

SEQ ID NO: 108283 - DNA, 847 bp, Zea mays
  unsure (1)..(847): unsure at all n locations
  Clone ID: MRT4577_30249C.1
tacgagctgccaccggagtccgaatccgactcccctgccttcaccggcacccaggagctaaagccgtgggagcagcacgccgtggtgatcaaccttccgcgctacgactaccgcgcatcagggtccctcctcctccgttcgcattccggctttctcatcacgtgccccatcaagcgtgaaaaaagtgcaaccaatgaagccattcccatccttgaagagaaccatgtgatgtgaaaaatgagctcaggtaagacaaagagcattagcagtttcagggacatttacaaattcagttttacatcttttgttcgaaattcttttcaactctagcttccacacagtacatgttaaaatatgctgatgtgaaagcttcattttgtcttttgttcagtaccatgcaaattgctgtgtttctgaacatngcagaacnncatgtgatgtgaaaaatgcaattaagaaaagaaaactgtgctcggaggcatcaggaagtttagaagaggcagtaacgaatgggaatagtagcagtgtttcagaatcaattggaagcaccggaaacacaagctcaccccagtccaaggtgaatgacaatgttgacagggcttcaaatctctcactggttaagctatcaagaagtggcttgctcttctttaaatttcctagtggaggcgttcatgtagttgagatgcttactgaaatacttcattcactcagatccaggaaactcaaatctccacagtaaggatccaacttcattatggtgccaccgcatattcccaattcaagaaacttgcattctatcagaagaagacctgcatgccactgtgtcaaagttattccttgacttctc

SEQ ID NO: 108284 - DNA, 756 bp, Zea mays
  unsure (1)..(756): unsure at all n locations
  Clone ID: MRT4577_3024C.1
ccggccgggtccgccgcgccatttccctgtttcagtttctctgtggctttccgcgcgctgcatgacctggtagattgttgtgaagatgaacgacctgttctcgtcgagctcgttcaagaagtatgcggactcgagcgtggcgacgtcggcggggggcgcggaggccggcggcgagagcgtgattaacctcgacaagttcttcgaggatgtggaggcggtgaaggacgacatgcgcggtctggagggcatgtacaagggcctccagtccaccaacgaggagaccaagacggcgcacgacgcccgcaccgtcaagtccctccgctcccgcatggacaaggacgtcgagcaggtgctgcgccgcgccaaggccatcaagaccaagctcgaggacctcgaccgctccaacgccacctcgcgcaaggtgcccggctgcggcccggggtcctccacggaccgcactcgcacctccgtcgtcgccggcctcggcaagaagctcaaggacctcatggacgacttccaggggctgagggcgaggatggccgcggagtacaaggagacggtggcgcggcggtactacacggtgacggnggagaagccggaggacagcacgatcgaggcgctcatctcgtccggggagagcgagtcgttcctgcagaaggcgatccaggagcaagggcgcgggcaggtgatggacaccatctcggagatccaggagcggcacgacgccgtgaaggacatcgagcgcagcctcatgga

SEQ ID NO: 108285 - DNA, 1642 bp, Zea mays
  unsure (1)..(1642): unsure at all n locations
  Clone ID: MRT4577_30250C.1
aatcctgcgattcctgggggtcccagtgctcttggctccgcgagggccgggactcattcggcatacctccgaggctccgaccaaaacaccagggtcccagtgctcttggctctaagatggcggcgccggaaccggaggccaagctggaagccgtaaccccatctcggtcccacgagctgccaccggagtccgaatccgacgcccctgcctccaccggcagccaggagctaaagccgtgggagcagcacgccgcggtgatcaacctcccgcgctacgactaccgcgcatcagggtccctcctcctccgttcgcattccggcttcctcatcacgtgccccatcaagcgtgaaaaaagtgcaaccaaggaagccattcccatccttgaagagtaccatgcaaattgctgtgtttctgaacatgcagaaccatgtgatgtgaaaaatgcaattaagaaaagaaaactgtgctcggaggcatcaggaagtttagaagaggcagtaacgaatgggaatagtagcagtgtttcagaatcaattggaagcaccggaaacacaagctcaccccagtccaaggtgaatgacaatgttgacagggcttcaaatctctcactggttaagctatcaagaagtggcttgctcttctttaaatttcctagtggaggcgttcatgtagttgagatgcttactgaaatacttcattcactcagatccgggaaactcaaatctccacaatggtgccaccgcatattcccaattcaagaaacttgcattctatcagaagaagacctgcatgccactgtgtcaaagttattccttgacttctcgaggagcaagacaaacgaagacaagcctataaagtttgcggttgcctataatagaaggggcattgatgagacagagaagaacagtaatgaaggttcaaaccagcagactttgatggatagggagcaatgtttcaaagtggtagctgctgctgtcaaatccgttgctgagaactcagtggttgatcttagatcgcctgaggttgcggtactcgttgagatgctcccggtttccggggtacctcttggatcttcggtggctggggtgtctgttctcccagccgaactcatctcgaccaaacctcgcctttgtgtcaggtctttggtgcctgatgcaaaagcaggaaaaaagaagtgaaatccggtggcgcctcgtcaaccagagtatctgtaatgggaaactgccgatgcagtttttcacatgcctatttgtaccagagtaccatcgccttaattaagccttgtttttatgaggacatgaaaccatgatcagggcttgtccttttttacattaatcaaggcgagtttttaataatcatagaagacactggtatgccttcgacaatgtatcatcctttgcccccgcacaaatagtcgtctgtctgcctttggggatgtcaaattgtgttttgtggcagcatagaagggagttcattcagttcttgccttcttgtacttgtcgtccttttttttagcagcgtgccgaaatgtcaaaactggccgaaaatgatgctccatagtatttaattgtgttcccagttgataattctagtccatgaattttatcttagnanaacgttgctatttcaatctgcgttttat

SEQ ID NO: 108286 - DNA, 416 bp, Zea mays
  Clone ID: MRT4577_30251C.1
gtcgacaacctactgccactgctccgttctaggacgccgacaatacacttccccagctccgcaccgatgagcgacaatacagatggcgccaaggagatgtccggctatcaggatccatctcgtaattacgtattcttgcctccgcctgcgtgatcaccaccgcgtctagatcttctgccaacgactagggcaaccgcagcaccccctcgcacgtccagcttcaccgactccgatggcctcatcggagatgctgtcaataaccaggccgccatgaaccccataatcaccgtatctaatgtcaatggtcgccatctctcaggcaggggcatggatgcatcagaacatgaacgagatcaagatgcggaccttccacgacattactgggaactgagagagaaaaccatgtattcgtatgc

SEQ ID NO: 108287 - DNA, 339 bp, Zea mays
  Clone ID: MRT4577_30252C.1
cgttgctgtcggataaatatagtgatcaactgtgacatgtttattcaagataaatatagcctgttactgaacaaatacaatggattcaacttcagtcaagaccaatatacattggatttagcttcagtcaagaccagattgcttcatatccatgctggccctatggtcctgtaacattatttccacgttgaaaatcgaaaatgtagtattagtgtattactattgtacattgttttgtctacatgtttttttggtttacaaataaaaaaaccttgtgctgcaaaaaaaaaaaaaaaaaaaaaaaaaaaaaaaaaaaaaaaaaaaaaaaaaagggggggg

SEQ ID NO: 108288 - DNA, 401 bp, Zea mays
  Clone ID: MRT4577_30253C.1
cgaagctcggaattcggctcgtggcagaggaactttgctctctcccgggcgcagcagccacatgcatatgctaggttcttggcacgattcgcatcacaattgggcccacccgggtgggacgtggcagcaaatcgtatcatcagggcactcccccctgagacaagtctcggcccaagacaggacgcacatggtgaaccacctcaaaactctcagcggactcctgcctcatctactaatccctcctctgagcccacttctacacccattatgccatccaagaatgatgtactcgatcacaagcctggacccacttctaatagggatgttactgctgcagtacacctacttagaactcaaacagcagcttgtacatcagcaagccttgataagagctctgtcat

SEQ ID NO: 108289 - DNA, 575 bp, Zea mays
  Clone ID: MRT4577_30254C.1
ggccttgccacttcctccgcctctgccctgctctgctcagcttctcacctcccagctgggctccccacccctctcgctccctgttctatcctctcgttccctctgcaaccttctctctctctagcttatcccgataatggctgcctcgagcagcaccacctagctagccgtgcccgctccacgcaacacgtacgtacgtccgctgctcggcgtcggttccgcctcgtacaacaaccacactttgcattgagccaggtcgtccagcttctgaggaggagcggcagcacgcacctgggcgccggcccactgctgcagctgggctgctagcttgagctgagcttgccgttgggcgcgcgcgtgcatggcgcccaagagcaggcgtgggaaggccaagggcgagaagaagaagaaagatgagaaagttctccctgtggccattgacatcactgtcaacctcccggaccagtctcatgtcattctgaagggtatttcaacggacaggatcatcgatgtgaggcggctgctctgcgtcaacaccgccacgtgtgccatcacaaattattctctcacacatg

SEQ ID NO: 108290 - DNA, 2771 bp, Zea mays
  Clone ID: MRT4577_30255C.1
cccggtcgaccccgcgtccgctgaatctcctcagaggtctttcagcttcactaaatgttaggatagtttatctggacatcatgaggccatttgctgaatcaactttgttagggagtttgacacacggacaaatacctaacagtcagtggatttttgactcacctgctaactctgatgtggagtctacgctcgctggttatctgcttgagttgggaagcgacaaaattttaggaataccagtctgcgcatataaagatggaaaggtcataatagatactgctgctggtatgctggggaagtatgatccccgacctgttcaacctgattctctttttcctgttggcaaggttctaattttggaatatatggatgggattcgtttaaatgataatgattcattggaagcatatggtgttgacaagcaaaaactggtcgaagagataacccgtgcatacgctcatcaaatatacattgatggcttctttaacggcgaccctcatcctggcaattttcttgtgagcaaggaacctccacataaaccgattctccttgattttgggctcactaagcgcatatctgaatctatgaggcaggcactagcaaaaatgtttttgtcatgtgcagagggagatcacgtggcactgctgtcagcattttcagagatggggcttaaactgcgggttgacatgcctcagcaggctatggatattgccacagtattctttcgtcagtcaaccacagcaagtgaagcaaaggagaacataaaaacacttaatgaccaaagagagagaaatgtcaaagctcttcaagaaaagatgaaattgaacaagaaggaggttcaacgctttaatcctgttgatgctttccccggggatgccataatatttatgagggtcttgaatctcctcagaggtctttcagcttcactaaatgttaggatagtttatctggacatcatgaggccatttgctgaatcaactttgttagggagtttgacacacggacaaatacctaacagtcagtggatttttgactcacctgctaactctgatgtggagtctaaactgaggggttatctgcttgagttgggaagcgacaaaattttaggaatacaagtctgcgcatataaagatggaaaggtcataatagatactgctgctggtatgctggggaagtatgatccccgacctgttcaacctgattctctttttcctgttttctcagtgactaagggtatcactgctgggatggtacattggcttgtggacaaagggaagctgaagtacgaggaaacagttgccaacatatggccgaattttggaactaacggaaaggagttaataaaggtccatcatcttctaaatcacacatccggtttgcacaatgcactgggtgatgtggtaaagaatgatcctttgttggtatgtgactgggaggagacactaaaccagattacgaagagtacacctgagaccgaacctggttcagcacaaatttaccattacctctccttcggttggctgtgtgggggagtcatagagcatgcatctgggaagaagtttcaagagattctagaagaggctattgttcgtcctcttcacattgagggggagttgtatgttggcattccaccaggtgtcgagtctcggctggcagcgctgacagttgacaccgaggagctccagaagctatcaggaatcagggcaggtgcagatgtgccagcagctctgctgaacaacatcgcgcagatggcgtccggtgtgcccgctattttcaacacgctaaacgtccgtcgggccatcatccctgccgccaacggccactgctctgcccgcgcgctcgctcgatactacgcggcgctagcggccggcggttctgttcccccgccgcactcttcgggcgccatgccgcccctcggcagccacgtgcacacccccaagttcccgaccgcgccgctcaagaagaagaagaagggcgccggaaagaagaagggcgccggcggcggctccatgggagacctcaaggtccaggatataagcggcggcagcagcgacaggaacgggtactgccagctgcgcaccagcgacgccgacagcgaggcggggagcggcagcggcggaggcggcaggatgttcggcagcgacaggatcctcgacgcgttcatgggcgtcggcgagtacgagggcatggcgcaccgggacggcaagttcgggctcgggttcaggaggtacgacgacgccggcagcggcagcggcaggctgaggtgcttcgggcactccgggatgggcggctcgaccgggttctgcgacgtggagaacggcttcgccatcgcggtgacggtgaacaagctgtctctgggcagcgtcacgcgcggcgtcgtccggctcgtcctcgaggaactgggcctgcccgtgccggacgagtactcggccaccggggagaaggggcctgacatgatgctcaacctgacgacaacgacgacgactacgccgccgcaactgagatgacgacggcgaaactgagattatcaggttgggttcgtaataatctgtggaacaagatatatagcgagcagaaggaaggttggggtacagggatttggtggacagtatatatacgcgtgccattttgattttgacgtggcatgtaaaactcggcaaattctggtatattacgaagcaagctgggtgctgggaattgtggccagcagtacaataaaaaaaaaaaaaaaaaaaaaaaaaaaaaaagtactctgcgttgttaccactgct

SEQ ID NO: 108291 - DNA, 488 bp, Zea mays
  unsure (1)..(488): unsure at all n locations
  Clone ID: MRT4577_30256C.1
agcagtggtaacaacgcagagtactttttttttttttttttttttttttttttctttttttttttttttttttttttttttttttttttttttttttttttttttttttttttaagtgaaaaaagaactttttaatgaaaaaaaaaatangggaatggtaaacctaaaaaaggggggggaataaaaaaaaaaaaaagggcaaaagggaaaatatttattagaaaaaaaaaagggggaaagaaccccaaacgaccaaaaaaacctggggataggaaaaaaaggaaaaaggggggtgggggccccagggtaaaaccccggggactgtggggggccaccacgggtaaagggggaattctggaaaaatccatgaaacggggggggggtcggggagggctttagagggcccaatttgccctatgggggggcggtttaatttcgagggccgggggtttaaaaggggtggttggggaaaacggtgggggtcccca

SEQ ID NO: 108292 - DNA, 374 bp, Zea mays
  Clone ID: MRT4577_30257C.1
ggaacagcgctgaaataatcacattatttgggctgaattaaaattaacaagctgcccaggacgtaggtgaaacagtttagcatgtaagctaggattgccagaacctgcaggtgcatatgcagtagagcacaacataacatgatacttgggtgcgctaataagggccaagcccatacgcgaggtagactaatctaaaccttacgaaattattaggtggcctggttttatttaaagagcattattctgcgaactgatggcaaaaaattatttgtacaactaataaatacctggctgttgctaaaaatcaaatggctgggaacaatttaaagcatactcatggagaggcatattgcaacctattgatgtcagtaacc

SEQ ID NO: 108293 - DNA, 158 bp, Zea mays
  Clone ID: MRT4577_30258C.1
ttgttttattttgaaacaaacaatctggatacaccaatagaacaaaacaagatataggaactaatatgcaaaataacaagaggggaaaggaatattagcacacataaactaagaatacagggaatgcgtggtttatcctgcgaaccattgtttacatg

SEQ ID NO: 108294 - DNA, 645 bp, Zea mays
  unsure (1)..(645): unsure at all n locations
  Clone ID: MRT4577_30259C.1
ggagctggtcgccggcgccggccacggncgccgccggcccttacgcgatgccttcgcccgtgcagccgtcgtccaagagcacgaaggagacggtgaagaatgcgctgtcgcggtgggggcggaaggtcggggaggcgaccaggaaggccgaggacctgtcgcgcaacacatggcagcacttgaggacggcgccgagcatcgcggaggccgcggtggggaggatcgcgcaggggaccaaggtgctggcggagggcggcccgcccgacgagcagctgcgcaagtcctacgcgtgctacctctccacggccgccggcccggtgatgggcgtcctgtacctgtcgacggccagggtcgccttctgcagcgatagcccgctgtcctacgaggcttccggcggcgacagaacggagtggacccactacaaggtggcgattcctctccaacggctgcgggcggcgagcccgtcggccaacaagacgaagcccgcggnagaagttcatccagctggtgtcggtggacagcctcgagttctggttcatgggcttcgtcaactacgacggcgcggtggcgcacctgcaggaagcgctgagcgggttccgcaacctgcgggcgtgacatcgtggacctcaatgcaatggacagtgt

SEQ ID NO: 108295 - DNA, 210 bp, Zea mays
  Clone ID: MRT4577_3025C.1
atgggggcagccgtgatttgtccctcactcagggtcagtaaaggtaggctcgggagcgtcagtgactactgagtgcaccactgtgtctgcccggttgtggttgtgcgcttacccagatgatgcctgtggggatgagctgcgaacggtaccagaaaatgagcctgagtttcatgcggcgtcggatgcccagaaagaaaactgatggaagtg

SEQ ID NO: 108296 - DNA, 580 bp, Zea mays
  Clone ID: MRT4577_30260C.1
attggggtacccgggtccccccctcgagttttttttttttttttttttttttttttttttttttttttttttttttttttttttttttttggcacaaagcaaaacctataaatttttccttccctattccgaacaaatcgcagggcaaggcccaccagggcaactttacaatcgggagggggggaaaacctaccccctttttttaacccacaaaaactcccgtttgccccccaccaaacatgggcgaaacaggttatacaaagggcccaaagggggatgataataatgaaaaacaacaggttacccttacccaatacggaaactgctacatggaaagggggggggccttcaaaccgcacaaaaaaaatctaagctttttttcggttaaaaaccctcagggaaactaccctccgccagcttttttttggttgctccacgggtaccttttggcaaaaaaatgcttggggaaatgttaaaccctcgaattaaaaaacgggcatggccataaaaacacttttccttggggttacttctcatagcaatccagcaagcatggtcccagggtcattgaatgtggcag

SEQ ID NO: 108297 - DNA, 471 bp, Zea mays
  Clone ID: MRT4577_30261C.1
ctcggtacccctgctcggcgggcggggcgctgaaggcactgtcggaatatcctgtcgtggccgccctccgccagcaccttggtcccctgcgcgatcctccccaccgcggcctccgcgatgctcggagccgtcctcactgcccaggaaatcagttgcgatcagttgcacaaatcacagagcttacaccagtctgatcggcgatggtgtatataggtagagagagttgatgaacagagcagagtctcccacagtgctgccatgtgttgcgcgacaggtcctacggcttcctggtcgcctccccgaccttgcgcccccaccgcgacagcgcattcttcaccgtctgcttcgtgcctgcgcgcgcgcggaacaaccgatcgaaaaaaaagaagaaacgtcagggataagcgtcgcgcagcagggaagatacctatgggtcaggtgactttgtggcaccgccaccgggcaccgact

SEQ ID NO: 108298 - DNA, 1733 bp, Zea mays
  Clone ID: MRT4577_30262C.1
tgcttcagcccattattaatgtctgagaaaaccccttagatgtcataaaaaggagattggggtagacagagaggatgcttgtcgaagggttcagtttggtgtggtgtgctgatgattgttactgctgttgatgtttggatgaattgctcaagtggctgacagccgagatgtggatatggcaaatgctgatcatcatggcagatagagacagatacctcttctttttcgaggactttaatttttggcattttccttttaaatgcacacccatcattatctggaataaattcctgcattaggagccagtataaggttctgaacacacctgattgctttcaatgccatgccacagtgaattaaatgttctcaaaattttatcaagcaaataccattgtgtcgtttctactatgttcatcttttaggaataatcatacaatactggtaccttacaagctcatcacaatctaaattgatagaacaaactgctgaaactatctctgcataaaaaagaagtttttgacctgcacatcatctctttgctgttgatgcaagatattgacaggaagactttagaaattttatttcaggtaaagaagatctaggaaggaagcaaatcttatggcttctaagccaactgtagttgattgcattttcttcacatatcattgataaaagcatgtagccttgactgatagaatggaaaggaggtgagcccctgtgtgcccatcacaagatgccagctatctgatcaactaggtgaacggtggtcacacatagacagattttaggagcaccatgtccagctggtagtggggcacaacagtgaggagcatgacacacatatgcccacaccaagcaaacttgctacattagtcccggcagatgcattcaccattggaacatattctgttgtcacgttgtcttttcaaggagttctttaattctgcaatatatttgcaaattgatttagttgtcgtgtgtacccacattaccctgcagtttctgcctttttattctgcattcaccattgctgtcctacccccaccccacccccagcggaacttttgtgttcctactttatgccgttcttgtaaattgtaaacatttttaaagcctttctatattgatacaggctggacagaaatcctggcagcagtttggggagaaaaagatgtgcaagtggagaggtccaacaaggtacaatggactaagggaggaattcttctcttggagtgggggttaaagtggcttatcttaacatgcatccgatcctctctctctggggtttgtgataacaagattcaaaggatgatgcctcgtcaatagggttcctgtttttctccttatcatccatgaaaccttgcccccacccacccacccaaaaaaaaaataaaaaatggaaggctctcttgtggggttgctaaataatttggtttggtgttctggtctgttttcggctagacacattgatgtcataatcgaaacgcacatgaaggctggcagcagcttgtgatctgaatccaagtccattgttcactttgtggccctggaagagccagaatgaaaacttgactgtgcatgcacatacatgtagcgggtaaaacctcccttgtcgtgacttgtgtgagttttgccatatgacttgcaaacagtaaaatgattgtgcatatgctggaccatgattcatatatatggcaagaggatgaaaaatcattcgcttgcagaaatggacc

SEQ ID NO: 108299 - DNA, 1083 bp, Zea mays
  Clone ID: MRT4577_30263C.1
ggaacggggccggccggccggccggggatcggaactgaagttcctgcgtgtgcacacaagagtcacaacagggagagtgggggacattccaatcagttccctgcgtgtgagcgatgcagcgggacgcgagaagctggtcgccggcgccggccacggacgccgccggcccttacgcgatgccttcgcccgtgcagccgtcgaccaagagcacgaaggagacggtgaagaatgcgctgtcgcggtgggggcggaaggtcggggaggcgaccaggaaggccgaggacctgtcgcgcaacacatggcagcacttgaggacggcgccgagcatcgcggaggccgcggtggggaggatcgcgcaggggaccaaggtgctggcggagggcggccacgacaggatattccgccaggccttcagcgccccgcccgacgagcagctgcgcaagtcctacgcttgctacctctccacggccgccggcccggtgatgggcgtcctgtacctgtccacggccagggtcgccttctgcagcgatagcccgctgtcctacgaggcttccggcggcgacagaacggagtggacccactacaaggtggcgattcctcttcaacggctgcgggcggcgagcccgtcggccaacaagacgaagcccgcggagaagttcatccagctggtgtcggtggacagccacgagttctggttcatgggcttcgtcaactacgacggcgcggtggcgcacctgcaggaagcgctgagcgggttccgcaacctgcaggcgtgacatggaggacctcaatgcaatggacagtgttgtcttgtacgtgctcgccagaactgattgatcgaacagagcgattgtgttcccgctctctgcgtgtgttgccgtgctagtgtttgcatcgtgttgtgcgtgtgcggatttgtatgacattttttttatttggttgccattgtcagcgagagaacagtccgatcattttattcagatttcagagaagacaatggttagttatccatggcgatggctttgatgatcacggccaaattaacctgtgagtagggtaacaataatctctaaattttacatt

SEQ ID NO: 108300 - DNA, 184 bp, Zea mays
  Clone ID: MRT4577_30264C.1
acggagccgttctgctggtcttcctagcgtgcgtcgatcatgtatgggttgctgtcctgatgccttcgccgcttcaccatttatctgaggtcttgagaagtgtcggttcccggtctgacgccttcgctgctggtgcgtcgacttcactctctcttcgagaaggatgaaccaatcctgtatcagg

SEQ ID NO: 108301 - DNA, 377 bp, Zea mays
  Clone ID: MRT4577_30265C.1
gccacgcgtccgaccacgcgtgcggccacgcgtgcgaaataaaagcagggacaacactgaggatgcatatggtgtgagtctggagtacttttgacaaggactgggcgaacgactatgagcatccacacatactagacgaatgcattatccagattatgttgacttgacggctgcctcaatgaaatttgcgagacagattaatacctgcttgaacctgataaaaccgactggcctcaaactgtattcactgagccgaatatacatgttaaccaagatgactactgcggatgaacgcacttatcctgagacattgggaacttatgacattgctaaatgtccataggtacgcgccgtgtattggaacgttaagaccccac

SEQ ID NO: 108302 - DNA, 287 bp, Zea mays
  unsure (1)..(287): unsure at all n locations
  Clone ID: MRT4577_30266C.1
gggaatcaacagtaaattttgtacccggggccccaaacacacacagggaggggtaaacagcttgcacatctaaacgatccaaggcccaggcggggggggggacccagaaacaacgccccccacaaacggcaaacgcctcacacccggggcccaatttgggtattgttgttgggccatgggcgaccgggggttctatgggccccagggccagccctgagcccataactaccaagaaaccctngccctgccggggggcgcgtgggtcggcccgggggttcgggcccggg

SEQ ID NO: 108303 - DNA, 360 bp, Zea mays
  Clone ID: MRT4577_30267C.1
ggaattccaggcacgacccacgcgtccccagagtgtcacacatctgatgcatatgtagacgctaggaacactgatcaatggctacggtcatatgttccatcttctcacaaggttaatacaagctgtcacatcatccctatcaagcagcatatgataaaacagtaagacatcctcgccggatggataatgaacgaaacaactacatggagagccaaagtggcatacgtgataataaccctgaaaacggtgctgcaacctccatgtgaacatgcattgcaacaagacttgttcaatagactactttggacttttggtgaacgctgcatgtacattctgtttacaccctttcacagtgaactt

SEQ ID NO: 108304 - DNA, 297 bp, Zea mays
  Clone ID: MRT4577_30268C.1
tttttattctattgccctcgcgccaccgtcggcggcgtcgtcgctgcagcgagccaccgtcccgccgtcgcttgaggtagacaccaatccaccgccatggggcgtatgcacagccgcgggaagggtatctcttcatcggcgctgccgtacaagaggactcctacgatctggctcaagacagctaccactcgggtggaggagatgattaccaaggctgcgaagaagggccagatgccgtcgcagataggtgttctgctccgtgaccagcaccgaatcccgtttgtcaagagcgtcact

SEQ ID NO: 108305 - DNA, 405 bp, Zea mays
  Clone ID: MRT4577_30269C.1
atacggccaaccatttaccatcgactcagcgagcgagagcttttacacttctcatctagctaggagcatcatcggcggcgggggcgatttcagactccatgacctcctcgtcagctctggcggtggcgcctcatggcctgcctgcccttggtcgtcgcgccttctgcttcgccgtcgtctgctccaagaagaagatcaagaccgacaagccctacaggattgggggtggcctgaccgacgacttcgacgccaacgggagaaagggcaagggcgagggcgcgtaccagttcgtcgacaagtacggcgcgaacgtcgacggatacagcccaatctactacgaggatgactgggcgcccaccggcgacttttacgtcagttggaccactgggcgcttgaactggggcg

SEQ ID NO: 108306 - DNA, 273 bp, Zea mays
  Clone ID: MRT4577_3026C.1
gaaacaacaagactgacagcgacgatgatgccacagctgcgtacgctcgtcgcgctggtcctcgtggccaaggccatagccgccggtcccggccggtgggtttgtcgtcacgggctgatttactgcgacgactgccgcgccgggttcgagacaaacgtgtcccaggccatccaaggcgcgacggtggagatggagtgccgccacttcgattcgcagcaggtccacgacaagggggaggcgacgacgggccccggcggctggtacaagatggag

SEQ ID NO: 108307 - DNA, 450 bp, Zea mays
  Clone ID: MRT4577_30270C.1
atcgccgttcccattccacctcgtcacgtccctgccgtattcaccccgtccgaaaccttggacattggtttctgaaggccaccaggttacctagaatcatcatgtcaggaagagatcgcctgccgcgccgttttgtcgaagatggaaggggctatgttgacgcccgtgtggctgaggatcgcaggggtcatcatcctggtatccgagtggttgatgatcgtaggggccatcacgagatccgtgtagtcgaagatcgcagagcctatcctgcagttcgagggattgaggatcggagaggctaccctgagattcacgaaaggccgctcatgagggtggctcctcgctctcacctggatgtcctagaggaagaaattccgttgcacgagattgatttccgcaggcttatggctgatcgtcatgctctagctgaggaacggatggagttgcaca

SEQ ID NO: 108308 - DNA, 573 bp, Zea mays
  Clone ID: MRT4577_30271C.1
gggggtgggggtgggtttttatatttttttttttttttttttttttttttttttttttttttttttttttttttttttttttttttttttttttttttttttttttttttgggggcgttcaaaaattccgggggggggcaaattcccctcgggggggggggggggggttttttttttcccccccgtcccaaacaaatggggggggccctgtacaaattgacgggttcctgggggcccggcccccaaacccggcttggtttttataccgggttaccggggaaacggggggcccttaggggaaataccttgcaaatttttgggttcttaaaaaagccggggcccaattgctcacaagggttttggtgggaaaaaacacaggcccccaaacattgatttgggggggctcctttttaggccttttttcccccctgggaggggcttaagaaatttttccctccccttggggagggggcccgggccttgagcggtccggggtccgcgggggggccggggcggccccccttgggctgggcccttttggccctccgttttttggcctaaaccttggcaaag

SEQ ID NO: 108309 - DNA, 753 bp, Zea mays
  Clone ID: MRT4577_30272C.1
atcaaagttacacgttcggtacgtgttcccttttccttgggctcttattctgattatgctgattgcgatgttattcctatggaagcatgctctttgttacttggtagaccgtggaaatatgatactgatagtttacatcatggtcgttcgaatcattattctttcatgtttaagggtcagaaaataattatccatcccatgacccctgaccaaattataaaagatgatcttgctcgggctacaaaaactgcaaagcaacatgcacctaagccatccacccctgttaatgctgaaatcaagttgcatgctcctgttttacttgctacacgtgctgattttgatgacctacatgatactcacttgccctgcattgcacttgtatgttctagtatgctcgtttcatttgatgatgccccgcctttggatattccccttgctgtttctaaccttttgcaggagtacgctaatgttttccctatggactagccaccgggtcttcccccgcttcgtggcattgaacaccagatcgacctcatccccggtgcctagcttccaaaccgcgccccgtaccgtacgaatccggatgagacaaaggagatccggcgccaggtgcaggcgtttgcttgataaaggttacatttgtgaatctcttagtccttgctcagttcctgttttacttgttccaaagaaagatgggtcatggtgtatgtgtgtcgactgtcgcgctattaataacatcacaattcgttatcg

SEQ ID NO: 108310 - DNA, 393 bp, Zea mays
  Clone ID: MRT4577_30273C.1
agctctaattcggctcgagcgattttcgccaagtgtcatttcccacacggcctgcggaaacacagggggggttttatgaagtcttagggggattactacccacccccacaaatgcaagacatgcaaagcacgaaaatgcaggaactaaaaccactacattactggccaagcgtggaaacatagtaacatatacaaaatgggggaggtccaatccttacagacttacactatcgcattcatacgaacccacggactttgaaagtccgaacgctggctagccgacataccacaaaataagaactgctactactcctgcaacgactgatcaactaactacaccgaagagggcacatgaagttccaatatttgacgatgaagttcggcctaaactaa

SEQ ID NO: 108311 - DNA, 1033 bp, Zea mays
  unsure (1)..(1033): unsure at all n locations
  Clone ID: MRT4577_30274C.1
tttgaattcggcacgagcttgcttcttcaatgtctcgtttgaaatcaaggatcactccattgagtttgatgaaaaccgcaatgtcaaccgtgctgaatttcttgttcgagcgtcaatgacaggtgggagattctcagacggttggggctcctgcgatcgacgagagaaaaaattcaacaaacctaaccatgacattcccagcacagctgaaaccagagctaagaacaaggcttgccaggatcttcttggaattggacgtccaggatgagaagtggaggtccctggcccccaaaggtggagtccatgaggtgtttacctttagatcagctactcatcgccagctcccaaagtggaatccccaaattttggttatagtcaaggttgtctgcgtggctgttagctcagtgcaaaaatatactggttcgttgggctccgagctgcggcagctgatgagagggccgtagtcatggggccggagcgctcttccttttgctctgagggtatctgcgctcgggctactgcggggtgtgggtggaactcccttcttgcagatatgaagttagggtccaatgttctgctcctctttgttagtgaaaagcctatcagatcgggggggaggggggatgtgtgctcggatcacctgtggcactgaactttttttgttgtggtgtggacattggctgcccctctaaaatggaagtttgtttgtgcatcgagatgcgtcagctgatgaaagaaccaaatncaaggagcaggagtgatcttcctttttctcagatggaaactgcaaacgggaaacagtgtggtgtaggaagaactcgaacgaactcaagaactctagcaaatgtgatatgagtgaattattatcacaaaatcaaggcgtctggaaatatgtccagagcaataggcgagcgagccagcgggacgcaaggttccagcaatactctcagcctctggctcggtgatcatctgtcatctgggacatgtatgtatatgagttttttttattgatcaaagaattactttgtttttt

SEQ ID NO: 108312 - DNA, 562 bp, Zea mays
  Clone ID: MRT4577_30275C.1
cctttaaagcggaacagcccgggcaggatcacaaatttcaattgttagctgagattttatggcagctccttccgctagggctcgggccgattacgattacctcattaagcttctcttgatcggtgacagcggtgtcggcacgagttgtttgctattacgattctccgatggttcattcactacaagtttcattactaccattggaattgactttaagatacgtactatcgagcttgatggcaaacgaatcaagcttcaaatctgggatacggctggtcaggagcgattccgaacaatcaccacagcttattaccgtggagctatgggtattttactggtgtatgatgttactgatgagtcttctttcaacaatatcaggaactggatccggaatatcgagcagcatgcttgcgataatgtgaacaaagtcttggttgggaacaaggctgatatggacgagagcaaaagggctgttccgaccgccaaggggcaagctcttgccgatgaatatggcattaagctctttgaaaccagggcgaaaacaaacatgaatgtcgaggat

SEQ ID NO: 108313 - DNA, 620 bp, Zea mays
  Clone ID: MRT4577_30276C.1
acaagcttttttttttttttttttttttttttttcgtttttttctatttttttttttttttttttttttttttttttttttttttttttttttttttttttttttttttttgttttttcttttctcctttggttctttcactgcaagtctcattactaccatccggatttgactttaatatacgtactatctgagcttgatggcaaaccactcaagcttcaaatctgggatacggctggtcaggagcgattcctaacaatcaccacagcttattaccgcggagctatgggtattttactggcgtatgatgttactgatgagtcttctttccccattatcaggaactggatccggaatatcgagcagcatgcttcccatcctgtgaacaaagtatgggggtgggaacaaggtctgatatggacggagagcaaaagggctgttcccgaccgccaaggggcaagctcttgccgatgaatatggcattaagctcttcgaaaccagtgcgaaaacaaacatgaatgtcgaggatgctttcttctcaatagccaaggatatcaagcaaaggctgtcagaaagcgactcgaaagctgaacctcagacaatccggatcaacaaaactg

SEQ ID NO: 108314 - DNA, 529 bp, Zea mays
  Clone ID: MRT4577_30277C.1
atggcaaacatttttttttttgaacatacaccaccgtgacatgtcccatagtacatcccaacctactgacggggtatgcccgaaccgaatactactactcactagtacgtgacctatgcatccgtggcggcactacgtggcgcatggacgagagaaccaagatgtacgatgatgacaaggaaggagacgaacggggttgtgtacctagaacacaccctacctacacgccgtagatggggacgccgcacgcgatcatgaagatggccatgagcgcgaagtacacgacgacgacgcccttgttggcgacggcgttggagtgctttgtgacgaagccgaagatttagacgcgcgccaaggactagaacagcatgccccgcgtgtgcagctcgaacaggaccgtgtcgatcaccacggtgcccaacacagccttgggtgtagacaagctagctaagaacccatgaccaccaccttcttatcgcacatgaatagtgacatttaaactctgatccccactgtcactgtccatctg

SEQ ID NO: 108315 - DNA, 428 bp, Zea mays
  unsure (1)..(428): unsure at all n locations
  Clone ID: MRT4577_30278C.1
ctcactcgtgcgtattgacacagactcacggaacccggacacgagcacatacttgctgcagtgttgacgcttacgtctgcttcggcgtcatgattggtgctgctaagtgctccccgtacgatatgcagacgtacaacctgatagacacgcagagctggcacacgatccacgtgtacccggccgacatggacgtggagtcatactgacatcacgacatacgctggcatgtgataggcagacagttccaacatcctgggagcggcactaccatgcgtgagcgacctctacatgagcctttctgctagcctgcaccgattactactactaggagttcctgatggctcgactactgattacaggtgcctcanagacggctggcttctgctgcacgagtcactacggaggcacacgctaaaacgacgaacgac

SEQ ID NO: 108316 - DNA, 957 bp, Zea mays
  unsure (1)..(957): unsure at all n locations
  Clone ID: MRT4577_30279C.1
atccccagatcttgttctagcttttagttagtggctgacaagagaacaagtcggcccccatcctttcccaccggcggcttgcccccaccagtccgctagtgctacatgctctccatccaatccatccatggggcatcctccttcgcattgctgggccttagcatactgtcaggctaccagcaagcgaagtagctagccatgctcggcctccccgccgcgcccccggccgccgcagcaccgccgaacccgaagggcaaggggcgatgcagcgccgccccgccaccagcgatgacaggccgggtgtctctggctgtccctgcggcggctgtctcgctctcgctcttcctctggtccagtccagtgaacgccggcatcctgtccggtttctcgggactggagtcgactcccggccccgacctcccccggctcgagttcctggagaaatggaatgcggagaaccagaagaagtacaccgagttcgataacaggttcaagaagtccaaggtgctgcaggacctgctcgagaagagcaggaagaacaaagagaagaacgagaggatgatccaggacaagtactgtctgcggggcgccgagtggggcgtcggggactgctccacggagggcatgtcagaccaggagagggaggacttcatttcggagctcaagaagagagctggagcagagtagcgagctgaggacgtcattcagtttcaacagacgaagtatgggcacacttcgccactgtagcagtccagggaatggccattttactcgtcataccctgattaccaagggaaatacgcaaacaatgtagaccagcccataggccactgggagtgcgagaatgttcaccaacatcatgcgagctcagaatttgcaatacatatgtacccattgtaaaatgcatttagcacgagcaaattaccagctacactgattcttaagatccctanagaa

SEQ ID NO: 108317 - DNA, 535 bp, Zea mays
  unsure (1)..(535): unsure at all n locations
  Clone ID: MRT4577_3027C.1
gacgccagtggtgaaacactctttaaattatgacgaggcgtcgcgatggtcgtagctagtgggtattgcactcgtgcggacggggttgtggtgcccgagcgggatcgtgtgagagagaaggtgccggctgagaagaagaggtgatgcgtgagaaagcacgtgattgacngatgtgcgacaacatgagtagaggacatatgaacgctctaatattatcactggattaatatctaggtttgcatcttattgaagctggtaagcgtacaaggctgtaaacaatgtggtcaattcctttggtatactagagctggcatgagatactggagtgtgcagatagccttctagtaccaacagactaccacaaattgactcgatgagtggtcaatgtgtaacagaggtgaagtatctgatgtacctgaagcgaatagttttaccgatgagttaattcggttctttcactaataaatcatgattaaacgtgcagatactaagccaacagcagaaaaatatagtcaacatatgtggtgctgctatg

SEQ ID NO: 108318 - DNA, 763 bp, Zea mays
  Clone ID: MRT4577_30280C.1
taagctcggaattcggctcgagctgcagtgaacgccggcatcctgtccgggtttcgggactggagtcgactcccggccccgacctcccccggctcgagttcctggagaaatggaatggttagttgagatcctgagttacctgctgagttcttgtggaggccaaggacttgttcttgctgcaagcgttttaccattccgggccttttctgactcatggaaaccatgtctccctgtttcgctctcaagcggagaaccagaagaagtacaccgagttcgataacaggttcaagaagtccaaggtgctgcaggacctgctcgagaagagcaggaagaacaaagagaagtaaaaacgtagtcttttattcggttcttgggatctctctggtgatgcatttccagcgctgaacctgtgttttttgcaggaacgagaggatgatccaggacaagtactgtctgcggggcgccgagtggggcgtcggggactgctccacggagggcatgtcagaccaggagagggaggacttcatttcggagctcaagaagagagctggagcagagtagcgagctgaggacgtcattcagtttcaacagacgaagtatgggcacacttcgccactgtagcagtccagggaatggccattttactcgtcataccctgattaccaagggaaatacgcaaacaatgtagaccagcccataggccactgggagtgcgagaatgttcaccaacatcacccgacctcagaatttgcaatacatatgt

SEQ ID NO: 108319 - DNA, 472 bp, Zea mays
  Clone ID: MRT4577_30281C.1
gagcttatgcagtgtttatttgacactgaaatgaggagcttctgtacaatggaaagcggtgtgcctggctcttgggcagggtgctaaaagagcgagccagggcagctggggaacatacagccacctgcagagctcaaagaggtgggacagccagcttgatgaaggggtctcaggaggagtgaagcaaagaaacttatttggaagttatattgttgagagggtggtccagctcctaggtgatgggtttgtacttcagtttttgagcgtacaggttgttttttaagtcatcaatgcttttttccaatttagttactgacctttccggaaactcagcccgagtttgggccttcttaaggttgtgtagaaagaaccttgattttttacttatatttgtattacttgtgagagtacttgtgaggctgagccttcaaggacttaaaattgttcataaaatatgtagaattttttttta

SEQ ID NO: 108320 - DNA, 173 bp, Zea mays
  Clone ID: MRT4577_30282C.1
attacatctttttacggcgcgcctattttaaaaaccccggggccaacccacggaattaaacggcaaacaatctggagcggggccggacccgggcatagggaaaccggaaaggggggggacctccctaatgaattaagggggcgggcacccggaggttttgctctggcgcgggg

SEQ ID NO: 108321 - DNA, 411 bp, Zea mays
  Clone ID: MRT4577_30283C.1
gacacagaagacagcgaaatactacacttgcggaactggaacatatagacgtggagcagatgacgtaactaccgccacataccatccaaagaatgcacaggaccatgaactcaccacccagcacataaatgctagcgggcgacgcgacgatatctatgtagctactgaacaatataagcaaacagggttatgacacctaaaaggggggaattattttgcacacacagaggggggatttctgctgctactaggacggccggaaactgtttgtccttcccggcaacgcccttactggcccagggcttggaaagaactgtcctttaaggtgttggcacaatcttacgagacgccgctgtctttgccttccctgctggagcaggcctttacttagaagactagtgcggggatggc

SEQ ID NO: 108322 - DNA, 345 bp, Zea mays
  Clone ID: MRT4577_30284C.1
gtatgaggggtactattcatctatttataggggagacgaaccgacttagtacatgattacaatcatgcccttcattgtttacaaatgccattgggctagtaacgtattttctccatcctcggttgcatgggtttaggcctttgtcaccttctcctttggcttacagccgaagttcctttgttgtcgccgaagctgttgactttgactaaaacctttttcacttgcatgcatgtgtgaagcttctttgcacgctttctcggtcgaatgttcgcttcgtccattagtagaagcagtcataaaatacacttgcttgtgccgaagtaaaagggtaaatgagtgatcttc

SEQ ID NO: 108323 - DNA, 514 bp, Zea mays
  unsure (1)..(514): unsure at all n locations
  Clone ID: MRT4577_30285C.1
gggatatcaaagctgaaaagttgacaagcattggtggtctgaatagtgtttgacaaattttgcaccacccacgggtgatgagttcaccttccatggctgccaagcattcacccgacgggattcaagccaccttgacccatgagcctgacatcggtcagcatgacctggatactgggtttgggctggcacaacctggacccatgtcccggtggtacacccttgcttcctcttcttaatttctctcctcatcctgttatggtttcacgtttgccgcattctccattgtccacactgaactatcccattggccacctactggagatccagtttcccattttctctagtttcccaatttcgacgagaaccagcgtatctggcaatcgggttgtgagaaatactatgtatgggcttgacaactctgtttaggtttgggtagccgaaatgcacttttatggcccaactgctcgttggttacacnaaatgttagatgctcaaatcaaacagcggtagatgt

SEQ ID NO: 108324 - DNA, 417 bp, Zea mays
  Clone ID: MRT4577_30286C.1
gggggggtaacaaatttttagggctatataaaaaccctactataaaaaaaaaaaaatctacgggggggctttaaaaaaccataggggggaaccttaaaggagccactcgccactggctataagcacacacaaaaaggaatttttccctggggtaccaagcaaagggcctaaaaagctaaaacttaagggataccgggggaaaaaattttggagttaaaaaagctacacctgattttttttccccggaacccttttcccttcctgggggttaacaaaacccaagcccctcaaaaattgggtacccagggtttaccggaggcacaaaaactgggacaccaaaggggggtccttcccgggccttttgtactagggaaagggcctttaaatggtttaacgcccacaccggatttggaccga

SEQ ID NO: 108325 - DNA, 412 bp, Zea mays
  Clone ID: MRT4577_30287C.1
gggggggaacctgcaaaaactttgctcccccgggaagggggaaataaaaccaacctgccgggttaaagtccacaaataggccactttttgggaaaaccccagaaaaaaccaattgttaaaaatcctttttcgggctaaaacaagttcagggacccaactccccaaaacttaacttggccttaaaggccctttcactgggtcactccgagccacttggggaaattctcaaacccgggggaggcactggcccaaaccctggttttggacccccccttgccggaacccttgaccttgggaggttccgagggaagcttggtccttttggaaaaaaacttttccttccgggccttgactgggggccccttaaaagggggggcccttttccgggcaatgcccagggaggggttgaact

SEQ ID NO: 108326 - DNA, 250 bp, Zea mays
  unsure (1)..(250): unsure at all n locations
  Clone ID: MRT4577_30288C.1
cgggcagaggttggcnggctnctccttttctcttaccaagacctcctggggttagggntccttagggttttgtggaggggcgagggcggcggctgatgtggagtaccgttgcttcgtcggcgggcttgcctgggccaccagcaacgagtcgctggagaatgccttcgcctcctacggcgagatcctttactccaaggttgttagcgacccnnagactgnnaggtcccacaacttcaccttcnttaccttc

SEQ ID NO: 108327 - DNA, 951 bp, Zea mays
  Clone ID: MRT4577_30289C.1
tccgggacttaggccgtacaaggagaccctcctcagccgctagtaccagtagtcgtcgcgttagcaggcagatctgagttagccggcggatccgatccgtgcgcgtgcagtgtacgtgtgtcggtggagatggccacagcttacgctcccatggcgagccaggtgatgaagagcagcctcgtcgtgcactcgaggccgaggggcctgtcaggcgctgctgcgctcacgaggcggccgcggttcaccgtcaaggccatccagcccgagaaggcaacgtaccaggtggtgcagcccatcaacggcgaccccttcatcggcagcctggagacgccggtcacctccagcccgctcgtcgcgtggtacctctccaacctcccggcctaccgcaccgccgtgagcccgctgctgcggggcgtcgaggtcggcctcgcgcacggctacctcctcgtggggcccttcgcgctcacgggcccgctccgcagcacgcccgtgcacggccaggccggcgcgctcggcgccgccggcctcgtcgccatcctcagcgtctgcctcaccatgtacggcgtcgcctccttcaacgagggggacccgtccacggcgccctcgctcacgctcaccggcaggaagaaggaggccgacaagctgcagacctccgacggctgggccaagttcaccgggggattcttcttcggcggcatctccggcgtgctctgggcctactttctcctctacgtgctcgacctcccctacttcttcaagtagatatcatcgaagatgcgtatacatagctccggccgatcctcctctctagctgcatggtatgtaggtggtgtggttcttgtttcatttcactccagcggtgatcagcaccgtgtataaatgtaattcctctgctctgcacatggatggattgggatgtaaccttaaaaaaaaaaaaaaaaaaggccccta

SEQ ID NO: 108328 - DNA, 298 bp, Zea mays
  unsure (1)..(298): unsure at all n locations
  Clone ID: MRT4577_3028C.1
gggaaaacctcagaaaaaatttttacctttaaaaaaggccccctttcaaaagggctaaaaccttgcgggggccccccttaaaaggttttaaggttcgggggccaaaaaaaaaaactggggggggctgggttttttttgaagggggggggtttacaatttttttaaaaaaggtcttgtgcctactttggaaaggncccgggggtttcccccttaggggagattttcggcccttttggggaaaggttttaatttggggccccccccccccggaaaggggggggaccccggggggtttttt

SEQ ID NO: 108329 - DNA, 1124 bp, Zea mays
  Clone ID: MRT4577_30290C.1
gccacacatgcctgagccatatcacgcctgcaggccccatgcatccatgcgtgcacgggatttcctcctaaagatcgatcgcagactttacttaggccgtcacaaggagaccctcctcagccgctagtaccagtagtcgtcgcgtttgcagctaggcagatctgagttagccggcggatccgatccgtgcgcgtgcgcagtgtgtgtgtgtgtgtgtgtgtgtgtgtgtgtcggtggagagatggccacagcttacgctcccatggcgagccaggtgatgaagagcagcctcgtcgtgcactcgaggccgaggggcctgtcaggcgctgctgcgctcacgaggcggcccggccggttcaccgtcaaggccatccagcccgagaaggcaacgtaccaggtggtgcagcccatcaacggcgaccccttcatcggcagcctgcatacgccagtcacctctagcccgctcgtggcgtggaacctctccaacctttcggcctaccgcaccgccgtgagcccgctgctgcggggcgtcgaggtcggcctcgcgcacggctacctcctcgtggggcccttcgcgctcacgggcccgctccgcagcacgcccgtgcacggccaggccggcgcgctcggcgccgccggcctcgtcgccatcctcagcgtctgcctcaccatgtacggcgtcgcctccttcaacgagggggacccgtccacggcgccctcgctcacgctcaccggcaggaagaaggaggccgacaagctgcagacctccgacggctgggccaagttcaccgggggattcttcttcggcggcatctccggcgtgctctgggcctactttctcctctacgtgctcgacctcccctacttcttcaagtagaaatcatcaaagatgcgtatatatatagctccggccgatcctcctctctagctgcatggtatgtaggtggtgtggtccttgtttcatttcactccagcggtgatcagcgccgtgtataaatgtaattcctctgctttgcacatggatggattgggatgtaacctgttcaacttttttttaccttattggatgcatcattcagagctagtttgttaacctcattttttcaaaggatttccattttccc

SEQ ID NO: 108330 - DNA, 426 bp, Zea mays
  unsure (1)..(426): unsure at all n locations
  Clone ID: MRT4577_30291C.1
agcgcaacaaaagcgnncaanannccacaaggcncacnngcnccnagggccaanannccacatttccnccccgcaggggggggaangggccncgaacacccagcngggcaagccnacaggccacaacaagcgccngcggcgagcggccaacaacaaccaaangcccaannacaacaacaancccgggcacaacnaaccanacaaaccaacggaacgcaacagccacaacaancnccaccagcacngagccaacaagccgcggngaacccggacccccacnagcaacagcagacgcnngcagccaacccacaagcnccggcaaacagagaacgaaaccaacaacaacaaccancgccacaaggnacaccagcgcccagncaacaagccaaggagaacccngccccccaccgacaacagccacaaccg

SEQ ID NO: 108331 - DNA, 532 bp, Zea mays
  Clone ID: MRT4577_30292C.1
ggcccccctcaaaaaattcccccctccttgtttttaaaaaaaggccccccccaaggggggttttataacccccccaagtttggggtttttgaacaaggggggttttttttaccccggggggacgccttcccccccaggggggggccccctttaaaaaaaactttaagggaaaagccccccaacttgttttttaaaccccggggggggccataagggctttcccggcccgggggggggggggggcccagccccaggggactgacgggggggtggggccccccctggtgaagggggggggcctttgggggcagggggccacccccggaaaggagtcaaaaacggcctgcccccccgggggcgtaagggggggccactggttgatgttgaggtttgaaagccctttttttattggttcccacctcccacgtttgtttttaacggggttgtttggaagggaaaacatggggcggcccgggttgttttggcaaaaataaaggcccagggggggcagggggggaattccgggggaaaa

SEQ ID NO: 108332 - DNA, 1856 bp, Zea mays
  Clone ID: MRT4577_30293C.1
acgcgtccgcccacgcgttcgcccacgcgtccgcccacgcgtccgcccacgcgtccattgtgttcctcgaggccggccgggactagacgcgaaggaacaccgcccaacccgaaaccgtttccaaaatgcaaaactcgactccacgcgtcgcccttcttctccggagagatcgtttaaatagccccgtaccaaatccaattcgtcgctcctcaccggagaacagaaacgatacggttaatagatagcgaagaagggcagcaccaccagtagcagcagccatgcccgctcgcgctcgatggcgactcctcgcgctgccgctcgcgctcttactcgttgccgggtcggcgcatggcctcgtgaagccggaggcagccgcggcgcccaagccccccgtccccaaggccatatcggacctgagggacgcgatcgtgaaggggctgggattccaggccgaggggctcaaggtgtccgggttcgacgtgcgagacgcgctcgtggggcacgcggtggcgtacgagttcgacatcgaggtcggcaggaaggtcctaccggtgcgcctgctggaggacgtcagccggtgggacttcgtcgacctccccatcttccgttcccaggccgacgctgacgatacggcgctcgccgagatccggcggaccgggacggggagcatcgttgagcctaccctgccgcccttccagctcgccgggcccatggagctctggatccagaacggcgacgacgtcaggcttgccttgccgcatgatgtggacgctggtaccttgaagaaggttgttctttctgatggtgcagtcgtaacagtgaagggtgctagagctgtgagcctccggttgccgcttgaattaccacttcctctcaaccgtaccacttacaagggtcgcctctcaagcctgatatccatcgcacaagccctgcgtggtgcagcccggtctaatcagaaacccctgctctctcttcgcgttgagggtccagtttccttgtcctcgactccttccatgtctcccaaggacaagctcaagctcaaacggttggccccaggccaagtggagctctcctcacaggcgggggcaatccctgctatcaccgaagacgaggatgaaccacataaccctggattgtggcctcttttgtctctgaatggttcagatggcagcctgcaggggtttgaggagctattggcctcagtacttggaaagaaggcaggcgagaagggtaccttcaagctactgaaggcacgggcctcggctcaaacctatgtcaagatggcattcacggtggagaagaagcttgctgaaggggatgtgaactggtcaaatattccagaatggaagacgaagcccaagaggatgagagcgcactatgaagtccttgctcgagtggaggagggtcaggcgatccctgagaggatagcgcaggtacagcctttccaggccaacgaggccatgtcggagagtgtgctcaccggcaacgtcacgaggtcgaagatggaaatcgtccatccaccgccggtttacttcactctctgagtgagggaagaactggatgctgtttgatgttctcttcagagctactacacgttgggtggtgggtagtttacgctggctcgtaggcaacaaagttgtacaagcggcaagagtttgttgcctatacactgactgcgttgacatgaatattgacgttctatgtgtactgaaaggctggcaagcctttaatattatcaattggaataatgaggaataagaaaattctgtacatctttagagggccaaagggctgagttcttagtactgagaaaaaaaaaaaaaaaaaaaaaaaaaaaaaaaactcgagagggggcc

SEQ ID NO: 108333 - DNA, 2049 bp, Zea mays
  Clone ID: MRT4577_30294C.1
ccgggatgcctgagccatatcacgcctgcaggccccatgcatccatgcgtgcacaggatttcctcctaaagatcgatcgcagactttacttaggccgtcacaaggagaccctcctcagctagtacctaccagtagtcgtcgcgtctgcaggcagatctgagttagccggcggatccgatccgtgcgcgtgcagtgtgtgtgtgtgtgtcggtggagatggccacagcttacgctcccatggcgagccaggtgatgaagagcagcctcgtcgtgcactcgaggccgaggggcctgtcaggcgctgctgcgctcacgaggcggccccggttcaccgtcaaggccatccagcccgagaaggtcagtagacaacaaaacaaaagaacttgcgagattttgtgcatgctatccattccagagctcgtctctagctagcttactgctctactcgattgttccgtacacgcatgcaggcaacgtaccaggtggtgcagcccatcaacggcgaccccttcatcggcagcctggagacgccggtcacctcgagcccgctcgtggcgtggtacctctccaacctcccggcctaccgcaccgccgtgagcccgctgctgcggggcgtcgaggtcggcctcgcgcacggctacctcctcgtggggcccttcgcgctcacgggcccgctccgcagcacgcccgtgcaccggccgggccggcgcgctcggcgccgccggcctcgtcgccatcctcagcgtctgcctcaccatgtacggcgtcgcctccttcaacgagggggacccgtccacggcgcccacgctcacgctcaccggcaggaagaaggaggccgacaagctgcagaccgccgacggctgggccaagttcaccggggggttcttcttcggcggcatctccggcgtgctctgggcctactttctcctctacgtgctcgacctcccctacttcttcaagtagaaatcatcaaagatgcgtatatatatagctccggccgatcctcctctctagctgcatggtatgtaggtggtgtggtccttgtttcatttcactccagcggtgatcagcgccgtgtataaatgtaattcctctgctttgcacatggatggattgggatgtaacctgttcaaaaaaaaaaaaaaaaaaaaaaaaaaaaaaaaaaaaaagttagccggcggatccgatccgtgcgcgtgcagtgtgtgtgtgtgtgtcggtggagatggccacagcttacgctcccatggcgagccaggtgatgaagagcagcctcgtcgtgcactcgaggccgaggggcctgtcaggcgctgctgcgctcacgaggcggccccggttcaccgtcaaggccatccagcccgagaaggcaacgtaccaggtggtgcagcccatcaacggcgaccccttcatcggcagcctggagacgccggtcacctcgagcccgctcgtggcgtggtacctctccaacctcccggcctaccgcaccgccgtgagcccgctgctgcggggcgtcgaggtcggcctcgcgcacggctacctcctcgtggggcccttcgcgctcacgggcccgctccgcagcacgcccgtgcacggccaggccggcgcgctcggcgccgccggcctcgtcgccatcctcagcgtctgcctcaccatgtacggcgtcgcctccttcaacgagggggacccgtccacggcgccctcgctcacgctcaccggcaggaagaaggaggccgacaagctgcagaccgccgacggctgggccaagttcaccggggggttcttcttcggcggcatctccggcgtgctctgggcctactttctcctctacgtgctcgacctcccctacttcttcaagtagaaatcatcaaagatgcgtatatatatagctccggccgatcctcctctctagctgcatggtatgtaggtggtgtggtccttgtttcatttcactccagcggtgatcagcgccgtgtataaatgtaattcctctgctttgcacatggatggattgggatgtaacctgttctaaaaaaaaaaaaaaaagcggcc

SEQ ID NO: 108334 - DNA, 642 bp, Zea mays
  unsure (1)..(642): unsure at all n locations
  Clone ID: MRT4577_30295C.1
gctgctgagggagaagcacgaccaacgaccagaggagagcgtgtgccagcgttgttagggaggagcgtaacccaggcagagggagtagacgcgcgcgctgggaataaacagaaaagctgggctgcgcgtagaaatctccagagcagagggcggcgactacggagatggacgccatgggaggagcgagcagccgagcagggagagtttgcggctggggaaaaactcgaccagccatggcagggaccaggggagagagagagagccgcgagcgctgagggagataagctgggcgcggccatagttgcagtcggctgggcatagcaacagggagatgggagctcggttggggaaattggagaggaggccgagcagaggagcgcggtgtggactgtggaggcgagctgccatgggcgtgggtctggagacggtcaggagagctccacggcgatgggggatggggacgctccatggctaaatccggagcacgccggcgagctcgcgactgtgcgcagagaacagagaaccgcgcgacggggaagctccaggggcgagcttacggcggccatgggaactccgcgagctggagcangagaggagtcngcctggcgctcaaggataaacggagcagcaaggagcgacagc

SEQ ID NO: 108335 - DNA, 357 bp, Zea mays
  Clone ID: MRT4577_30296C.1
aactgctgctcatagctagccgcgagcgacggtcgacgtccccaagagctcgaccgaatcactgtacaagggaaactggtgaccaaccaaggcaggctgtggaactgggcaggcatggcgccctagagcgttgcggctccatctcgtcgctgctggagagcagctggctagctgttagcgttttccctagtctctctctctgttccccgtttcagtttgcttatagcccgaagacttttctgctgtagtattggaatgccagagacctttggccggacaaaaaaaaaaaaaaaaaaaaaaaaaaaaaaaaaaaaaaaaaaaaaaaaaaaaagaaaataaagagaacgaaacatacaa

SEQ ID NO: 108336 - DNA, 781 bp, Zea mays
  Clone ID: MRT4577_30297C.1
ggccgggcgacacgtctctcggcaacggatacctcggctctcgcatcgatgaagaacgtagcaaaatgcgatacctggtgtgaattgcagaatcccgcgaaccatcgagtttttgaacgcaagttgcgcccgaagccttctggcggagggcacgtctgcctgggcgtcacgcaaaaaaaaaaaaaccggagaacacaaacgatacggttaatagatagcgaagaagggcagcaccaccagtagcagcagccatgcccgctcgcgctcgatggcgactcctcgcgctgccgctcgcgctcttactcgttgccgggtcggcgcatggcctcgtgaagccggaggcagccgcggcgcccaagccccccgtccccaaggccatatcgcatgatgtggacgctggtaccttgaagaaggttgttctttctgatggtgcagtcgtaacagtgaagggtgctagagctgtgagcctccggttgccgcttgaattaccacttcctctcaaccgtaccacttacaagggtcgcctctcaagcctgatatccatcgcacaagccctgcgtggtgcagcccggtctaatcagaaacccctgctctctcttcgcgttgagggtccagtttccttgtcctcgactccttccatgtctcccaaggacaagctcaagctcaaacggttggccccaggccaagtggagctctcctcacaggcggaggcaatccctgctatcaccgaagacgaggatgaaccacataaccctggattgtggcctcttttgtctctgaa

SEQ ID NO: 108337 - DNA, 1838 bp, Zea mays
  unsure (1)..(1838): unsure at all n locations
  Clone ID: MRT4577_30298C.1
aattcggcacgaggccgtttccaaaatgcaaaattcgactccacgcgtcgcccttcttctccggagagatcgttttaatagccccgtaccaaatccaattcgtctctcctcaccggagaacagaaacgatacggttaatagatagcgaagaagggcagcaccaccagtagcagcagccatgcccgctcgcgctcgatggcgactcctcgcgctgccgctcgcgctcttactcgttgccgggtcggcgcatggcctcgtaaagccggaggcagccgcggcgcccaagccccccgtccccaaggccatatcggtgagctcctgacctgaagcgaaattcctctcgtgttgtgattcctctgtcccctagatccgatcggatccggtccgattgggtaatggattgaatgcgattccggctgcggcgggcgcaggacctgagggacgcgatcgtgaaggggctgggattccaggccgaggggctcaaggtgtccgggttcgacgtgcgagacgcgctcgtggggcacgcggtggcgtacgagttcgacatcgaggtcggcaggaaggtcctaccggtgcgcctgctggaggacgtcagccggtgggacttcgtcgacctccccatcttccgttcccaggccgacgctgacgatacggcgctcgccgagatccggcggaccgggacggggagcaatcgttgagcctaccctgccgcccttccagctcgccgggcccatggagctctggatccagaacggcgacgacgtcaggcttgccttgccgcatgatgtggacgctggtaccttgaagaaggttgttctttctgatggtgcagtcgtaacagtgaagggtgctagagctgtgagcctccggttgcccagtttccttgtcctcgactcctcgcttggaattaccactntcctctcaaccgtaccacttacaagggtcgcctctcaagcctgatatccatcgcacaagccctgcgtggtgcagcccggtctaatcagaaacccctgctctctcttcgcgttgagggtctccatgtctcccaaggacaagctcaagctcaaacggttggccccaggccaagtggagctctcctcacaggcgggggcaatccctgctatcaccgaagacgaggatgaaccacataaccctggattgtggcctcttttgtctctgaatggttcagatggcagcctgcaggggtttgaggagctattggcctccggccggggaaagaaggcaggcgagaagggtaccttcaagctactgaaggcacgggcctcggctcaaacctatgtcaagatggcattcacggtggagaagaagcttgctgaaggggaggtgaactggtcaaatattccagaatggaagacgaagcccaagaggatgagagcacactatgaagtccttgctcgagttgaggagggtcaggcgatccctgagaggatagcgcaggtacagcctttccaggccaacgaggccatgtcggagagtgtgctcaccggcaacgtcacgaggtcgaagatggaaatcgtccatccaccgccggtttacttcactctctgagtgagggaagaactggatgctgtttgatgttctcttcagagctactacacgttgggtggtgggtagtttacgctggctcgtaggcaacaaagttgtacaagcggcaagagtttgttgcctatacactgactgcgttgacatgaatattgacgttctatgtgtactgaaagactggcaagcctttaatattatcaattggaataatgaggaatacagaaaaatttgtacatttttagaaggcctaaaaaaaaaaaaaaaaaggggcggcc

SEQ ID NO: 108338 - DNA, 543 bp, Zea mays
  Clone ID: MRT4577_30299C.1
cgtatgctgcaccgccttcagctgctcattattctcgtgtagccatttaatgattttgttagaaagagctgagctagtctcctcatatatgttcgacatatgaattctgtacacacctattgcttgaatgttcaccacaaccaaatctaaactttggtgcttgatttctctgcagcatgatgtggacgctggtaccttgaagaaggttgttctttctgatggtgcagtcgtaacagtgaagggtgctagagctgtgagcctacggttgccgcttgaattaccacttcctctcaaccgtaccacttacaagggtcgcctctcaagcctgatatccatcgcacaagccctgcgtggtgcagcccggtctaatcagaaacccctgctctctcttcgcgttgagggtccagtttccttgtcctcgactccttccatgtctcccaaggacaagctcaagctcaaacggttgggcccaggccaagtggagctctactcacaggcgggggcaatccttgctatcaccgaagacgaggatgaaccacataa

SEQ ID NO: 108339 - DNA, 280 bp, Zea mays
  unsure (1)..(280): unsure at all n locations
  Clone ID: MRT4577_3029C.1
atagatggcgagccgcctcccccgacccatttgatgctaatccccatancatnngaagcatatggtagcatatatattatataaatcgagccacttcccataaaatagaaaaaatcgaaagaaaaaaaaaatgaaagagtggataataaaacaggatattctgtttcataattcagaaatagagatcttctttttagtattactccgcattaggatgtatatattaaccatcctattctaatagatattaaacatcctatactaattaaggcctaatcca

SEQ ID NO: 108340 - DNA, 1164 bp, Zea mays
  Clone ID: MRT4577_302C.1
cggacgcgtgggcaagcgcgcgcgcacacagagagagagagagagagagagagagagacaagacaacagcaacagatagaccgggccaagttcgtgagtccatcgtgtacatacggccgagtggcgacgccgtcgtcttcaccacgcacgccgcgcctcttccatagtctcgctcgcctccattaattccaatcctctctcctccgctagcgctccaccagcacgcaccggcagatgaagaacatggcgtctacgacggtacggtgatcaccttcatcatcacatcactcgttcatcgcccgccggcccgccggttgttggtaggccagggtcagccactcagccgagccagccatgaagctcgtcgtcgagatctccgacgcagccgacctcgcccccaaggacggcaccgcctcctgcaacccctacgtagaggtggacttcgacgaccagcgccagcgcaccgccaccaagcccgccgaccgctccccgtactggaaccagacgctggtcttcgacgtccgcgaccccgcgcgcttcccttccctccccatcgacgtctccgtcttccacgaccgacgcctccaggaccacaacgccctccgcccacagaccttcctcggccgcgtccgcatcaacggcgcctccgtcgcgccgtcgccacaggaggcggtcctgcagaggtacccgctcgagaaacggagcttcttctcacgcgtctcgggcgacatcgcgatcaggatctacctcgtcggagatgatgtcaataatgaaagcgtacaggttcctgctcctcccaaccaccaccaccacccgcagcagcagcagcagcagcaggagtcggtcgcggctgctgccgccaccggagatcccgaaaggatggtcaggtccgccttcgcaccacagcagccgtcggcggttgagcagccagcggcagctgggaacggcggggatgagcacgaggcacgccctcctcgcatcttccgctccgtgccagcagccgagccccgccgcgcgacgctccacgctgtggccgcgcctcctcccccgcccggccagacggtcgtcatgcccaaacccgctgcctccgcccctcccggcccgcttcggcctggtcgagaccaagccgcctctgccggccaagatgggcccgcgcgcggccgc

SEQ ID NO: 108341 - DNA, 285 bp, Zea mays
  Clone ID: MRT4577_30300C.1
gatagacataggtttggtgagaataaggtttatgcctttaaggactaattacggcaggggggtcctagtatgatagacaagtaatataaatagtagagttattgtaagggaatattagagtgattaaatgtctatgactgataaaataagaataaggtttataaactatggcaagagatgaaggttgtgaaaatatatgtgcttcaagaagttagctatgatcatagtattataatgactgatgaaactcattcaaagcatgattatgatactcaagatatgata

SEQ ID NO: 108342 - DNA, 2426 bp, Zea mays
  Clone ID: MRT4577_30301C.1
agaaggatgattaccaaccttgtgatgtaacattggaaatttctacatcacactacgaccgcacacctagcaaagataagcatacttcaccaaaacaactgtctgaaaaatctccatcttcaggtgaccataggttttcaggtaggcttagtggtgggcgtagtcttgataataaaggagaaagaaagagccttacgaaatacagagatagagatggtgacatagcccaagagcgatcacatcatcaagatcgaatgccagctaaggttccattcagggagccaacaccgtcaaattcatccataagtagaggtggtcattttttgggcagttcaccaaataatcctttgccacctgcacggaacggtgacccttccttccagggtctacatgatgatgaccgtaggcctcaaaatggagataggaggttccatggtcatcaaaaaaggaatgacatgaattctgttcgtggacatggacatggctggaacagccagccaaactggccttctccagtttctaatggtttcgtccccatccaacatggtggtgctcctggttttcatccacctgtccatcagtttccaggcccacctatgtttaaccttagacctcaaatgaaattaaaccaacctggagtttcatatcctatgcatgatgctgttgataggttttcgacccacatgcgcccatttgggtggcctaatcatctggatgaatcatgcccacctcatatgcaagtttggaatggaggtagtggtgtatttcctggtgaaccctatatctatggtagacaagagtgggatcagaatagacctcatgctggtagcagaggttgggagctgactggtgatgtatccaagggaccaaatgatgtgccggatgctgaacttctggtagctaagaaggatcctgactctgcaataactgctgtttctgattctggtggacaacacaatcttcaacctgaggctgaccaaaaggaaattggacgcttgactgctgaaaactttgaagcgaagaatcattctaaaagttcaaaaagtttggaatctcttcaaggagtacaacatgtgacttctatgctgacaaagaatggtgcggtcttttgtaaagactatctagccagaatcaatgtttcacatgaccttgttgagtctgagttgtacaaaaggtgtatatccttgctgggagacttgggcgtaacaaaagcctctcatttggttaggaatgaaattcaggataatggaaatattggaaaaatgtcaacaaaatatggaaacctcaaccctttcagttcacgttacctcaaaagtgacaatactatctttcagagagctttggcccttcataagaaccagactcgaaagggtttaactactgcctctgcatctgtaaaaatggaagagaagatggctgtaccagaagatgaccatgacatggaattgcttgaaccagtggtgagcaatcctgctccacaacgtcacactgatgtcatggaggaaggatcagtatcaaaacatgaacttggtgatggcatagggagaactattgctgcaactataggatctggggttctggatgcacctccagaaatttcacttccccaacctgaggtggtggtggcaacaacagtaatcacacagccgaacaagcacatggaggatgtgttgcctccagcaattgaggatggtgcactacaagcaaccctcgaacatgctgttggcataccggaagttacacccgctgatgtcttgctggatgttgcaccttctgctgttggagaatcaggtgatgacatggagatcataccctctgctatggcagaacctcaactaggcaaggagcctgctcctgttgctagtcctgacagtcaagagaagcccttcatgcttgattctgagacaggtatggaggttgaggttaaggttatcgatgataatcctggggatggtagggtgagctctatactcggcaccaaacttgattttgctgcaattgatggggattctgaagctttgttggtggaaagtagggtaaatttaagtcggatacctaattccccagaaagtacacattgaactcttcctatttcattttaattccttttctgagggtcttgtgccctcagcctagccttttgagctgccatattctgtttacatctgggcgttcttctgtagtgtaatgttcccagtgagataggtatgcttatggggaacttggacgtacctgcgggacgcaggacctgctgcaatggcacgcctctcaagtagtgcgtgcccacccacctgcgtctcttgttctctgcttggacgcactagtgccccttgttggcataaatgtctcgctgcagcttttgctaaggtcgcccaacacattctcctgggattggattgtcgattgttagaaaaaacgagggtccc

SEQ ID NO: 108343 - DNA, 317 bp, Zea mays
  Clone ID: MRT4577_30302C.1
atggccacaattccatagcttgggtcttaaaagggggttcttcgcttcaggtaccaacaaaaactgggaaaataccccgggacattttggtcaagaccaacgccaaaaaaatgggggaagggacacacaaaactaactggggaaaaactggggcaaacaacatttttttccccaagggggctaccacaaaagctttcatagctcctggggctaaaacccgcccaaacaaatttaacacccggggggggtggcgggccactttcggggttccctttttaaaacccctcacattccgtccaagggtttttctatcgggg

SEQ ID NO: 108344 - DNA, 263 bp, Zea mays
  Clone ID: MRT4577_30303C.1
tttcttttttttttttacacaaactagttacgggggggtttttataacattacagcgcctcgcccacaaccacggaccaacaaaaaacagggcacgcaggttgatacacaaacaaataccacataaggtcagggagaccaaaccccggcgtaaccacacagagcgctaacaaaagacgaccaagccagagccaacaaagcaaaactctaaacaaaacttaagccaacatggaagcaggaagggcacccaagctcaactgctca

SEQ ID NO: 108345 - DNA, 258 bp, Zea mays
  Clone ID: MRT4577_30304C.1
accacgcgtccgcggaccgtggccttgaaaggataaataagtttctatccaagctgtgttatctatgtctctgtcttccataaaatgtgtttgttagttgtgtctctgtcagttagctgttagttagttgtgtctttgtctccgattttctgtagggtgaagatgtgtctatccaagctgttggcaaaactgttgaaactattaactgtgtacctgttacttgttggcaaaattgtcaaaatgttacttgagttgtct

SEQ ID NO: 108346 - DNA, 257 bp, Zea mays
  Clone ID: MRT4577_30305C.1
ccaggtggcccaattgacggaacaattgattgttacaaccccccaaaagcgggctttcattgaggttccaaaggaattaaggatgttcccaaaatggaaggttccttgggttccggttgtaaaaaacaggtgcaattttgaggctgatggaaaccgtaattacccatttggccaaggtccgggacaccaggttttgaacaattttggaaaactccacctctttgatttgccaaaacggcaaaccctttcggcttccg

SEQ ID NO: 108347 - DNA, 483 bp, Zea mays
  Clone ID: MRT4577_30306C.1
catgattgtatccatgttgtgacatgctttgatgaattctaactggattcataaatccttacccttcaaacaaggggggaatgtgaactttcactttattaactgggcgtcagaatactcacgcccagcatttgtcagaatcctggacatgtaggtctacaactaactaatttgtgtaacgcgtgctcgagttcgaacacatactctttgcccggtccacatgggcctccagcaaggtaaatccgccgggtcatttcttccaaaggtgcaggaccaagatagtttttattgatctccttgctactgggggggaagataccatcacattttcaacagctggaactttgggcgatgaatcaaaatacaattcaatgtaaaccttctgatcatattgcttaaacctgacctcaaaatactccaaagctatctccttagcttcctactggatactgggagcaacttcgcagctagtctttccggact

SEQ ID NO: 108348 - DNA, 292 bp, Zea mays
  Clone ID: MRT4577_30307C.1
aaggaagaaagggttggtgcctgaggaagggcaccaccaatgggtaaccccctgccaaaggaaaaagaaaacggtggtgctggggggaggacccaaaagaatgaaacaaaatttgtgggttgaagggaaccagatgtgggaaggctgcaacagggtttgccacaactgggtggtataaaggtggcacaatttgggggaaaaattttttgtgaaagtattttggggcattggccaaaaacaggggggtatatgaaaaaatttgtttgtatttgatgatgggggaagggtcaac

SEQ ID NO: 108349 - DNA, 163 bp, Zea mays
  Clone ID: MRT4577_30308C.1
ccgatttgtaggtgtgctccctgtttcggatgggaagtaggcgtgtttgtagtattcgagcttcgattcgtcaacggagattagaagacctgggatgggatttgaggaaatctaggcatctgtctagcacgattttagatttattgatgagcagttatatgag

SEQ ID NO: 108350 - DNA, 306 bp, Zea mays
  Clone ID: MRT4577_30309C.1
cggaacaaaatcaactagaacacaaaaattgggtctgtgctaagaacaaaaaactatatgaaaggaataaaaatacgaaccaaacacatcaaaaagaaaacaaagtatttattaaaaaaaacataaaaagtaggctacacaaaaagaattaaataaaatgaacaaaatataaaataaatggacaggtataaataagaatgagcaataagcaaacgtaatacaaaaaaataacaaaaaacaaggctactatgaaattcatacaataaagtacattgaagcaatagatatttgagtcaaagtctacca

SEQ ID NO: 108351 - DNA, 448 bp, Zea mays
  unsure (1)..(448): unsure at all n locations
  Clone ID: MRT4577_3030C.1
ccaaccaggggtgggaaacggcaaatccaaggggtaaaaccaatgaactggcggatctgacaggaagcctggtctcaatctgggcgggnccacaacaaaaacttccaccggatggtttgttctcttctgccctgtgtgggggggggggggtttttctcccnnccgggngctcgccntgggggggggggggggggcctggtggggggcgggggggggggtgggggggtgtgggggggggcggggggggggcgtgggggggggggtggggggggggggggggggcgggggggggggggtggggggggtggggggggggggggtgggcggggtggtggggggtgggtgggggcgggggggggtggtgtcttttgggggggggggtgggggcggggcggggggggggggtggtgggggggtgggtgggggggggggggggggtggtgggggg

SEQ ID NO: 108352 - DNA, 810 bp, Zea mays
  Clone ID: MRT4577_30310C.1
gatgccccggcccgcgcgctcgcaagacaggctacacgatcgacctcgtcgtcgtcgtcgtcttgtcaattggctccatccattagctagtagctacatcttgtagttggacccaaaaaaaaagctttggtagctagcgagctagctagctctcatctcctgttgctagctcgtcgcgcgcgcgcgtccacgaccagagctagccatgatggacggccggggcgacgacaacgccgacttcttcagcgacttcatggtgctgcgcccggacaagggcggcgtccgcagcctgctgcacctgctgtgctcctgcgaggtcgccgacaacgacgccgtcgactgccccgccggcaccgaggtcgccgagcgctggcgccggtgggccatcttcgtctccctcgccgcgcagatgctgctgctggccgtcaagcggcccttggcggcgctcgggagcgccgtcgagtactggatgaacctgctcacggacaatggcggcggcgtcgtcgggctcgtcaggaacgctgtgcgagggaaagtacgaaccccggacaggagatcttcaaactaccggtccttcatcggactaattgacacgaggattgaactggacaggaagatcgcagcaggggatagcacctacaacgcggctctcggtatcatggctgcgaagctagcctacgagaacaaactcgtcatcaaaaccgtcgtcgaaagccattggcagatgacgttcttggagttcttcaactgttggaatgaattcagcggcgcctacaccacccaggccttcatgctcgcggacaggcccgc

SEQ ID NO: 108353 - DNA, 401 bp, Zea mays
  Clone ID: MRT4577_30311C.1
aggatgagcgaggaacgatcgaggcgagctgcattctccgcacacatcgggcaggccggcatccaatgcgctatcgcgcgctgggaactttactggctcgagcacggatccagcctgatggccagcgcctggagataagaccgcgctacatcacgatgatgccttcagtaccttcttcacccagactggtgctgagaagcacgttccccgtgcatcttcgatgatctagaacccactgtgatcaatgatgcgcgcactggcacataccgtccggttctgcaccctggcagctatgagcggatggaggctgccgctcacaatggccgccgtagtcactacacaattggccaggagatcgtagatctgcgccttgaccggatccacaagcctgctgacagctg

SEQ ID NO: 108354 - DNA, 341 bp, Zea mays
  Clone ID: MRT4577_30312C.1
tacctacaagcgctgggacccagcgataccgctgtccgaggtggcctacattatgtccagacataatcggtcccatgaaagcgcgctttagtgcgccgctaactatacgcgcacgcctgctatatggaatcgaacgtctcactgactgctgtggtcgcttcaccacggaaatcactcactcaaggtttaccggagtcagataccagagaatcgacaaaggcagacctgcgctcaaacatacctgcatgtacaagcaagtatgactcggggatgcgaactcatcagcaacaccggtacatggattaaaggctgatccatgacccatgatttgactgccggaa

SEQ ID NO: 108355 - DNA, 339 bp, Zea mays
  Clone ID: MRT4577_30313C.1
taaaaaaaaaataaaaataaaaaaaaaaatttttttataaaaaataaaaaaataaaaaaaaaagaaataaaaaaaaaaccgcttttcaatatagaggatctaagttttatttactcttacatgcaattaaaatgtctttactttggagtaccctaattttaacttaacttgacctttttttaacaacatttggggggggtcatctttggatttccctatttttttcgctttgtatgacatttctcatttttttttttggcctaataaaaaaatggcccctccctgtttttttacataacattttcgtaaaataactgtttatcgctacttatttttttt

SEQ ID NO: 108356 - DNA, 1444 bp, Zea mays
  Clone ID: MRT4577_30314C.1
acggtccccccttcccggacgaacccacgcgccctcggacgcgggcctggacgcgtgggcggacgcgtcctcctcgcctagcctgccactgccagcaggtgccaccgccatctctgctctgctctcgcaacgcaagcacacgcccggccgcctgccacagttgccatggcgaccatagccacgatggcgctgctgaagcccgccgccaaggccgcggcgcggtcggcgccgtccaccagcagcggcagcgtctcgctgcgcgtccggacggggcaggccgccaagaaggctgcgctgtccgtgtccgcgtcgtccacgctggcgggcgccttcctcgcggcgctggcgtcgtcgcccgacgctgcgctggcggacgtggcggcggcggacgccggcggcgacagccgcggccagctgctgctcgtcgtggtggcgcccgccatcgggtgggtgctgtacaacatcctgcagccggcgctgaaccagctgaaccgcatgcgcagcagccaggccgtggccgccggcctgggcctcggcgccgccgccgccgccgggatggcggccccgcccgaagcctccgccgccgtggtgcaggacctcgcggcaatcgccgccgccgcgcccgccgacgacagccgcggcctcctcctgctcatcgtcgtcgcgcccgccatcggctgggtgctcttcaacatcctccagccggcgctcaaccagctcaaccgcatgcggtccgactgaagctagctagctagcgtccgtttccgtatccgcggcgtgcgttgtagacgtgaagcacgtggttggttgatcaacgtacgtggacgtggcctgtctttccatcttcattcttgagcgaaaaaaaaaaaaaataaaatggttgacagtgaaaggtgaaacgctcatcgccgccgccggcgagtgttcccggcagataaaaaaaaaaaaaaaaaaaaaaaaaaaaaaaaaaaaaaaaaaaaaaaatgaagtggagaagatgagggacctgatcagcaagaagtttggaaagcagcttctgagcattgacattgatctctggctctggtcctgcggcgtgcagaacatggcgctgtcacatcaccgcaccctgtcgatttactactagacagtcaggcaggcaggaagctgaccctgctggtgcgctcgttcagctggccgggcgttgtcgtcgcttgttcgtcctaaccataacggtgcatgtaggtgtcgagagttttgtctccttgggaatgcacacaggtgcaagatattgtaggcccgtcccatgaggacgtcaaacttgtctcctgttgtgggggagacaaccctgccgtctgccgaggtgtcgagagaccagcctcgcagtggaaaaaaagagtccagccgctcacggcccgacggaggagcgaagcaacctcggcggttaaaaaaaaaaaaaaaaaaa

SEQ ID NO: 108357 - DNA, 370 bp, Zea mays
  Clone ID: MRT4577_30315C.1
tattttttttttttttttttttaaataacgggggttttttaatgttttggtgaaaaagcaagccatcaaaatattgtggaccctcaaaaggcactgtttcacatactcgtaaaaagcatccataaatggaggggcctctgtgccatataggcgttgcgcccaacatacatagattggcacaatcgcattacacaaccatatcgatcttcgggacctgacatcttatttataattagacgccctggatcctgcgtttggagcctatgaactcggcacctgctcactggccattaatgttgatgagctggttgtaaaggatgcccacctggtcgatgtagttatagaacttcttcctctgagcacgctggat

SEQ ID NO: 108358 - DNA, 265 bp, Zea mays
  Clone ID: MRT4577_30316C.1
aatctgataagccagcaacagtttcaagacttaagcaaacaaatgccatcatcaacgggatcagggatgagccaggaaatctatgtccaacttactccagacgacaaagaaattttagattatatcatcacagaagctgacagccacttgcactctgactaagtcctggatcaatccgttgccattattaccgagaatgaaggtcttgacaaggacacagctgcagaactcacaatctacactgtaggtaacgttttcaagaatc

SEQ ID NO: 108359 - DNA, 1034 bp, Zea mays
  Clone ID: MRT4577_30317C.1
cggccgggggccgggtcggtcccccggttctagaaacccggagacgcacgcgctagctagcttaccttgccatcacctcctcgcctagcctgccactgccagcaggtgccaccgccatctctgctctgctctcgcaacgcaagcacacgcccggccgcctgccacagttgccatggcgaccatagccacgatggcgctgctgaagcccgccgccaaggccgcggcgcggtcggcgccgtccaccagcagcggcagcgtctcgctgcgcgtccggacggggcaggccgccaagaaggctgcgctgtccgtgtccgcgtcgtccacgctggcgggcgccttcctcgcggcgctggcgtcgtcgcccgacgctgcgctggcggacgtggcggcggcggacgccggcggcgacagccgcggccagctgctgctcgtggtggtggcgcccgccatcgggtgggtgctgtacaacatcctgcagccggcgctgaaccagctgaaccgcatgcgcagcagccaggccgtggccgccggcctgggcctcggcgccgccgccgccgccgggatggcggccccgcccgaggcctccgccgccgtggtgcaggacctcgcggcaatcgccgccgccgcgcccgccgacgacagccgcggcctcctcctgctcatcgtcgtcgcgccagccatcggctgggtgctcttcaacatcctccagccggcgctcaaccagctcaaccgcatgcggtccgactgaagctagctagcgtccgtttccgtatccgcggcgtgcgtgcgtgcgttgtagacgtgaagcacgtggttggttgatcaacgtacgtggacgtggcttgtctttccatcttcattcttgagcgaaatttaaaaaagctgtggtggttgacagtgaaaggtggaatgctcaccatcgccgccgccggcgagtgttcccggcactgctgcatgcgtcgaatcgcctgcactgcactgcactgcacccccgagtcgcttcgtgaatgcgatagatgccatgccatgcccct

SEQ ID NO: 108360 - DNA, 860 bp, Zea mays
  Clone ID: MRT4577_30318C.1
gggtacctcgaggccggccgggaccttgcctcacctcctcgcctagcctgccactgccagcaggtgccaccgccatctctactctgctctcgcaagcacacgcccggccgccttccacagttgccatggcgaccatagccacgatggcgctgctgaagcccgccgccaaggccgcggcgcggtcggcgccgtccaccagcagcggcagcgtctcgctgcgcgtcccggggcaggccgccaagaaggctgcggtctccgcgtccgcgtcgtccacgctggcgggcgccttcttcgcggcgctggcgtcgtcgcccgacgctgcgctggcggacgtggcggcggcggacgccggcggcgacagccgcggccagctgctgctcgtcgtggtggcgcccgccatcgggtgggtgctgtacaacatcctgcagccggcgctgaaccagctgaaccgcatgcgcagcagccaggccgtggccgccggcctgggcctcggcgccgccgccgccgccgggatggcggccccgcccgaggcctccgccgccgtggtgcaggacctcgcggcaatcgccgccgccgcgcccgccgacgacagccgcggcctcctcctgctcatcgtcgtcgcgcccgccatcggctgggtgctcttcaacatcctccagccggcgctcaaccagctcaaccgcatgcggtccgactgaagctagctagcgtccgtttccgtatccgcggcgtgcgtgcgtgcgtgtgttgtagacatgaagcacgtggttggttgatcaacgtacgtggacgtggcttgtctttccaaaaaaaaaaaaaaaaaagcggcaaaaaataaaagcggccaccaactcccgctt

SEQ ID NO: 108361 - DNA, 608 bp, Zea mays
  unsure (1)..(608): unsure at all n locations
  Clone ID: MRT4577_30319C.1
ttaattcngcacgaggcttccgcggccgggggggcctccctagtcccgattcccgagcaagagcgagggcgcgctcccccacgagtgcactctccgaccgcgcgctccgcgacgcgatgggcgcgctccgcctcgcctccttcaccctccgccccgccgccgccgccgccgcctctggcggggcgactccatcgggtccccgggccgcctctttctccagcggggggcgggggctcccctccctccgcctgggcccgccccgccgccgccgcggggacctcgccaggccccgcgccgcgggcgaggccgcggcggagagctacgcgtccgcgctgtcggaggtgggcggcnagaacgggaccctcnagcagacgggctctgacctcgagaagcgggggaagatcttctccgacgaggcgcgggccgagttcttcgacaaccccaccgtgccgcgcgaggagaaggccgagctcatcggcgagatcgccaaggcgtccgagcttcagccgcacgtggtcaacttcctcaacggcggcggcgacaacttccgcgcgtgcatcgtgccgcanatcggcgtcnagttcgagaacgtctacaactcgctcacg

SEQ ID NO: 108362 - DNA, 644 bp, Zea mays
  Clone ID: MRT4577_3031C.1
gccggccggtttgggatcttaaagcaacatcgctcttcgctaaactatgctcctccgactgggcgcctcctattgcatacttcctataccgcggcatcggtcacctcaccttaacccaccgcccgtcggcagccatgtattccacctaccactgcttcgcctccaccaagatccatgatgcggcgccgcatgatgaccacagccgccacatggagctggacaacggcgcgctgtcggcgcgcatccaccacgacatggacgagatccactacaactgcttgctatgcccgacggaagacgaagaacataggacaagcacgaggaccacattgtgggtcggcgtcaagcataagctcctctggtgacccttgtgctgcgacgtcatcgcatttcatcctcatcatcctctgcatcatcatcgccaatgccatacctcacaacaagacagactcgccggcggcagatcagtacaataatgcggtgaacaatgcgctcctcttcttcaacgcccataaatccgaacaccttcccaaaaacatatgccatagagagtggcacgaactctgatctgtgagacagttcctacgacagagacgttgaggtggtactgcatatctgattacgatcacgctgataactacatc

SEQ ID NO: 108363 - DNA, 457 bp, Zea mays
  Clone ID: MRT4577_30320C.1
gccggccgggagcttaccttgccatcacctcttcgcctagctagcctgccactgccagcaggtgccaccgccatctctgctctgctctcgcaagcacacgcccggccgcctgccacagttgccatggcgaccatagccacgatggcgctgctgaagcccgccgccaaggccgcggcgcggccggcgccgtccaccagcagcggcagcgtctcgctgcgcgtcccggggcaggccgccaagaaggctgcggtgtccgcgtccgcgtcgtccacgctggcgggcgccttcttcgcggcgctggcgtcgtcgcccgacgctgcgctggcggacgtcgcggcggcggacgccggcggcgacagccgcggccagctgctgctcgtcgtggtggcgcccgccatcgggtgggtgctgtacaacatcctgcagccggcgctgaaccagctgaaccgcatgcgca

SEQ ID NO: 108364 - DNA, 389 bp, Zea mays
  Clone ID: MRT4577_30321C.1
gccggccgggccgggatcacctcctcgcctagcctgccactgccagcaggtgccaccgccatctctgctctgctctcgcaacgcaagcacacgcccggccgcctgccacagttgccatggcgaccatagccacgatggcgctgctgaagcccgcggcctcctcctgctcatcgtcgtcgcgcccgccatcggctgggtgctcttcaacatcctccagccggcgctcaaccagctcaaccgcatgcggtccgactgaagctagctagctagcgtccgtttccgtatccgcggcgtgcgttgtagacgtgaagcacgtggttggttgatcaacgtacgtggacgtggcctgtctttccatcttccaaaaaaaaaaaaaaaaaaggccccta

SEQ ID NO: 108365 - DNA, 1148 bp, Zea mays
  Clone ID: MRT4577_30322C.1
ctcgaggccggccgggaggagacttcatccctctcgccttcaggttctactcgccatctccccaccagcagcgcctcctcccattcccccaacggacattgcctaggaggctaggacagaaccacccagagcgcacaaccttatccgaatcgccgttgcatggaggccgtgcgcgcgtcggcggcgtgggtcgccagtcgctcctcccatgtcacggtcgaccttcaagaaattgagaaggtagtggaccaaatccaaggagatgttccaaaagttgagtgggattacgaaggaattcactactttgacaatgggccactcacagtccagtacctgttcgtcttggatgcactaaacttctgcttctggccagataaggacttgagctatgaccatttggcttctggaagtcagccttggagactgccagcaggtgccaccgtcatctctgctctgctctcgcaacgcaagcacacgcccggccgcctgccacagttgccatggcgaccatagccacgatggcgctgctgaagcccgccgccaaggccgcggcgcggtcggcgccgtccaccagcagcggcagcgtctcgctgcgcgtaccggggcaggccgccaagaaggctgcggtgtccgcgtccgcgtcgtccacgctggcgggcgccttcttcgcggcgctggcgtcgtcgcccgacgctgcgctggcggacgtcgtggcggcggcggacgtcggcggcgacagccgcgggcagctgctgctcgtctctgaggcgcccgccatctactggctgctacacagcatgctgttcgagacgctggcgcatccgttcaccaagagaggtctgctgctcaggttcctgctgctgggcggcggctcacttctggcctacgtcagcgcgtcggcgtcaccggacctcctgccgatcaagaagggacctcaggagccgccgcaggcgggcccgcgcggcaagatctaagctcagcttctccatttgcatggtctagtaccttgctttgtactgctagcgccggtcgatccggcgcaatcgtcatggatcatctctctatcttgttgttaccctgttcataatttggtatatttggcattcccgtattgagtactctttggcttacctactataattaaaatg

SEQ ID NO: 108366 - DNA, 453 bp, Zea mays
  unsure (1)..(453): unsure at all n locations
  Clone ID: MRT4577_30323C.1
aaaccataaacagatttttgaagtacctataatcttttcagcattgggcagaaacgtaaaaccctagggttatgtcctttacacgtacacatttatctgacctttaaagaggaggtgcctacatacatctgacgagtgtaataaacgatatgtgtggatatagctggagagagacctttaggacccaatccatcaccatctgcaagtaggacttgttgatcttaaacacccgaccttttagaaaacgatatggacttgaccggtctcctacagatcaacttttctatacggggctgtaaatataacaccattagaaagttggccgagacccaagcttgactatcttgcatcagaagacctcntggatctcccattagaccccacatgagtggaaatatagaggcaccattcacttccacatatgatatgggttcagcaatagataacaacatc

SEQ ID NO: 108367 - DNA, 654 bp, Zea mays
  Clone ID: MRT4577_30324C.1
ctgtgcggcgctcgaggcggccgggtccaaaatggcatccctcctcgcctagtctgccactgccagcaggtgccaccgccatctctgctctgctctcgcaacgcaagcacacgcccggccgcctgccacagttcccatggcgaccatagccacgatggcgctgctgaagcccgccgccaaggccgcggcgcggccggcgccgtccaccagcagcggcagcgtctcgctgcgcgtaccggggcaggccgccaagaaggctgcggtgtccgcgtccgcgtcgtccacgctggcgggcgccttcttcgcggcgctggcgtcgtcgcccgacgctgcgctggcggacgccgtggtgcaggacctcgcggcaatcgccgccgccgcgcccgccgacgacagccgcggcctcctcctgctcatcgtcgtcgcgcccgccatcggctgggtgctcttcaacatcctccagccggcgctcaaccagctcaaccgcatgcggtccgactgaagctagctagcgtccgtttccgtatccgcggcgtgcgtgcgtgcgttgtagacgtgaagcacgtggttggttgatcaacgtatggcttgtctttccatcttcattcttgagcgaaatttgctcccaaaaaaaaaaaaaaaaaaaggccccta

SEQ ID NO: 108368 - DNA, 197 bp, Zea mays
  unsure (1)..(197): unsure at all n locations
  Clone ID: MRT4577_30325C.1
acaacacattcnatacattttcctcataacttcagcctgcaagatgacttataaacagggtggggtatacactctcagatacatccaataaaacaagacacctttccctgtacacactcaatttttaaacaccataatcgctaacatcaaacctatttttactacccgcacattcacagtactcaccaaaatcctat

SEQ ID NO: 108369 - DNA, 375 bp, Zea mays
  Clone ID: MRT4577_30326C.1
ccccattcagtcaccatggccttcactgctagcgatatctgcaagatcatcttcgccgtccttctcccccctcttggtgtcttcctcgagcgcgggtgcggcggtgacctctgcatcaacatcctcctgaccatcctgggttacattcccggcatcatccacgccctctacatcattctcaaatactaagtcagtcgtcatgagggaccaaccatcccgctgagcggaatggaggtgggacgacgaactggtgacgaagggaccgattcatgatgtgcgcgacgaccgcttcgagacggggcatgtgggctcggtcgatttctgcatgcgggccttaccgagcgacccggtgcaacatcgccaacaactaccact

SEQ ID NO: 108370 - DNA, 334 bp, Zea mays
  Clone ID: MRT4577_30327C.1
gacgagcgcgcctctctttttttcagaaaatttttattttccaaattaccaggccctcatctgttggctaaaaaggacaaattctgggggaacaactaagggagcccctcggcgcatcgtttcgaataaaaaaaaagaccccgggtatatgggccctccgtcgttctttttgggtcccggcacagtggctcccttgaaaacacagagggactccctcgcgagatgctcgaacatgccgttaaactccaaggggcgccgacggctgccgtcctatggagggggagaccagctattttcccccccctccctgaagggctcctaccgggggggaacc

SEQ ID NO: 108371 - DNA, 385 bp, Zea mays
  Clone ID: MRT4577_30328C.1
gcacctcgtccggcgccgctgctacttggagcgccgacgagatcaagaaggccctccggtgggcgctcttcttcgaggagattttcaaggacctgctcgactcgggccagtacgaggattctgcaagagaactcgatgcggcactccttgagctcacttcaagtcccgagttccctaagggtcttgctgctgtacgttcagatttgctatccatggcaagggtgttggttatgcgacattttctgaaaccaaacacaatgagcgtggaaaacttttgtgctcttcttgaagcggttgctggcatggatattgatggcatttgtgctagtggtgcgcacaacgcatgcgagtatgctgagtcaatattgaatatgaatacatcatg

SEQ ID NO: 108372 - DNA, 132 bp, Zea mays
  Clone ID: MRT4577_30329C.1
ctcgagcgctctctgttgacaaggttccacacatacgattgggtctgattttcgatgacgagcttttgatgtgtgcgacagtcaagctctttatcgagaatcagatcaaattgtatgtgtgggttcttgtca

SEQ ID NO: 108373 - DNA, 402 bp, Zea mays
  Clone ID: MRT4577_3032C.1
catcttcaaagtcatcctcgccaccaaagggtgaatcaaattcttctcccagtcctccatcgaaatcgtccctgtcaccaccgccaccaccaaagaaaagtggtagtacgtctagctctaaagatgggaagacgaagaagtcgtcttcatcgtcttcatcgtcagataatacagccgctgtgatcaccggcgtggtgcttggggtggtgggcttcgctctgctcttgtccatcgtggcgtgcgtgtgctgcgccaagaagaagaagaaacgtccgcccccaatgaacatgcccttctacaccgacgagaaaggcaatgtgtattaccccaacgctggtctgccgcctatgtggcagcaatatggcagcaacggcagcatccctccgccgggatggcaccatc

SEQ ID NO: 108374 - DNA, 324 bp, Zea mays
  Clone ID: MRT4577_30330C.1
accctgttgccaccacaatactgctgttgttgaggacctcttatgacaacagcggtgttttttattcaaaagaggcgccccaccacaacatacccaccagctgatgatgtcctcccgcctcgtcgggccgaggaggcccctccttgcagccaagaggaggggcggcgcccttcctaccacccgcggaagaagaaaaacgacgaaagaagtggtggtatactagtggcgggcggaggccaccaattctactactcctatgaagtttttcaacataggcctactagagacctgctcaggaggttcttttttccctgattactccaa

SEQ ID NO: 108375 - DNA, 518 bp, Zea mays
  Clone ID: MRT4577_30331C.1
aataagaagaacggttgtagtatatatatagattcaaatcatattatcgtgggccaattaatatatggtctcaggagatgcaatcggatcaaccaacatgcatgtagacacacgtgcgtacatgagcacaaagactgacgccgaacatgcagagagagatagcaatactgaagaactgctgcatatctctctcttacacacacaacacaatccctatgtatggcagccagctgggcctcgcttattattgttcatccaccaccacaagcttgatagataatgataatatacatggtcgtcgatcgatgagatcagcacttgcatgtgtacgacttgcagatgccaccgaaggttcatacgtgagcagctcttgcggactacgacgtggtcttgatgaactcgggcgcggccttcttgtgaggggccatgccgaggacgactgtgggctgcgcagctgtgctcatgtactccatgtcagggctctctttgtcgtacttgcatgttgagacgtagtctca

SEQ ID NO: 108376 - DNA, 1507 bp, Zea mays
  Clone ID: MRT4577_30332C.1
cgaacgcagagcggataccaaccaggtgagccatcaaagccgcttctcttcccctaaaacctagcccgcaaatcccaatccagcccacgcgcctcccccccaaaccctcgtccccaagctcgcgaacctcgccgccgccaccgcccgcaccaccaccggccgctccgcgcgaccgcccaccatggcgcgtaacgaggagaaggcgcagtccatgctgaaccgcttcatcacgatgaagcaggaggagaagcgcaagccccgcgagcgccggccgtacctcgcctccgagtgccgggacctcgctgacgccgaccgctggcgtggagagatcctgcgcgagatcggcgtcaaggtcgccgagatccagaacgagggcctcggggagcaccgcctccgagacctcaacgacgagatcaacaagctcctccgcgagcgcagccactgggagcgccgcatcctcgagctcggaggccgcgactactctcgcagctccaacgcgccgctcatgaccgacctcgacggcaacatagtcgccgtccccaacccctcgggtcgcggaccggggtaccgctactttggcgcggccaggaagctccctggtcgtgtgggagctcttcgagaagccgcctgatatgcggaagcgacgcacccgctacgagatccacaagcgcatcaacgccgggtactacggatactatgacgatgaggacggcgtgctagagcgccttgagggccctgccgagaagcgcatgcgggaggagaatgtttcagagtggcaccgtgtggaacgggtgcggcgggaggccatgaagggggtgatgagcggtgaggtggctgcggctggagggcgcagcggggaggctgctagagaggttctgtttgagggggtggaggaggaggtcgaagaggagaggaagcgtgaggaagagaagagagagagggagaaaggcgaggaagttgggagggaattcgttgcacatgtgccgctacctgatgaaaaggagattgagcgcatggtattagagaggaagaagaaggagctgcttagcaagtatgccagcgattccctgctggttgagcaggaggaggccaaggagatgctcaatgtccgacgctagaagacgactggccaattgaagctttcattgtgagctcaagacgagcactgaggtacaagaaggaacatcttttgaagtgctggcaccggggggaccaaagacattgttatgtaaaagaaaacaggtttgcctgaaatcacattttatgtgtttaatcagacttgggcgagtgatactggtgcctgttgacaaattttgacgaatgctaagcttgtggtattattggtgtgcctgtgtgccctgaacgaaggctagacttgtggtattgatgtgcctgtgtgcactgtaacttaactcgtatcatgtacagccattggctgcaatgcactgatcattgatcccttaaaatttcagtgatatagcaaaatctgattgtatcatctcgtttg

SEQ ID NO: 108377 - DNA, 185 bp, Zea mays
  Clone ID: MRT4577_30333C.1
tccgggacaccagactgccgggttggagactacctgtcccagccatacaatgcccgacggtggagatggactgccgccacttcaactcccagcaggcccacgacaaggcggaggcgacaacgggccccggcctttttttcaggatggtgatcagcgaccaccaccacgacgagatccgagacctg

SEQ ID NO: 108378 - DNA, 408 bp, Zea mays
  Clone ID: MRT4577_30334C.1
aaaaacaaccaaccggccgcaggagggcacccagacaaaaaggggcaaggaaccccccacagagaacccccggccccgaaggaccagaaaaaccccaggggaaaggccacaaacacacaagggccaaccagcgtttccagcggggggaacaaaaccccggggaaccaacgccccggaccggaacaagaaaggaaccggtagggcaaaagggcagacgcaaaaagccctccgcccggcgcgagcgaagcacagaagggaagacccaagcccacaggccacaaacacggccaccccagacggcgaaggaaaaaccaaagaaagaaacaagggcaaacaacacacgacccggaagactaaggcgaaaaccccgggggaccccaaggaggaacacaaacccacccgagggag

SEQ ID NO: 108379 - DNA, 216 bp, Zea mays
  unsure (1)..(216): unsure at all n locations
  Clone ID: MRT4577_30335C.1
ccgcgaatcccatcccatccccgcaccgccgccgatcccgcccgcccgcccctccgcagatctccccgacattgcccgctccccggccggattcgcccagatccaccgacgcggcgcgcggtgctcccggcggcgtggtccggtcggtctgatcgggaaggcttgatcttttttgttggtgctgttgtctggagggtggnggcagcggagatgggc

SEQ ID NO: 108380 - DNA, 350 bp, Zea mays
  Clone ID: MRT4577_30336C.1
acgctggagcaaacggagcatgctgctcttagtacatttcgtcgagacgactgtatcttcgtaggggctttcctaccaggctacgtccaaggctggtgcacctcctatccctactcaagctgctgcaactggttgcctacggatatccaaccttcgtacacaacttcctattagcgatcaggttctaatggcagtactcatgctgcaacttgttcaggctaacgtacttcagtcatcgacatgccactgagcgacgtcgaaggctacactataatgacgaccactgagcctggccagttgcaccactggaactgaacacgctaggccaagaacggcatacattgcaactg

SEQ ID NO: 108381 - DNA, 656 bp, Zea mays
  Clone ID: MRT4577_30337C.1
cggacgcgtggggccggcggcgggctcggcgagccccggccccggcggcttgggcgcgcggcgccccggctggggtgcgggctgcacaggtgagcggcctccagcccctcggcggctcggcacagaccggcagcccgtcgcacgagggcgggcgtaggccctcggcacgagcgcggctgcacgagcatggccggcgcgggggcacggccggcgcggctccccggcgtccaagcggccctgcggcggtgcgggcagcaccggcgtgcggccctcggaccctttggcggctcggcgcaggccggcggacgagggcggctcagcccctcggcgcaggcgcgcccaccggcggcggttcggctgcccgacgcgcgggtgtacgtaccggcgcgaggacgtggcctggcggcgctacggcacctccagcgcgctacagcaccggcggcctaggagccggccctggcccgcggcggcctgagcacggccggcccagccacggcacggcgtgcgcgaccccctgccccgcggctcggatgaggccccccgcgcacggcggtcctccggagcacggcgcgggcgtggcccctagccccggtggcgggcgcgacccggcggccgtgctggtagccccagcgcgggggcgccggcgtgtgcggcgc

SEQ ID NO: 108382 - DNA, 353 bp, Zea mays
  Clone ID: MRT4577_30338C.1
tcgattgagaccaactagcaacatagaaagcacaatagtgtaccaacaatggcagccaggggattttgcttccttatgctccttggtctttctgcaagtgttgctaccgcaaccattttcccacaatgctcacaagctcctatagcttcctttcttctcccatacctctcaccagcggtgtgttcaaggagaaacaacccaattgttataccctaaacgaaccaacaaggcaatccaacaagcatcttaccattatcacgctggttccttcaacaacacgccagcctattaacagaattacctttggtccatttgggggcacaaaaaatcaaggcacaacaactacaacaact

SEQ ID NO: 108383 - DNA, 383 bp, Zea mays
  Clone ID: MRT4577_30339C.1
gatcttttaccggtctcgtggttttgaccgggtaatttggcccgcgtaccggcaggcgtaccagttattgcgtgatcgcgagacgggttaggagcaaggagggaaccatggctcatagctcgggggcaagtgggagtatcgtgttaccggtcaaaaaaaccacacgaacctgcggagccggcaagcgataaagcgccgaagcctgggagagcgtgaagagagacacgagctcacgcgaagcgcggagcgcccactgcccactcgggagacgggaaacgagaggtgccagaaggaaccgggaatcgcccaacgcgcggcgggaggcggtttgcgcattgggcgccggggtgggtaaaacattcagcagggagacaggcaacagc

SEQ ID NO: 108384 - DNA, 1119 bp, Zea mays
  Clone ID: MRT4577_3033C.1
cggacgcgtgggagcagcaatgcggacgaatgtctagcgagacacacacaacacaacagcgacgctagctttcaagctaatagaggcagcagagcagaccatagagagtggagatcagccagcagcagcagcaaggctgagccgccgcccccacgagtggagtggaggcagcagccagcgacaaggctgaatccgggaggtccgcgcgccgcatccacagctagcatcgcaggcgcgtttcgggccgggctgcgcgagaggtaccaaatcgaggcaaactctgaatactagatatgacccaaaaataacaggggtcaaggtcggccagtgagacgatgggggataagcttcatcgtcgagagggaaacagcccggatcaccagctaaggcccctaaatgaccgctcagtgataaaggaggtgggggtgcaaagacagccaggaggtttgcctagaagcagccaccctttaaagagtgcgtaatagctcactgatcgagcgcccttgcgctgaagatgaacggggctaagcgatctgccgaagctgtgggatgtcaaaatgcatcggtaggggagcgttccgccttagagggaagcaaacgcgaaagcgggggtcgacgaagcggaagcgagaatgtcggcttgagtaacgaaaacattggtgagaatccaatgccccgaaaacccaaggtttcctccgcaaggttcgtccacggagggtgagtcagggcctaagatcaggccgaaaggcgtagtcgatggacaacaggtcaatattcctgtactaccccttgttggtacggagggacggaggaggctaggttagccgaaagatggttataggtttaaggacacaaggtgaccctgctttttcagggtaagaaggggtagagaaaatgcctcgagccgaggtccgagtaccaagcgctgcagcgctgaagtatgagccccgtggactagccattgcttctccacgaggctcataccaggcgctacggcgctgaagtatgtaacccatgccatactcccaggaaaagctcgaacgaccttcaacaaaagggtacctgtacccgaaaccgacacaggtgggtaggtagagaataccgccgtgccgaattcga

SEQ ID NO: 108385 - DNA, 446 bp, Zea mays
  Clone ID: MRT4577_30340C.1
cgacgagcagagggccccccttagctttcggagcaatggcggcgggatacgtggcgtatgacaactagcggactacctttttaatgttgttctttatctgctactccggctgtctcatgttcaatctgctctcacgcttcacgcgcaactagttcatcctttagtccaagtccaccatcatcgtttagttttccaccctctttctccagtttttctgcattttatataagtttcttattttttatctttctttttcttttatctatatttttctaattttttattttatattttttaggtgttttttttatttatttatattttttttttatatttatatattttattttctattatatttatattattttttttattttttttctcttatattattttttatgttatattattttattttattttattttatatttttatttttt

SEQ ID NO: 108386 - DNA, 567 bp, Zea mays
  Clone ID: MRT4577_30341C.1
cattgggtacctcgagccggccgggaagatgcatctagctagcctgagcattgaccacggatcaccagcatcggccgagtgcaaggacgacaacagcgcgcggcggcctccactatgtcccatgtacagaacgacctagcccacactgggttgctccaccgcgtgcctcaacctcctgccgcccctccaaaaggagggaccatcttcgcgcctacctgcatatagggtttagtatgacgacctcgacctcccctattctgatatggacaacaaagaagagcatcggtaccttcgtactacaaaggagcaagaactcccgatttggcccctcatgagagcgatgcttataaccatgatgactgactcctcccgcagaagctcaacgctgatcatgaaggcgttacataggaaagttgaccgatctgtcggaagctggaaatgatcttggtggatggcgacagtaaccgcctagccttactctatcacatgggacacttatctatcacttatgatgaagatgtgcagtaccattatacctctccacaggagatcgcaacgcatgttctc

SEQ ID NO: 108387 - DNA, 439 bp, Zea mays
  Clone ID: MRT4577_30342C.1
aaaaaaaaaaaaaaaaaaaagaaaaaaacctaaaaacgaaaaaaaaactaagggaaaaataatgaaaaatatacaaaaaactgaaaaaaaaataggtttgtgcctctggcagggcaccactcttagggtgataatgtgggcgaaatttcacatccaccttgggcgggcggtttacaccttgcattttaatggggaccaatttgggccttatagtgggtggagtttaccattaaactgggccggcttttaacaactggcggaatgggaaaaacgtgcggtcccctagctttttccactgggtgcgcatccccttttgccaatgggggggaattgtaaaggggccttaaccgctgcccttttcaaagttacgcgcagcctgactggtaaaggggccacccctctagcgccccataattccggggggtggggggggtttctc

SEQ ID NO: 108388 - DNA, 459 bp, Zea mays
  unsure (1)..(459): unsure at all n locations
  Clone ID: MRT4577_30343C.1
aaacagtccggtgcacctcaagctggttcaagtttggctgcacttanccaaaacagtccggtgcacctcaagctggttcaagtttggctgcacttanccattcaactatggagtaaaacttgttcaaaactattgatagttatgtcagcctaatccaaactatgcaaaccaatgcctctatgggttattcctcgatattctaagcttgcctttcaccgtggtaaattcttgaaaacgtctaattcccgctcacactagatggagggagcccacaaccacctatggcaaaacacatgcgtaaataaatcgtaagtctgcctctaaacgccttggcatttgtgcgtcctagcaagccccaccaacaccctctgccctaagacagccttgtcatgcatgccgaactgctatattaaagtgttgggttgcagaccttgaagtgttacctcagtgcagaaagtc

SEQ ID NO: 108389 - DNA, 620 bp, Zea mays
  Clone ID: MRT4577_30344C.1
tcgcgatctagaaccttttttttttttttttttatctatatgtagtttgtttttgtactgtaaaattactaaagcttaggagacactagcattcatcaaatgacgacaaaagcaaaaggtaatggaaataagtagagctttcacatacgacatattggaatgcattttgtgaaatcttctcagtgagcatttcaactgctccagcttctaggagttctgctcttgttttgctgtcatgacgagaaaagacagcaagtagccatagtggaatcatgttgcctgagattacagcagtacggcacacagtttcaccatcactgtagttttctttggagtgtctggaaattctaatatctgatatgctttcactgctgacattttcagcaggcgtgtttgccatatggatcatatcaattagagaatggattagttgaatatacagacttgcatcattcagaacctctatttgcttctgacaatgctcttttgcagcacagacgagaagagcacatccaccaactttaactttaagcgtgttggagccaatgatgcgccatgcaatggatgatatgcaacctggagtttcagaaaccagaccaccaataacatcatgttggtcg

SEQ ID NO: 108390 - DNA, 593 bp, Zea mays
  Clone ID: MRT4577_30345C.1
aattcggcacgaggagacagggccagggggcttcctattccattgttcttcgttaagatccaccaacacaccccaccatttggcggttaaatcgagctgatccataattaacaatggcggccctgacgcaaagcgccattgacgtggtgctgggccagctgtcgaaggtggtcaaggacgaggtgcagctgatcggcggcgtgcacagagatatgaagttcatcaaggacgagatggacagcatgaacggcttcctgacgcacctgaacaagatggagagcgagcacgacgaccaggtgcgcgcctggatgaagcaggtgcgagagaccgcctacgtcgccgaggactgcgtggagcgctacgtgcgcgacatggaacgcttgggcgtcagccagggcgggtgcgcggcctacgcggccatggcgctcctcgccctcagtaaacccaagacgttctgggagctccaccagctcggcaagcagatcaccgagctccggacccgcgtgcacgatgtcggcgagaggcgggtgcgctacgacgtcaaagtcccggacaagcgtaaccgcatgctggtgcggaacgaggcggcgtct

SEQ ID NO: 108391 - DNA, 238 bp, Zea mays
  Clone ID: MRT4577_30346C.1
ggcatacactaggtagcccggagaagcagacggcattgcttctgtcgtgtccacagaatggggtgatgcgagaacactcatatgaccaatgcgtatttgaaacaattactagtgcattttaacacaaggtcatctagctagacaaactacaggaccaggattaagctgcttaaccaagacatagactagtacactacactggaatacagatttgttgagcgatgtaccaaccaggaca

SEQ ID NO: 108392 - DNA, 247 bp, Zea mays
  Clone ID: MRT4577_30347C.1
cgccggagcacgacgcacgcagatccgcagagatcagtgacactgcaagtattgaaaactgcattgtaagatggcatcagcagagcttgtcccgtgatgaaaatgtgtacatggctgagctcgcagagcaggccgggatgtacgagcaaatggatgagttcatggataatgtacagagaactgttgaatctgaagaggtcactgtggatgaacgcaacctcctgtctgatggatacaagaacgttta

SEQ ID NO: 108393 - DNA, 654 bp, Zea mays
  Clone ID: MRT4577_30348C.1
cctcgaggccggccgggccgggatcctctgtaccattcaccacactggcctatagtctttgtttccacccaaaactttttttccccccgcgccagcaatcttctacctgtctgtatatctgttatcttgctccctagcggcgcattcgatttttttttcccttctatcagcaaatcctttgccaacttacaagcctcaattagcttgccctttgctagagacgtctcttgcgcattcatcctaattcctgtgcttcaaaacctgttgagcgctatcgtatcaagcacaatgttgaaaatgaacgtcagcttaattgtggtcgttagccttattgctaccgccatggccagtccggcacccgcttcacgaatgaccatgaaagttcgggactctaacagcgtgcgcagctttgatcgagcaagtcgccgttcaattatgagcgctcgtggcgactacggcccacctgccccttccccttccttctctggtcagccttctccggtcaacaaagctccaggcggctcatcggattacaagcccgacaatggctcgtcccccacctctccctacggtaccgcacaagacgcgaccagcaagtctccggacactgaagacactccggacggctcaacagacacaaagtccgactacggg

SEQ ID NO: 108394 - DNA, 595 bp, Zea mays
  Clone ID: MRT4577_30349C.1
ggctgtgaaccgcaaaatgtggagcataaatagtcaagccgttccgacagtgggactgacagctttgagcctgcattacctgggtgcacatcaacacagtcatgcttgctggggaataactgcactgactttcttattacgcaggtacagagcacacgacgcataatacaaaactcttggtacttatggcctttgggaccctttgtttgctaaacctctgaagaggggattggatacttgtcagcctatccatgggtcatatcatttctttcacagctatgaagctggttcctatgctcgtttttctgacttagtatgtgatgttgcatacgtgacctgtgccaatgacacaaccatattgacaccgactgcggcttacatacacccaccgagcttcatgtatgacgctaccccaccaactagggcgggacgcaaagctaccatgggcctgacctacatgagctattacgatgctggacagctttgtgcccctgaaggctccgagacctgaacacctggcgatcagcacctgggacctcataagaccagtcatcttccatataaacacaactagccaactgggtctattggacag

SEQ ID NO: 108395 - DNA, 418 bp, Zea mays
  Clone ID: MRT4577_3034C.1
ggctggttacatccgtatggagaggaacgagaacgccagcactgtgaagtggggagtgcgcatgatggcaggctacccgactaaaaaaggcgcgaaccctacaaggccgcttacaagcgcgacgacaccgacgggtggccgtgacaatgtctgcgaagagaacttctcgtgctcggtgggcaatacctggtactgagcgtatggctataagaacagttgcttggtctgtggctgctgtcagatctagggcgccacctggggcaaggatcacgcaaattgatgcccgccgagctaccctgtctgcaactgaaggagctggaacttggctaggggagcaagaacaacccactgagcgtaaaggcttgaaacgcacccttcccaagctgagcaccgcatgaggcccttgatctgggactga

SEQ ID NO: 108396 - DNA, 381 bp, Zea mays
  Clone ID: MRT4577_30350C.1
ggaaaaccgaaaagggactcaacatcctgtttttggaagggggcccgggcccccttttacaggggggggggttgttccacaattaaacggggttaccgccggggccgggcaaaccctggatacattatacccgggggaattccccccagggggggggggacccgaaccaaaacccttcggggtttgtttttgggttgggcggcccccaagacggggtcgggctttaagggccttttcccccccctttggtaaaggccgggccggaacctttggaaaattcccccatggataaactggttgcaaaaaccaaacccccaatagcttgttttttactgggcgaaccgacaactacaccaggtgcgcaaaaaaatccccgttttc

SEQ ID NO: 108397 - DNA, 278 bp, Zea mays
  unsure (1)..(278): unsure at all n locations
  Clone ID: MRT4577_30351C.1
catggaataccgggaagcacacccaccctttttatttatgacattatcacgccaagccacgcaaggcacccacacacatacatatatgtatgtaaatatatatgtatagtccaggtgcaatctcacggatagacttcgaaggcaacacgagctccaaattccttcaggatcttggattcgctgaaccctgctttggggaagagctcggtccattctttttcatctctntgccggccttttggcatggccataatgccgatgtccatcaggaggtgagt

SEQ ID NO: 108398 - DNA, 163 bp, Zea mays
  Clone ID: MRT4577_30352C.1
ataaatccttatatttccaaatataccaaccttcttaactacctactaaatccattaacactcatcatacaacctatctaactcaaacatcttattaaccaaactaaaataaatcaaaagccattcccataataacctctaactaattataatcaacctatac

SEQ ID NO: 108399 - DNA, 1409 bp, Zea mays
  Clone ID: MRT4577_30353C.1
actcctatgggctcgaggggtactcgaggccggccgggatgcacgcccagcacgcccagacggcggaggaagggggaaagaggagggcagagcagcaacagtacatcgagcgagggagtagagcaaattgaatcaggtttcgtgtcgattcggaggctttcgcttctgcttgcggagttgcggtggagatttgaggcctgcggcgaagatggcacctgcggaatccggggagaaggcgaccagcttcgccatggcctgcagcctgctcagccgctacgtcaggcagaacggtgccgccgctgccgatctcggcctcgctatcagagctgaatccgatgcaaagaggacgtcgacggacatggaaaagggggagacggggaaggagaccatggatctcttcccccagatcgctggattcggctcggaggccgccacgaaggaagcccctgatgcgagggagccagagaagcgccagctgactatcttctatggcgggaaggtccttgtgttcgatgacttccctgctgagaaggcaaaagacctgatgcaaatggccagcaagggttcatccgtagcccagaaccctggcctgctgcctccctccacagctgcaaccgttactgacagcaccaagatcgcagcagtgccagccgcaccaattgctgtggccaacgcccagaagagtgcagcagatataccgcaggctcccaaggcatctcttcgcaggttccttgagaagagaaaggatcgccttactgcgaaagcaccgtacccgggttccccttcagatgttacacctgtgaagaaggagatgtcggatggtcagccatggcttgggctgggacctcagatcgccaatcctgatctgagcttgtccaaggaggcgagccagtgatcgatgatccagcatcaccatcttcaaaactgcgatactcaacagccatgtgtggaagtgttctgttttgggcccctatcattccgggttttttttcgcatggataaataggttgtacgaaagtaaagaacacagctaatgacggacttcagtaaggattaccggcgctggggcaggtttggctgatcagcctttgctggcctgacccaagtggccattttagaaagatgaaaatgtaatgtagtagttgctagaacaagttggcatcttgggatgttctgtgttgtttggctttggcactggtgcgtgtcagtgtcacaaagctatttattttcacagatacatgctatatgattgttttttttaatcttctggttgtctctgtagggttatgaaatatcacagcttttctttctccttagttgtgatcaatgcccctggactatcagaatgttgttctctaagttcaatctacactcccgttatctagtaatagtagaaaaaaaaaaaaaaa

SEQ ID NO: 108400 - DNA, 367 bp, Zea mays
  unsure (1)..(367): unsure at all n locations
  Clone ID: MRT4577_30354C.1
ccggtcacaaaattcccgggcgcctttaatggcaattgtaggaaattttgatcaaaaaaaccaaaaaaaaaaaaaaaaaaaaaaaaaaaaaaaaaaaaaaaaaaaaaaaaaaaaaaaaaaaaaaaaaaaaaaaaaaaaaaaaaaaaaaaaaaaaaaaaaaaaaaaaaaaaaaaggggggccccgttttaaaagaacccaattttttttcccccgncattcgcacttttatagcttttttttagggcccctaaaattaattcaatgggccggcttttaaaaacttatgaattgaaaaaaccttgcctttcccaaattaattcgcctttcaaaaaatccctttttcgccccttgccttaaaactaaaaa

SEQ ID NO: 108401 - DNA, 668 bp, Zea mays
  Clone ID: MRT4577_30355C.1
accgcaggctcccaaggcatctcttcgcaggttccttgagaagagaaaggatcggtaggttactcttgctgctgttgggacgacaagactgttgttttaacgatacagctcttcgaggaggatctatctaatctgtaatattcattgtttcagccttactgcgaaagcaccgtacccgggttccccttcagatgttacacctgtgaagaaggagatgtcggatggtcagccatggcttgggctgggacctcagatcgccaatcctgatctgagcttgtccaaggaggcgagccagtgatcgatgatccagcatcaccatcttcaaaactgcgatactatacagccatgtgtgaaagtgttctgttttgggcccctatctgcctgagttttttttcgcatggagacctaggtggccatttagtaaagaacacaatgtaatgtagtagttgctagaacaagttggcatcttgggatgttctctgttgtttggctttggcactggtgcgtgtcagtgtcacaaagctatttattttcacagatacatgctatatgattttttctattatcttctggttgtctctgtagggttatgaaatatcacagcttttctttctaaaaacaaaaaaaaaaaaaaaaaaacccacgcgtccgcggacgcgtgggtggac

SEQ ID NO: 108402 - DNA, 528 bp, Zea mays
  Clone ID: MRT4577_30356C.1
cccacgcgtccgcccacgcgtctttccattcgtccgcccacgcgtccggcacctcctagggacacactgagaaaacctggagtgctgcaatgtagtgccaaagagaaggtccttgatcctaagaaggcacagaacattgccatcctgctgcgcgcgctgaatgtcactccggaagaggtctccgatgcactgctagatggcaatactgaatgtctgggggcggatttgttggaaaccttggtaaagatggctcctacgaaagaggaagaactgaagcttcgaaactttaccggggactcatcgaagcttggttccgcagagcggtttctcaaggcagtgcttgacatacctttttctttcaaaagagttgatgctatgctctatcgagcaaattttgagagcgaaatcaattacctcaggaaatctttcgaaacattagagggagcttgtgatgatttaaaaagcagtagattgttcctgaagctacttgaagctgtcctgcgaactgggaaccgaatgaatgtcggc

SEQ ID NO: 108403 - DNA, 466 bp, Zea mays
  Clone ID: MRT4577_30357C.1
gacccgagccgatcccgggcgactggaacggcgcgggcgcccacaccaactacagcaccgagtccatgaggaaggagggcgggtacgaggtgatcaaggcggccatcgagaagctgaagctgcggcacaaggagcacatcgcggcctacggcgagggcaacgagcgccggctcaccggcaggcacgagaccgccggcgtccaacatggacccctacgtggtcacctccatgatcgccgagaccaccatcgtctggaagccctgaggcaccccgtggccgtgtcgtgtcggtttgctccgcgtacggcgctggccgttgcatcgcagggcccagcggttgcgcaactattttcccttccccgttctgtttgcttgtactactactctaccgctagtcctgcatagcattttagctagaacacaacaacagccaaaaaaaagtattgttgcttgcttcgacgcttgcc

SEQ ID NO: 108404 - DNA, 565 bp, Zea mays
  unsure (1)..(565): unsure at all n locations
  Clone ID: MRT4577_30358C.1
ccgaatcgagcgagggagtagagcaaattgaatcaggtttcgtgtcgattcggaggctttcgcttctgcttgcggagttgcggtggagatttgaggcctgcggcgacgatggcacctgcggaatccggggagaatgcgaccagcttcgccatggcctgcagcctgctcagccgctacgtcaggcagaacggtgccgcgtttcagctgaatccgctcgctatcagagctgaatggacatggaagagggggagacggggaaggagaccatggatctcttcccccagatcgctggattcggctccccggctgccacgaaggaagcccctgatgcgaggtatacctctctgttctgtgtggggtttcagttcacagccattctcatgtcatgttagcatggtactattgctgtagtcagttgatgactgaaaacgtaaaaaaaaacaatctacctgctgtgagaagcagctcttggtggccagttttttatttgtcaaacagttgtgcctcagattgatgtagatggttcgatctccacacacagcngttcaacccagatctttgtctt

SEQ ID NO: 108405 - DNA, 2078 bp, Zea mays
  Clone ID: MRT4577_30359C.1
atatacacaacctcccgatctccccttggcctcgcaccacccccacccgccttccttcctgccttcctgccctcagtcagccggagccggattgctcctcccgccatggcgctcctcaccgatctcctcaacctcgacctcaccgactccacggagaagatcatcgccgagtacatatggatcggcggatctggcatggatctcaggagcaaggccaggaccctccccggcccggtcacggatcccagcaagctgcccaagtggaactacgacggctccagcaccggccaggcccccggcgaggacagcgaggtcatcctgtagtaagtgtcatggcacgccaggcttggacgcattcctttctgtttgctttactgaacgatcctttctcttgggcatgtgctgcagcccgcaggccatcttcaaggacccattcaggaggggcaacaacatccttgtaagtttgcacttctaccatccaagtggcatgaaccatacggttccgtgttatttactgctacagtgcctactgttcattggtccaactcagatcagttcatctttgcgaagaaaaaagaattgtgtcttgttgcaccaagtagactaaaagttgtacataccctacaaataaattagatttttttttaaatctgcctgaactatcttgacgcagcaccagtggttcctgacgcaaattgttttaccctgaacctttgttcaagtatatgcaatattgcgaattttataacgcgggtgacattgttgttatgagcgtatatagatattttgttttttgtagctaggtgtgatcactcagtgtaccaaaccatggtttaggaatccaattgtctaatagtagtaggggccgcatttaggtgttgattgaactggtttgaaccgcaggtcatgtgcgattgctacaccccagctggcgagccaattcccaccaacaagaggtacagcgccgccaagatcttcagcagccctgaggtcgctgccgaggagccctggtatggtatcgagcaggagtacaccctccttcagaaggacaccaactggcccctcgggtggcctattggcggcttccctggccctcagggtccttactactgtggaatcggcgcggagaaatcgttcgggcgtgacatagtcgacgcccactacaaggcatgcctgtacgcaggcatcaacatcagtggcatcaacggggaggtcatgccggggcagtgggagttccaggtcggaccgtccgtcggcatctcttcgggcgatcaggtgtgggttgctcgctacattcttgagaggatcaccgagatcgccggcgtggtggtgacgttcgacccgaagccgatcccgggcgactggaacggcgcgggcgcccacaccaactacagcaccgagtccatgaggaaggagggcgggtacgaggtgatcaaggcggccatcgagaagctgaagctgcggcacaaggagcacatcgcggcctacggcgagggcaacgagcgccggctcaccggcaggcacgagaccgccgacatcaacaccttcagctggggagtcgccaaccgtggcgcgtcggtgcgcgtgggtcgcgagacggagcagaacggcaagggctacttcgaggaccgccggccggcgtccaacatggatccctacgtggtcacctccatgatcgccgagaccaccatcgtctggaagccctgaggcatcccgtggccgtgtcgtgtcggtttgctccgcgtacggcgctggccgttgcatcgcagggcccagcggttgcgcaactattttcccttccccgttctgtttgcttgtactactactctaccgctagtcctgcatagcattttagctagaacacaacaacagcccaaaaaaaaacattgttgcttgcttcggcttcgacgcttcccaccacttccattccatgccgtccgtccgcttccttcctgtgtaatcctcctccaataatagacgtgtcatgctgcatcctctgcattgtataaaagtggcgtaattcttttgctacgcctccaatgtctgttgcttcgaaaaaaaaaaaaaaaaaagcggcc

SEQ ID NO: 108406 - DNA, 653 bp, Zea mays
  Clone ID: MRT4577_3035C.1
cctgccgggggattctgcttatcccctcagattcttgaacagatctggagttagttcctacacgaaaattctagggcggtttcctatcctataaatatgcaacttggattctatggtgcccaccgtcagaggagcacatgtttgcggtgctagggttttgttttgtcatctgccacaagcgattgacatatcggaggattggtcatataaaaatcccttaaaagccttggggttggttgatgtgatccatatcaaaagtaggacctgcagttggaaggcaagaagaaaaacgatctgttcataccaagaccattcaaagtcttggagccttttcttttatacgatttatctacagcactgcagttgaaaggcaactagggaaaaaaagattgaactgcattctagaggtttgcaaaattgcaaccgcccccaccacatgtgcacgtcctcactaatcgttcccaccgcttgtcacttaacatcaaccgcctcgaggaactgtcgacggactacatggacgcggagagagacatcaagcccttcgtctcccctatcatggccaccaccatccagcataggcggagcctccatggccccaacgcttctcagccaactgcattggcatcggagcacgatggcactccagtgttacc

SEQ ID NO: 108407 - DNA, 263 bp, Zea mays
  Clone ID: MRT4577_30360C.1
gtccctccttgagtcgcgtggcgttgcaatcggacgatccaaagctgtgtgtgcgcgcacgttggagccatggtgaagaactacccgaccagtggcgccgagttcagcgtggctgtatacagggccaggctcaagctccgagccctcatatccgagaagagctgtgcacctctgatgctccgcctcgcgtgggactccgcggggacgttcgacgtgggccacaggtaccggcgggcaccctggacgacgacacatgagcatga

SEQ ID NO: 108408 - DNA, 315 bp, Zea mays
  Clone ID: MRT4577_30361C.1
ttttgtttttattaacgcagaataacatcccgtcgggggataggttttacatcgagccgtaatccatgctgccagctgcatggggcttctgtaacctagggtgaacacagcactaataattcacccaaagaaaacggggaaggggcaggacaaatgggcgatactgctcattatacgtaataaaatggacactctgggcaaggcgaatcatttaagttgtgtggaataaaacatgggcgctcgggcgattatgttcagattctccatgtaccgtacgaaatgccgtttccgcagacccagatgacaccgccgggg

SEQ ID NO: 108409 - DNA, 248 bp, Zea mays
  Clone ID: MRT4577_30362C.1
cgaccgacgcgtccggtcgtgggcagccgggcatgtaggaaaagtgcttcagcgtcgccaatctccatggagctcaggagcgcctcgctccggcgatgcgcgctgccatcggcgtccccggtggccgcgagggtggggaggaaggaagcgaccagccatggtgggcctgcgtcggggcggggggttcgcggaggaagggcaccttaagtactacgaagccgcccctccgaagaaagccgttgaagccg

SEQ ID NO: 108410 - DNA, 503 bp, Zea mays
  Clone ID: MRT4577_30363C.1
gaacacgacgtgtgtacaatttttgcaatccttcatacaccaaccacacctggcaaaacctcatggaaggaaggaaatcatcaacccaaatgactgaaaaattgggaggcactggtcaagccttctactctgctctactagtctaagctgctgctgctgctggcaccttcagcaggatatatttgttagtacttagtacggtacgggggtgctccttctagtcacttgttcctctggtggtgctgggctgtggcggtggcggcggctgctctgctcgtttggtctctgctcttgagggcaaagcaacatgctgcggaggtggttattggtcatcatgccaggcgcaattgacactgacaaggttagtacgagctccgtcatctcctcacacatccctactgtcgcgatcggacggctcaaacggtcgcggccggaaaaccacgggcgccccgtactgcgggtggaggagcatcaacaccgtcggcgcgtggaggtagctgggc

SEQ ID NO: 108411 - DNA, 914 bp, Zea mays
  Clone ID: MRT4577_30364C.1
caggccgtacctcgagggctggtgcgattccaatttccatccatcccattcctctcccgtcgtgtctgaccttatctgcagcagtgcagtctccagctcttcccacacggccacaccccgacaccggcatggccacatccctttcccttaaatagacgccatcgccgccgagccgcgcattgggatcgtgcggcaatggcggcggcggcggcggcgcacgtgctggtgttcccggcccctgcgcagggccacctcaacagtttcctccacttctccacggggctcctccgcgcgggcctccacgtcaccttcctgcacaccgaccacaacctccgccgcctcggtactgctgccgccgaggctacggtcgcctcgccgcgtctccgcttcctatccgtgcccgacggcctccccgacgacgacccgcgcaccgtcgacggcctcccggagctcatggagtccctgcgcaccaaggccagcgcctcgtaccgcgcactgctcgcctcgctgcgcgcgggaggcggaggcttcccgccggtgacgtgcgtcgttgccgacggcataatgccgttcgtggtcgacgtcgcagaggagcttggagtcccggcgatctccttccgtacggtgagcgcgtgcgcggtcctggcgtacctgtccgtgcccaagctcatcgccctcggcgagctccccttccccgaaggtggcgacctcgacgcgcccatccgcggcgtcccggggatggagagtttcctgcgtcgacgagacctcccgatccagttccgccagctcaccagcacgtacgaggagcccttggttaagcgggcggttggtcgccggccacccgtgcacagctggctgcaggccagagctctcatcgtcaacacgaccacgtcccctggagaggccatccctcg

SEQ ID NO: 108412 - DNA, 302 bp, Zea mays
  Clone ID: MRT4577_30365C.1
taggtaaaactactgttgcaagcagtgtctacaagaaccaaaagatgaggagaacttttggttgtcatgcatgggtcacggtttcttacacttaccaagctgaagtgcttgtgagagaaatcatgaaccagttaatagagcagagagcatgtttggctagtggcttcatgaccatgagtcgcatgagattagttgagattatacagaactatttgcgggacaaaaaatattttattgtcttggatgatgtatggcataaagatgcttggttggttctatcttatgcatttgccagattcaaa

SEQ ID NO: 108413 - DNA, 365 bp, Zea mays
  Clone ID: MRT4577_30366C.1
aaaatcaggttcgagagcctcactgacaagagcaagctcgatgcgcacccggagctgttcatccacattggaccatacggggctttgaacacgctctccatcatctacagcggcattggcatgaccaaatccgaccttgtcaacaacctcgggaccatcgccagttcggtgtcgggttttactttggctacctcgtcgccgagagggtcgtcgtgaccaccaagcattactatgaccagcagtacgtgtgggaattccatgcgggcgggtcggtcacttgttactcgtgacacgtttggggagcagccttgcaggggtactaagattacactttttctcaaagaagatcagttagaataccttga

SEQ ID NO: 108414 - DNA, 446 bp, Zea mays
  Clone ID: MRT4577_30367C.1
ataaaaccggactatggtttttttcccatccttttaaacaaaaaaacccgcgggggggggcaaaatcaacatacaaagacaccaccctcccgccagactgacaaaacccccaaaattaaaaaccgcaccaaaaacaaaacccccccccattccttccgaaacaaggtttccacaccaaaaggtcccacgggcaacgccggaaaaactaatgttcccgaaacacttaaaccatgaaaggggccaaaccaacaaccaaccaaggacgtctggcccaaaaaaaaagcgggcaaaaaaaggggaaccacccccccgcagtttatccccccatccttcgagttaaaacccaaaaaaagtgaacccctgaccaccccttaagttttggcctttaaataacccccaaggactggggctgtcaaacccaaaccccctttgaggccccccccccc

SEQ ID NO: 108415 - DNA, 498 bp, Zea mays
  Clone ID: MRT4577_30368C.1
atggtcgcgccgcgtgcgggccggccacgtccaggtcttcctcgcgtcgacagccgcgctagagggtcgcccagcacgtcgtgcgccgcgagggcgacgcttatgttctggggtggctccggcgagggcgggagcaaggacctgccggtgtgctttggggcgcctggcgcccgctggtgcggtgttgaggtggtggcagccggagaaggcttctctgccgacgagattgccaactccgcctgcacccccgaacctccgtcccctgacttgaatggctggttctcgtccttcgtgggcgagagcccttctgccgcagcatctgcccggaagccgttgctgcagctgtttcgccgcccggggcggaggtcgttgtcgctgctgccggagcgggcgtcggcgagtcaccaggggttttgtcgccccgcaggccctccaacgtggggggttgttcgtacctgcgggggtggaaccggagttccgtttgtaatggcaccttga

SEQ ID NO: 108416 - DNA, 149 bp, Zea mays
  unsure (1)..(149): unsure at all n locations
  Clone ID: MRT4577_30369C.1
cataagnagccttacaatttanattgctggnacgccctattgaaaatttgagggtacatttcatcctggtggcaatgaagtaacctgtttatagcggggggataagnaaanacgataacgaggaaggagatgttcaaaaggtcagctag

SEQ ID NO: 108417 - DNA, 406 bp, Zea mays
  Clone ID: MRT4577_3036C.1
cccaactggaagtgatacccccggtgcagggctcactggattggtgtgtagttatacacactgcacgctgcttcaacacactgatcatggcatcagccttctacaagtttgggtacctgcagtgtaaactgagggcttctggcgcatgcacacaacctacatgcaccgtcgctgctagcggcggcagcggtgttcatgccctatcgacaatgacgcgcaggaactgtaggagccggaatatggctaccacagcaagaggcacgacgactatggacgtggccgcacgccggcgatagaagaacgaccacttggtcaaaggggaggacgaatggcgcagctacctgattccggagaggctcgaaatgctgagacagatggagtcgtgagtggaagagcacgtgctacc

SEQ ID NO: 108418 - DNA, 858 bp, Zea mays
  Clone ID: MRT4577_30370C.1
gccggccgggttccgaaacgcgcgcttcggccctcgccgggagttccacggttccacccccgccggccacactcgtctctctcacgagccacagcccacaggctagctctctagccagtccagtccacgcagcgcagggatggcgtcgttcgccgtggcaacggccccgtcgctagcggccccggcagccaagaggaggcccgccgccggcgtcacgtacgtggagggcatgaaagcctacagcggcctcaaggggctcaacaaggtgaccatgctcggggtgcgcaagaccgccgactactccttcgccaaggtcgtggcatcgctcagcctcgcgggcaggaagcggcgcggaggagcgttcggcgcccagatgaggttttacgcttacacagtggtgacggttgcaccacgtgagcgagcgcagcgaagccagcacaactgccggcggacaagtgtccccatagacgagatccatggcggagcgccggaagagcgtctcctccgtgctgtttgcttcggcgcgcgccgggaggggataatggcagcagtgagctcggtctctattctgcccctcgcgtcgctgaggcctcttccgttgaggcgtgctgctaggaatgtgttggagggaggagggagaagggcttcgagtcccctgctcctcgcgaggtatgggctgtggcgcggacgcccggctgctgctgtgggcggcgaagcagagttggccctcgaagatgcggatgccgcgatgagggtggccgccgacgacgacagcatcacgggcacggtggtgtccgtgctgctcacacttgcgttcgtcggcctctcatcctcaccctcggggtgatctacctgtcg

SEQ ID NO: 108419 - DNA, 585 bp, Zea mays
  Clone ID: MRT4577_30371C.1
tccggccccgccttcatcctcccctcatctcccgtacccaaaaaaaaaacgcgcgctcaagccatcccatccagttccacccccgccggccacactcgtctctctccacgagccacagcccacagcaggctagctctctagccagtccagtccacgcagcgcagggatggcgtcgttcgccgtggcaacggccccgtcgctagcggccccggcagccaagaggaggcccgccgccggcgtcacgtacgtggagggcatgaacgcctacagcggcctcaaggggctcaacaaggtgaccatgctcggggtgcgcaagaccgccgactactccttcgccaaggtcgtggcgtcgctcagcctcgcgggcaggaagcggagcggcggagcgttcggcgcccagatgaggttttacgcttacacagtggggacggttgcacgacatgagcgagcgcagcgaaaccagcacaaccgccggtggacaagcgtccccatagacgagatccatggcggagcgccggaagagcgtctcctccatgccgtttgcttcggcgagcgccgggaggggataatggcagcagtgacctc

SEQ ID NO: 108420 - DNA, 343 bp, Zea mays
  unsure (1)..(343): unsure at all n locations
  Clone ID: MRT4577_30372C.1
gcgtccggtcgctctgcccgcattcccttccatattatctagacgccaggatgacggcacanacgggggatgagctcgccgcccgggttgagcaatagaagctcgaggagcataataccgatgcatatgatgttgtggtggaggatgatgagtactactacgatgaggactatgaggatgatgatgaacttgacggacaagaaggggatgccagcggcaagtcaaagtatagcatgagtgagaagaagattcgcaaagccatgctgaagcttgacatgaatcccatcactgttgttaatcgttgtaactgtgaagaaaagcaagaatatactgtttgttatct

SEQ ID NO: 108421 - DNA, 759 bp, Zea mays
  unsure (1)..(759): unsure at all n locations
  Clone ID: MRT4577_30373C.1
actcactccggcgagcgattccctcgaggccggccggccgggagttccacccccgccggccacactcgtctctctcacgagccacagcccacaggctagctctctagccagtccagtccacgcagcgcagggatggcgtcgttcgccgtggcaacggccccgtcgctagcggccccggcagccaagaggaggcccgccgccggcgtcacgtacgtggagggcatgaacgcctacagcggcctcaaggggctcaacaaggtgaccatgctcggggtgcgcaagaccgccgactactccttcgccaaggtcgtggcgtcgctcagcctcgcgggcaggaagcggcgcggcggagcgttcggcgcccagatgaggttttacgcttacacagtgacggcggttgcacgacatgaacgccagcacaaccgtcggcggacaagcgttcccatagacgagatccatggcggagcaccagaagagcgtctcctccgtgccgtttgcttcggcgagcgccgggaggggataatggcagcagtgagcttagtctctgttctacccttcgcgccgctgaggcctcttccgttgaggtgtgctgctaggaatgtgttggagggaggaaggagaaaagggcttcgagtcccctgctcctcgcgaggtatgggctacggcgcagacgcccggctgctgcttgctgtnggtggcaaaagcggagttggccctcgaagatgcgnatgccgcgatgaagggtggctgccgacgacg

SEQ ID NO: 108422 - DNA, 434 bp, Zea mays
  Clone ID: MRT4577_30374C.1
atctatttctattgccatgcgtaaaaaagcccgcttatgtcagcccggttcctgctcgcatgcacaacatttgcctatagactggttttcaaccaactggatggagtcatgggcacagctgaactctgcctaaaatagatatgcgatgcacaactcccaaccaatacaaggcggatccgtactgaaccacaactgacttgcccaaagcgaggcctaactcacatgcttcgcagccttcatcactgtgcgctatccattcaggatacctgtcgtgctagaatgcataaaaaagatcttcaacctctcgatgagagtctgccacattattgcgctccttgggggcacctgtattctccaatgagaccagcaccattttatttgccttgaatatctgccctttaaagataaggactaaatgtttcaccatcttacac

SEQ ID NO: 108423 - DNA, 564 bp, Zea mays
  Clone ID: MRT4577_30375C.1
cattgggtacctcgaggccggcccgtctctgtatcgctgcaggcacgagcatggaggagcactatctgctgagggcgagagacttctccttctggttgagccggacgacggacgtggacgccacgctcggcgtctagctcgtgttccgcgggggcgagcctggacacttcagggggaacacgacgtacggctccgccgcccgcatgggatactgcgcagatccgacgtggggagacctgtgtctgtcgaactgtcactgccaccgagtatctgctccaaggtgagggctgacagcctggactccggaacttccttgctcgctgggacgacggccataactgccccggtgaaactggcgatgggagaagacggcatcgtgaaatcggagtggatggaaaacgcgatgcgatacaggaagaggatcctggacatgatcgtcggactcatgcgatcctgagagggtcgtgcagcgcaaaggaggatgcgggtgaccaatgcggctcggtccgctacacaagtgattgggtcagtggtgatctgagacttgagcgtatccgatgagca

SEQ ID NO: 108424 - DNA, 826 bp, Zea mays
  Clone ID: MRT4577_30376C.1
gcgcctcaagcactcccatccagttccacggttccacccccgccggcccactcgtctctctacgagcccagcccacaggtaagcgtcgtcggttcacgccgcgttcccatactctgcactacacttcattacagttacagtcacggcgcgtccgccgccttgcatataccggttctcaccgcctgtccgcgctgcccgtcgccagcaggctagctctctagccagtccagtccacgcagcgcagggatggcgtcgttcgccgtggcaacggccccgtcgctagcggccccggcagccaagaggaggcccgccgccggcgtcacgtacgtggagggcatgaaagcctacagcggcctcaaggggctcaacaaggtgaccatgctcggggtgcgcaagaccgccgactactccttcgccaaggtcgtggcatcgctcagcctcgcgggcaggaagcggcgcggaggagcgttcggcgcccagatgaggttttacgcttacacaggtttactggcgacggttgcacgacatgagcgagcgcagcgaaaccagcacaaccgccggtggacaagcgtccccatagacgggatccatggcggagcgccggaagagcgtctcctccgtgccgtttgcttcgacgagcgtcgggaggggataatggcagcagtgagctcggtctctgttctgcccctcgcgccgctgaagcctcttccgttgaggtgtgctgctaggaatgtgttggagggaggaggggagaagggcttcgagtcccctcctcctcgcgaggtatgggctgcggcacggacgcccagctgctgctgttgtgggc

SEQ ID NO: 108425 - DNA, 535 bp, Zea mays
  Clone ID: MRT4577_30377C.1
acagaacaggcacaataattttaccaccagcagtactccgtactgcattacaattcgccaaatccttatttatttaccatacagaggaggccccctcagccatcccatgcttttccttgcccttcgtcttgcttgatccggtgacgagatcgatcgccgtggcagtagcacaccacgcgccattgttggaggagcctgttggacggacgacgacgaacggagccgggctactactgcatggagcactcggcggggaggccctgcgggtagcgcttggggtcggtgcagtagttgtagatcatgtacttgcgctgcacccaccgcatccgctgctgcagcgtgaggtccagctcctggttgtaccagtccccggccggcgctccagcgccggcgccctcggtgccgacggcgccgccgccgccgccgccgccgcagcgcgtcttgccgccggcgactgcgacgcaggcgtcggccctgaatccccggtacgaggcggagaagggcgcgtgggaccagtccgtcttgacgcggccgc

SEQ ID NO: 108426 - DNA, 160 bp, Zea mays
  unsure (1)..(160): unsure at all n locations
  Clone ID: MRT4577_30378C.1
tggaccggcgccgcgaccaccggattacgtgcacacctccgggcgcaggagctacggntacctgacggccgacggccacaccttcttcgccatcatcgaccccagcgtcggcagcgccggcgcgctgcagttcctggagcgcgtacgcgacgcgttccgg

SEQ ID NO: 108427 - DNA, 195 bp, Zea mays
  Clone ID: MRT4577_30379C.1
atggacgtgtgcggcccggctcccgcccgcgcgcgcgcgcgcgtcgtcggcatggcggcactgcacgggcacgccacgaaaggtaatgatttcgatgattcgacgaacgatcgtctggacgaccggccggccggccaatggattcgactcgcgattgacgcggaaagttacgcttcaattattcctcgcaagtaa

SEQ ID NO: 108428 - DNA, 293 bp, Zea mays
  Clone ID: MRT4577_3037C.1
aaaaaacataaaatcaaaaaaaaacaattaaaaaaaaaaaaaacataaaaaaaaaaagaggaaaaaataaaaaaaaaaaaaagaaaaaaaaaaaaaaaaaaaagggccagccgtttttaagctcccaagtttaattccgcttctttccaattccttaatgtttttatcgtgatctctaaattcaataccttgaccttcttttaacactattcagtctggaaaatcctttgcttgctcgatctaattcgttttgtgtccgatctctttttctccagctggttcaatcttaaaaa

SEQ ID NO: 108429 - DNA, 218 bp, Zea mays
  unsure (1)..(218): unsure at all n locations
  Clone ID: MRT4577_30380C.1
ccgtccgagttgagaaaccaactanngcaacatagtaaagtcacccaatagtcgtacccaacccaatggcagcgcgaaagatattttgacttcctttatnngctccttgcgtctttcgtgcaagtgcctgnnntaccgcaaccannttttcccaccaatggctcnaacaagctcnnctatagcnnttcactttctatttcccccaataccctttctca

SEQ ID NO: 108430 - DNA, 709 bp, Zea mays
  Clone ID: MRT4577_30381C.1
tttttttcaagccatatgaaagcaacaataattgattaattaattcgcctaacttctctctatatatattgtcaagccagcacaagaatttgaatggccgaaacaaaaatcggagaacaagtgttaagaaggctactctagatcctatgatcaaaagttataatggaatctcaaaaggtgaagaagaaggtagcagacggaaggaggaaattttcaactttccttttttactcccccgatcgatcgagttcgccagctgatcgatctctcgctcacagatcgagatccaaggacgagtgcgcttctctcttggaggaagacgatgacgacggcgacgaggctgcagatgactcggcgccgcgttgaggcgattcgaagaacctcaacggccccggcctttgccatcccggtgtcctcagcgacaatgcgttggcatcttggcttgactccgcacttgtgcctgattgcgggttgtcgaggttgaccccaaacaggcggacgcgcttcgacgctgccgttgggctgttgacgagcggtaccgagtcgagaagcatgggcacgctggccgtgggcggcgcggggctgggttgcaccaacataatgctgtgcagaggcgggtgcgggggcggcggcggctgctgctgctgcggcatggacgcgcgcgggggcatgccggctgagccgaagaagaggagctgcctggccggct

SEQ ID NO: 108431 - DNA, 280 bp, Zea mays
  Clone ID: MRT4577_30382C.1
aaaaaaaacattttttatttgatttagccaagaacaggttacatgtaagcggggacggaaacaagggatacatacacggccaattagaagaaactggaaatagcagatgccaccctgggggggtcatgcaaggggggggacattactggcctttccggactaacattgggtttaaaacattgaaacacccccgggaatagaagttttaccctaaggggtaacctaacttcttttaatccagacagaacagagcaattcgaccaaaccaccgactttatgc

SEQ ID NO: 108432 - DNA, 499 bp, Zea mays
  unsure (1)..(499): unsure at all n locations
  Clone ID: MRT4577_30383C.1
ccgaacgncncggacccaccagcttgncgctggagaaacatagggcaggacgaggccccatcaagngaccgggggcatgcgcgaactagaagncgnngctgatatcgcggtcttcaagttgagtttattttattggtacgctagtttatcacgtgatgcagaaaacgagtcaactcgactgtaagatgatgtaatgggtgggggactccacaaggttttttttttggatcaacctgaagaagaaccgactgaacaagtgccaacacaaaaggatggtccccaagtggtcgtcgtctaacaaacacttacgtagtgttattccagaaggcgagaatccagatgtgacgtgcgagtgaataccaatcagcgtgaacagtacgatgtcactgttcatctatttataagcacagaacgcagcctgtgtagaattacaaccatgcccttaacagttactattgacttaaggataatatatcgaggactaaacagtcttttcccc

SEQ ID NO: 108433 - DNA, 432 bp, Zea mays
  Clone ID: MRT4577_30384C.1
aaggacaatttttacagtcactattttatacttgaaatctgtcatccagttcaggcatgggcggaatgttccgaggatcaaacgggagcaaagagcaagagcgaccatgaccaccgtgcgcacatggttacacaaaacacttccaagcccctaaccactgctcaaagaaacacgaacacagaacaattcatgttgcagtcccacactgcccgacttctacaggctacagctgtgtaacctctatggaaggataggctggggaaaagagaaaaatccacgtgtaaacgcctgcagcccgcatggtttattcatgactttcagttaaaaccgggggggcaagtcggatgcaccatgcttactgggggcctaagcgaagagaggggcatagatgaaaaaaccgcggctttaaatcctatgacacacatatcctga

SEQ ID NO: 108434 - DNA, 417 bp, Zea mays
  Clone ID: MRT4577_30385C.1
caaagttaatttattttatgaaaattaattaaacaaatgcggagttattttcttttttcatttcagtttgcaaatctgcagatgtaagaagcaccttgggtgatgaccctgacccatctctgtggattcaaagattttcctctctcaatgattctgaggaatctgatctgaacaggagaagggttccacatgggtatctcgaagtccaagttgagaggacctatttctttgcgaatgtcttcacatccttgggtgagagaaatcttgagcctcagctcgtgttgtgtccttccctggaatttctttattgcccagtacacagtacgttcgtgggctttgtactcaagagtttgtccttggctttgaggatccgttgtttctaattctgatccgatgcttgatgtatgtttggacact

SEQ ID NO: 108435 - DNA, 158 bp, Zea mays
  Clone ID: MRT4577_30386C.1
atattcactgtgcgtaatgtgggaattcgcgctaagtttcagtttgataagaactgtttggtcattctttggtctgcagatgagcctaatagccttgcttgtgatttgactgccattagccttggtactagtgatatagcgtgtcgggataacaacag

SEQ ID NO: 108436 - DNA, 638 bp, Zea mays
  Clone ID: MRT4577_30387C.1
actattctccatggcacaagcccagagctctctacctcctcgggccgcccctcctcttcgtccccacctccggcgcgaggactcacactctccccactcttctcagcccctcctcgtcgaatcagtcgccgaagtgcccgaggatccgctcaagctcggcatggtcgttgggtgcggggcgaaggccgacgcagaggcgcgggactcgtctccatcagatcggcgggcgtggaaatcatgcatcgcaacctccgcgcccggtgccttcctctccatctcgcccgtcggcggctcgcacaaccctttgatgtgccctgccctgcccagatacggcagcagtgccgcggtggctggtcccctccaagtgcaagccggcgccattagaaaatccattccccacttcagctttcatatctgcttacttctgatttgagttactccccattacccacttctgctaatccctaattgctatccattcctgtatagtacatatgtagctcagtagtctaggtttaagcatgagagtcattttagaataggggagaaaaattagaagttggggtgatcctattttggtctgcctaatcttggagtaagttgttcgattagacattcttaacttagttgcagcaact

SEQ ID NO: 108437 - DNA, 703 bp, Zea mays
  Clone ID: MRT4577_30388C.1
gttccgccgcccccgaagaagccacccgccgtcgccgcctcctcctcctccttgcacgcccgccgaggttggtcgccggacgccatggctcccaccaagaagtcgaagaagagcacggagaacatcaacaacaagctgcagctggtgatgaagagcggcaagtacacgctcggctacaagaccgtcctcaagacgctccggagctccaaggggaagttgattatcctcgcaaacaactgccctccgctcaggaagtctgagatcgagtactatgctatgctgtccaagatcagcgttcatcatttccatggaaacaatgtggatcttggaactgcgtgcggcaagtactaccgggtgtgctgtttgagcatcctggaccctggtgactcggacatcatcaccaccgttcctcagtgaagacaagcttacctatcctagcctaagatgatgtagtgtggagagtcgtgcttacaaggtcgatggccgtctctcgttatcgagccggagctgccaaatgcagtttcaaaccaaacgtggctgtttttgtaaggcattcctatgggttttgtttgatgagatgtttattcctatcgtctttttactgtgcgcaattggatgattagttctgtcaacattgttttgcctatgctcctccagtgaaacggaactataacaactagagttgctaaagtgaagaattgcg

SEQ ID NO: 108438 - DNA, 251 bp, Zea mays
  unsure (1)..(251): unsure at all n locations
  Clone ID: MRT4577_30389C.1
caaaaatatccgtgcgaccccgacctccccccgcccactgcgggcattatcgagtttccagcanacatggcgatacccgcggtggttcccgtcgcggcggcctactcgtgctcctcctccctcgacgcgccaccgagggccgccgtcgacgaggagagggcgcctagccgcgcgcacgtcacggcggtcgggatgtgctacagggcgttctacttcgtcggcggcaacaaatgcaacctcgaggccgtggc

SEQ ID NO: 108439 - DNA, 352 bp, Zea mays
  Clone ID: MRT4577_3038C.1
aattcccgggtcgacgcacgcgtccgcccacgcgtgcgcaacaactcgtcctcgtcgtgaacaaaacccatacctcacctcctatcacaatgcctttacatgcgtgcttattttgttccttctcttttgagctaccattacatagttgcaaactgcagaacggcttttcgcatgtgaaacccgtttgaaaaaaataatcggctttggataggggtttggggtcctcctttccctgaaagaacgcatcggcgtgctgctcgcggtcaagccgtgcctgtcgccttgcggttgcctctagcgtcatgtgtaacgcggctatgcccagtgaaataacgtttggtccttgtgtttg

SEQ ID NO: 108440 - DNA, 428 bp, Zea mays
  Clone ID: MRT4577_30390C.1
tcgtttcagcgattgtctacataccttactatgtcattgcattcaacatcgcggcttcctaactgaggcatgcctactactgctttgagtccaccagcaacttatttgcatcgagtctgcattagaggcttgactcctccaaattaaactcggcgcacctttgctacaatttcagctcgatgcctacatgaactcgtcgctgtcactgctcttacaatctacgccttcttcgctctactcatatctcgatgatcgcatagactgacacaagacctcactcagatccagcaagaaactccatggaaaccaatgctggtatctgttctactttctgtacctgctaggtttgatacgataccactgactacgacaatacattctctgtttacgatcaacatgagtagacaaatatatgatcacaatgactc

SEQ ID NO: 108441 - DNA, 223 bp, Zea mays
  Clone ID: MRT4577_30391C.1
cgacacctacacacgaacgtaagctcagaatacgacacaatcgcgtcgagcctcacccgctcagtcacaaagcctcagatctcagacgcctacgacgccgcttcgttcgtgtggaggggcgaagacaggcaatggcggcgactgagggcgtgctcttggggatgggcaaccccctactcaacatctccgcggtcgtcgataacgccttcctgacaaagtatga

SEQ ID NO: 108442 - DNA, 1809 bp, Zea mays
  Clone ID: MRT4577_30392C.1
ctacggtctccgtttcgcggacgtttctacggaggaaggtccatccttctccctcctaggctccgtcggtctctctctttccttatccccggcccgtggcccgtgctaacggcgattagggttccgaatcgtgtttaagcgctgcgaaatcaccgctggggcttcgtcctcgagtcgtcgtcctgctggatgtcacctcgtgtcccgcgccgacgccagtgcccgtcctcggagccgcctctctccgacgatcgccggagacggatacggtcgaagccgtcactgcaggccgcgctcgtgcgccgtagcagatgtctagtagctccaacggccattatcctgctaatggtgcaaagattcttcatagaaaagaaaagaataaagagaaagtacagctcgacaaaaattcagccacttgggtgtgccagaaggacaggcattatgttgaaaaattagaaacagaattgatgaactgctatcaggaaattgactatttgcaggatcagttaaatatacggagcgttgaagcaaacttcatgggagagcacattcacagtcttgaactgaagctgactgaacttgaaaagttcccagaaagagtgagagcgatggacaatgagctgatacgatctgattcccagtgctggcttctgatggaagaagtcagatgtaaagaagaggagttgcagaaggcagcctcacagatagagaagcttgaaagtacagctttagattcacaatgcgaaattgagagcttgaaacttgatttgactaatcttgagcagagactatttgacgctgagagattttcccaacatgctggtgagcacaaagctcaatttgacaaactactgggagaacatgagctccagctacatgaagcacagaaaactattcatcaacttgtatgggagaataagcaactgaaggagttgttgcctgtaagagctcctaaacaatctcctcctggatctggatggaaagttaacaaaacattggagaacggtgtgcatgcagaatgcgaaagtggcgatgtaattcttgaaaatatggcaaaacgaaatgaagaatctgaacttctaattgagcagctcaaggaagagcttcgagaacaaaagttaaaggcaaaagaggatgcggaagatctcacccaagaaatggctgaactaagataccagataacaggcatgcttgaggaagaatacaagcgtcgatcttgcattgagcaggcagctattaaacatattcaggagctggaaactcaggtttccaaagagaagacaaaactgagtggggcacttaagcgattgcaggaatcacatgaactagctcgcacacaagctatggagattaagaagttgaaggctgctttagagagattgaattcggtgacgaacctgggtacagtttgcaaatcttgctcttgtgggttctctgcaatgttggtagagctgtctaattgctcgatcgaaggaccttcaggcagcgccagatctctcaattccaaccacattgatgagaagtcacagaatcaggctctaatagagtggcgtccccgtgaagcctcagatgatgaaggtgggtaggaaggtagatgcctgtacattcatgtgtgcaattggccaactgttgtaaataattctttgtattccccattgttgcctgtaagactgtaaatgcatatgcatttgttgccttagctaacaatgggagttaagctccccaggaagtgaaaatgtcgccttaagatttcacgcatgtaatgaaatttaccagcaaggatctgtcatcaaaaaaattaaaaaatat

SEQ ID NO: 108443 - DNA, 127 bp, Zea mays
  Clone ID: MRT4577_30393C.1
gtagtctggacgagacaagacgatccgcgcgggccttatccggagcttgttgtaccccatctcattctactgactccacccacccactcgtccggtgccttcgtcggatcttgtctgactcggatcc

SEQ ID NO: 108444 - DNA, 909 bp, Zea mays
  Clone ID: MRT4577_30394C.1
gaggtatcctgccctgcagttcctcctcggcggaaaccaagaccctagctctcgtcgtcgtcggcgtcggcggcggcgaccgtggcggatccgacagccagccctcgtcgcagccgggccgccattgccgtcgtccagctcccaagacggcgtacctccttatgttctccagatccggaaccgtgcggatggtgttcggggttcggcgaccggaaagaaaaacgttttggcccggtctcagctacgtacttcccttattctttgaccaagcctactgaggagaggaaagagcatgatcgcaagagcccggtgacagcattggaggtctatcccagcaaaaaaacagaccaccgatctttttgataagaaacctcatcgctgatttacggccagcgtgtctgcatcggctcgatgaaaagtgcgcgtgaagtttctatcatcattggaagaccatcatcggtgttgaggtcaactgcaagcgtgccaatcaatctcaccatgccacacgagccgaggccaccaaccacgagccctgctgttgcggcatggattgctgtgtggattgcaacgtctttggtgaggtcattcgttgtgatgtgcctggcggcatgaacatctcagaggtggatctatggaaagaggagattggaaggctacgcttgaaagagagacgaaaggttgcgctgtgggatagacgaaaggttgtgcctgcgctacatttgggaactggaggaaaagtgaaaagaatgatgcattttctttgtgtaatcggtggtcatggtgggtaattatcccctaaatttatgagggtattggaaagtagtgtttgtgaagcaccatttttattgctttataaaaaacgtgaagtcaaccctaacttcacatttttttagtgaagctaatttattg

SEQ ID NO: 108445 - DNA, 184 bp, Zea mays
  Clone ID: MRT4577_30395C.1
atgtcacacagacgtgcgtgcagttacgagctacattgaaggtctaacacacattggcagcgaggtatactgcattcacatgtgggcgccatgagagagctgtgcagacacgcgcattccacgatgacgcttcacacctgcatacacatcacgttgaagagcgcatttctccaggacgacgcca

SEQ ID NO: 108446 - DNA, 602 bp, Zea mays
  Clone ID: MRT4577_30396C.1
agtccacataccaccatccaccactcccaagacactacctagtcctacgagcaggcgcacccaagtgtcaagagacaaaacgatctacatgaatagtacccaatctgacgaaatgaccgtcgaggtggacgcgtcgctgctgctggcaatgcgaagacgacatccaagaccgccatcacctgcccccaggagagctccgccatcatcgtcccgcctctcctacgtccacgacacgcggaccctcccctacacgacctgctgaagcagtgcaaccaacctctagagcgtcgccatcaccgccgccgacaggaacgccgccagaaaatgcctcccgaacgccacaagatccagcaccagcactcagaaccggaaactcccccagcatcccctccataagggggaccacgatacactacacgagaaccacctccaccaagtgcgccacaacaaacaaagacctacaccacgcgcgatgaccaacgactgatcgagccactaagcattccagcggcgcctccctatgtatactagaacaacgcgatgatgatagccacgaatcgacttatgaggcaacctagctagcatgtctactgctatgtact

SEQ ID NO: 108447 - DNA, 837 bp, Zea mays
  Clone ID: MRT4577_30397C.1
agttggagaacaatgagaacgttcctctgaacgagaatgttgctctgaaggtggctaaactgcagagcaaagtgcatcaagagcaaccaggaaagctcaagaaaactaccaaccctaggccattcaggctaaggactgatgaaagaggagtgcttaaagaagcaaaaccagagaaaaggcagccgttcactgagaataattccacggcagtactcaaggatgcaaacagaggagtgacgaagaaacgaagcacccagattgtaacggctcagcagctcgatgagtccagctccaggccggccgtcaacagcatccaatgcagagctgtgaaaccggagagggtttctagggttgcatcatcaacacgaagagccaaaacagcaagtgaccttatggcaccttcttcccggactgggaagaagaggaaggcggctacggtgaagctgtcgaggatccaaacaccagctgcttgagctcgggcagatcaaggaggaaatgagaaactgccgacaacggtttttgttgtctgctccagcgacgagttctgtatttattactgcgtcgaattcgttttccggattaggtggatttatgtacactgatcatttctttctgcgagtcgtgtggtggaacccctctgctttgttaatgtaccgccaccgaccagattttttcttcttctgtagaatgattcagaatttgattatttttctgtaacttaattgaactggggaaaggaggcccggcccaacccaacccatgaaacatttcaattttagctgtgtactaggatccatttcatcttgctaccatgtgttgttgcccttgatagatatc

SEQ ID NO: 108448 - DNA, 200 bp, Zea mays
  Clone ID: MRT4577_30398C.1
gacatgaattcgatgcactcatcaatggcatctactctcttcgcttgctcgtagttgtgttcctcctcttcttctatatattctacttccgtcaaattctccttatacccggatagaatttctcttccgatcgacggatacagaaaacatgctttcggcccaattcgcaggctgttcaatgtcattgctatggctcccct

SEQ ID NO: 108449 - DNA, 464 bp, Zea mays
  Clone ID: MRT4577_30399C.1
ataaaaacttcaaaggcctcgtctggtccatggggaaacccatgccctttgacaattgacatcaaacaagggaaaacccagggggccgaaaaagaaacacaacttattggggggcccaaccccaaaaatttcccccctcaagggatgccgaccaacaaagtttgggcatgggtttatttgccagccacaaaaaatttgaacaaaaggattgctgaaggccaccgctataaaatggcaggaaaacatggcccggacccccgctgcttgatgctggccccaacgggcgcgaaaaccccagcgccagcattgggaagccaccccttcttgacctgtatgttgttgggagccaagaaaggcccaaatgaccaatggaagttgacgtccacctttttccagccaaccttttgaaagccatggggcatctccccctccacattgggggggaccccccgggattttcccgg

SEQ ID NO: 108450 - DNA, 579 bp, Zea mays
  Clone ID: MRT4577_3039C.1
cagcattgctgtggagcgacattagcattgggctgctgtagatacaagactgtgaccggagctttgatcgtacggtgtaagataagtggtaaatgacggagcaaccacaattatctctcctgacacacaaagggtagggccaaatcacatgcttttctagattattgtaacacggggaactttatggtgaatggaaaattccaagtagcacggctcgtttatgggggacttaacgatattagacattgaattcaatgtcaatacaaataataaattgtttgaccagctgatgaagttagatcctggaccgtcgtcttgttgcatatgacgacaggactgacattaatatgagtagaatgcacaagcattacatagaatcgatgtggtgtggcagcaaattctatgaaatttgcctgtgatgtctacacatcgggagtcagtctgtgctgtttatgctgatgctatttcaaatttgagaaccaaacttggaaattaactagtctatcaagatccgtgattttaatgtaacgggtattagacgctgatgaataccaaactactgcagttgttcatgaccag

SEQ ID NO: 108451 - DNA, 504 bp, Zea mays
  Clone ID: MRT4577_303C.1
aacagaaacataaccggatatttcatagtcaaaccggaatttgcatggtttacatacagaaacagaaacagaacagaagcctcctttgccagcttctcgttgctgcttccactaagtaattaacctttaagcctttaggtggaaggcaaaaggtattacttattgaaaggagcaaaaagaagcttagagcaaagccaaaaggcttttcccctatatctatctaatcactttttaaacaaaattacacacaacttcatacattgttcgatattataccgcaaaagagccagtctttttttttactcttacttggctgttcacgggttttcggagaaaccaccggactcgagtgtaccatttttaagatactttgacttgtagaagttcattttctttggggcaattatctttgttgctcccaagacacacttgtggtatgagaagtcttcgaatgtcccgtctattcttacaacctcgaagcacaagaaactccgtgcttcgatt

SEQ ID NO: 108452 - DNA, 448 bp, Zea mays
  Clone ID: MRT4577_30400C.1
gccatacggagtccagacgtggcggtttgactttctgacctcggaaccgatcgaaggcgccttccgtgggagaattcccggacgattcttggagaagaaaccgcggattcagggccggcagaggagagcgcgcctcgccgttgctaggatttttgctcccgctctcgctccgatcgaggagaactttattaactactgaagataactggtagcagcatagcggaatgaaggcaccatcgctgcttgttcagtgtttccctggcttgcttccaagcaaggccactagttgtgtgccgattatatcagagagggatctgcatctaccatcaccagctgttgaactaatcccttcaaagagtgctcatccttacaaatatgctggagagaaggtcgatgtccaaggtcttgatgttttcaaggggaaggtcagtgcagcagatatgatagc

SEQ ID NO: 108453 - DNA, 252 bp, Zea mays
  Clone ID: MRT4577_30401C.1
cgctttgtttacaaataattccctcatagccacctttcggcgtcgccgtcgccgctcatcttgccgagaggtgatgggaccgatgaactcgcctagttctaatatagataatcgcttttcacagcctgaggtctgctgtgtaaggtggtgttgatggagataagtttaaaatctgttccacatatcacgcgtgcacactcgctaatcataggttccacacatatctttgatgcttcgaatattttgtactaa

SEQ ID NO: 108454 - DNA, 666 bp, Zea mays
  Clone ID: MRT4577_30402C.1
tcgagtttttttttttcttttttttttttttttttttttttttttttttttttttttaccggggaagcgggaatcagttaactcatttggatagcccacgggaccaacaaagtggaccctaaccaaagggaccctttttttatggggtatgacctaagcaaaaataaaagggtttttttacggagatggaaaaagagagaaaaaaaaataaagggcccatttgggcagtggtttttttttttcacctcaggaaacgagctgaaattttgtccaaccaagtaaacccaacccttcctggttggaaagtcaaaggagggggccagcaaacagggaaaccctcccacaggaattggggttttaagctgacttcccctccctaaaaattttcgccaccatctaatttggcccatgacgcggaccgtttaaaaacaggtttaaacatcgccttgtccttttccagggggatcttgccaagaggggaaggatcttccaacagcttttgggggaccaaataccccgggagggaccaagtcgggaatttcctggccggttggccaacataccgaccaagtttccaataatagaactcgggccagccatctttaaaaagccttttttttgttagggggattgttctttttgcaatctggggccgcccagttttga

SEQ ID NO: 108455 - DNA, 628 bp, Zea mays
  Clone ID: MRT4577_30403C.1
cccgggggcggacccacgacgttgcaggcgccacggccgagtacggctcatcaggagccacggacacttctcgcgccacagacacatatgctgcttggctaggcaagggctgacaccatatcgcttcattgcctgcgccgactttttgcgttgccgtcacgtcgccacactctagcgtgggtccgaccacccaccgcacggctttctcggccttggcgctgtcttcagcgagcagaccacccgtatggcctccgggggaccctcttccgagtttttgaccaaccgagcgccagcgaggcaaagcgttgtcacaactaagcagatcttcatgaatgtctagaggtctgatgagcctccttataagcctgatgactgcaggcgcttagacgaatgataagatactctgctctactaaacatccacgtgaagacactcacattgattaccaaccaatacaagctctcacagagtactactgtgaacaacttcctgcaagtgatactcatggggcggccattctggacatgtgcagcgcatgggacatccattattctccctgttacatacaaaagaagatcgtgccgatgggtatgaatgaagatgaactgacaaagaactttgtactgac

SEQ ID NO: 108456 - DNA, 278 bp, Zea mays
  Clone ID: MRT4577_30404C.1
tcgcacgcatactgcatacacaacacagagcatctgaaggagctacgatctgatcgacatggctgccgtcaccatggctatcacctcccgcgcgctcgtcggcaagccggcgctggcacgagggacgtcttcggcgagggccgcatcaccatgcgcaagaccgccgccaagcccaagccggcggctggcacgagggacgtcttcggcgagggccgcatcaccatgcgcaagaccgccgccaagcccaagccggctgccggaggccgtctagatcgcga

SEQ ID NO: 108457 - DNA, 175 bp, Zea mays
  Clone ID: MRT4577_30405C.1
cacacaaaaaaaaccatccttatataccaaaaccgtacacatccaaacacacttccaacccacttttatcctttccgctttttttacatcatccatcccctagcccaccccattcgtggcatccccaactcatagacccttaacatccattcatccatgtccaaccccccattct

SEQ ID NO: 108458 - DNA, 165 bp, Zea mays
  Clone ID: MRT4577_30406C.1
aaattctaatttttttgcaatactaatcaaaaaagaggaaaagggataaaagaatacatgagagcaaccaaacgcatcctgtattgcccagaaatatgcactagatcaaatacaacgaagtcatcactcacacgcataccaggtcgattaccaccaaggcgccca

SEQ ID NO: 108459 - DNA, 231 bp, Zea mays
  Clone ID: MRT4577_30407C.1
ttttttttttttttggatatgcaatctatcgtcgttgatacgcttcattatttctagaacacgtttgctatttagataatggcactcctaacatagtgcagtcctacacaacaaacataaacaagacatcgaactgaaatgctagaaacctcaaaacgtaataatgttcgtaaaactccaaccaaaaatgagagaaaatttgcatagacactgctttcatccgtcgatatg

SEQ ID NO: 108460 - DNA, 260 bp, Zea mays
  unsure (1)..(260): unsure at all n locations
  Clone ID: MRT4577_30408C.1
aagccaggaagccagggcacgtttaccgacgcacgccaccaggccggggcgcaccataggcgacaccgaccccaaccgggagcaggacgccacccacggcaagaaccgcagccacgacgacgcaggcgacggcaacgccaacancancgcgcacccagccgacancacgcccgngngcacgacggagnaggcggggagggggggggggcgccaaggagccgagaagcgagccgagaagccgcagggcaaagagggcgacg

SEQ ID NO: 108461 - DNA, 445 bp, Zea mays
  Clone ID: MRT4577_30409C.1
gtgaaaaggacagtaaagttttctcggtgttggactcgatggggctctcatcgaaccactccaccgtaagattcgtgccttaaaaaaaaatccttttggtggctaaattgtgactgcttcgtagccccacatttgtacttcaatctacaggctgcccgatacctgttgcgaatgatccaaatgctattgccatcccaaagaggactcccaacacaatcgtgaagaagttgtcatatataaccgttgacaagcaggacaaagatccttcaccgctgtttggagggcaccaaaactggaaacagagggaggagagctttaaactgaactctaccatgaaggtaactacttgcctttagtttgtgcatgtattgtataaacttgcttgtacacttcagtttaacttttatgctatagcttttagtgtgagtggcagtgagaggctaag

SEQ ID NO: 108462 - DNA, 136 bp, Zea mays
  Clone ID: MRT4577_3040C.1
gggtacctcgaggccggccggcgtcgtctttgccgtctactagctagctaaatctcgatatccagttcctgagccccaactcagacgtcagctatggcaggaggtctctagctacatgctcccaacctaccatcag

SEQ ID NO: 108463 - DNA, 105 bp, Zea mays
  Clone ID: MRT4577_30410C.1
tgtcctgccggcgtacaagcttatcctaatagcgagtcctatgagaactgcgtcctaatatgggtgctgctgtacggacacataatcgtgccggcgttgagggga

SEQ ID NO: 108464 - DNA, 666 bp, Zea mays
  Clone ID: MRT4577_30411C.1
gaacaaacatatgtcactggaatgccctgatgctactaccacctgtgttggcttcaatcattctatgtcagctacagtgtgctcacacttgctgttagtcatgacatgcttaaaaaaagtttgtcattgttgtaacccacctctcttatcttggtcctggtaagaggggtgcttgtatggaccatttcccctataatacctatgtgttcagaaaaaaagtcatgacaatactatttctgctttgtttgtggcaatgcattccacactgatttaggctactctactatgctcaagttcagtatagatgataaacaccttgcagatgttacatgtatttatttgttttcttttattgaactgggaggtaatgagaaacaaagagatggaagaaagccaaatagtgatgaataagaaaaagagaaggaagactgaaaacgggaaagctatatttagttggatggcaacatcatcaagggatgggctaagttttcaagttttaatacttctaggttggtgaattactgtaaaagaatattgttagtaacttcaagtcatcttgaatgtgatggtgattaattttgattcagtaaaaaaaattcctctggtcagttttgttatgaacttatgatgcatgtttgaaaagaaaataatggcctgtgcttatct

SEQ ID NO: 108465 - DNA, 297 bp, Zea mays
  unsure (1)..(297): unsure at all n locations
  Clone ID: MRT4577_30412C.1
agaagacagcaaaagcagttaactataaccacgaatgaaggtgtgacatactacttctggctattttgatctatgtagtttaatcaatataagttacctaaaatccccatatggtattgtgtatttaattatactaaggtattgtattatcatcacattaatagattccatcagaatatgcatttgccacaagatgcatatgcatgtgtgactcgcaccattanacatcaacactgtttcattttcaggggcatcgctctctcccgtgggcggctcgggaggcgaaaccctagccgc

SEQ ID NO: 108466 - DNA, 213 bp, Zea mays
  Clone ID: MRT4577_30413C.1
cccacacatccgaagacacggttatgttagctggcggcactgcactaccgtgcgctggcgtgatatcgcacgagagcccgccctagctagagccaagcataggcctggctgctgctaatctggcgacgctcgcgctgaccatgctcctggcggaaaccgtggagcatcccccggtcaatgtgcgcgcgtctagttccacctccaccgtgtaca

SEQ ID NO: 108467 - DNA, 1049 bp, Zea mays
  unsure (1)..(1049): unsure at all n locations
  Clone ID: MRT4577_30414C.1
aatcatataatattatcaggacatttttattataatatcatgaatgaatatgaacaatatcgaattacatttataccttcatcttgacagaaggtaaaaggctcgagagtgacgtgcaagcgaatacaagtcaacgtgaacaatacagtgctactgttcatctatttataggcacaagacgcagcctgtgtaaattacattcatgcccttgacatttactattgacctagggataatctatcaaggactagacaaccttttcccctttaggtcggttccattttttgctgttaagccgaagcttctccacaggtagcttcggaactggttcatccttctcccgatccctgctttttatatcatgtatagcttcatcccaaggccgaaggtcccatgctaaatatcacgacagcttgacgacgagatgagcgagacgtaatctggtgtggaatgagctcagggtgacgtcggcgttcagcagctccatgagacgacgcaccagagcaaggaaaaatgagtcaggtggcggattccaagcgcgacgaggaggatgttgttcagcgagtgccgcttgaggctgtggcggtgttgaatgcgatggggagcaggtgagcagttgtaggacgctgaacgctggtagatgtagaggcaaggacgagcgcgaccagaccgaacgcgacgccggcgtccagtggcttgagcggatgcggcagggtgtaggcacaaggacgagtagcaggggcggctgggcttctgggccgcgacggagacaagcagggctagtggtgtccggtggctgaagacgactacgccgaccgcagcagggtgccgagctcgcgactgatggagcgaatcggccaaggatgatgtcgcccaggcaaggccgggcacggacaggagcaacagcggtgggatttttttcctaggaaccagaacgcttgcttgtgatgtgagaagnaaggtacgaaacttcactccaagtattccagcaccaagcacggagataaggacggtgtgggagagaacgacctcccggccggcctcgaggg

SEQ ID NO: 108468 - DNA, 786 bp, Zea mays
  Clone ID: MRT4577_30415C.1
gccgggccggggcttgcttcctctactactctcctccctcttggctcttgcagtgcaggcctctcctccgatccctcccacggtctcaccccaccgcctcgaccacacagctagcttaattagcttgcccctcctcacgctctcctcgcccgaatggggttcacggcgagctataggcggagtagctggccaatgtgcggcggcgacagaggaaaggtgcggctgcggctcgatggaaggcagcacacgcacaggtaggagaagggcgggcgtgcgaccgagcgtgcaccattggctcccactgcctgtcggctggaactcttctgctcgctcgacccatgagctgagcgcgagggaggaaagacgacgacgcagatggttcgagctagcttccgtggggaattgaggcttgatggtccgagatatatatataaatatctcttaggtatcttaactagcatgcagctgcttgtactaatctagattttcctagctagctacatcattttcatcttcttctcccccctttcttctcttctcgttctcccctgcgcttctttgttactgccattctgagaggacgcgcgtccaaacgggatgctcttgtctggctacctcctcctgctgctgctgcagtggcagtgccaaggcatctccgagttgtcctctaagtgatgtaataacaattaatattgttagaggcactatattaagtttggaatgctacattctgcaatgcctgagtctctctaactttcagttgccctctcaaaaaaaaaaaaaaaa

SEQ ID NO: 108469 - DNA, 327 bp, Zea mays
  unsure (1)..(327): unsure at all n locations
  Clone ID: MRT4577_30416C.1
gctttatattgattactgcatttgatacagaattagatttgagaacagaatctttaccaaaatttggaaagtacaggctatntagagaattaagaagttgttttgacctgactggacccagagactactcatcaccagaggaaatggtncagagactaacatnagcttctagtgcactgaggggggtggggggtggtncagctcttcaggactgtcaagagaataatgggtttggggacttgatggatgaagatgttttgaacaatgtttnagttcgtttgaagtttagtcttactgtttgggatttgagtcttgcggtgacacctt

SEQ ID NO: 108470 - DNA, 444 bp, Zea mays
  Clone ID: MRT4577_30417C.1
ggggggaaatccagatgacagaggaatatgaacataaagcatgggcgaacaaactcatccaccattaaacaaataccaaggcataaccaagcgctaaaaggacttttaaagggcaggggtggccccaaaaaattgggttgccagcaaagggtaaaaaccccagaagcaaggagtagtagtagtatgccaaaaaaaatgcttaaattaggggcagggaaaaaattgttaactggaggcatgaactcaggagttttggcgggcaaaaaactttttaagccatgcatggggaaacgtctcccctcctaaagggtttaaaaaaaaacaagtgccctccctggcttgttaaccctgacttccgggttgccagggatgttccggaaaaactgaaacccgcaaatgccgacgggcacccccgttgccggaaaagggggtacacctcgggcc

SEQ ID NO: 108471 - DNA, 192 bp, Zea mays
  Clone ID: MRT4577_30418C.1
gagctcactgacggcggccgcccttacttcttttttgtgggtttttttttactttgggggttttaaatccatttactcacatattataggggaaaacctcatacagttactagcatagcataaaaaaacccttacacagagaaaacctgctttctacttacacaaggaaggaaagaaaaccttgagccgaat

SEQ ID NO: 108472 - DNA, 239 bp, Zea mays
  Clone ID: MRT4577_30419C.1
ctataactcacggcctgacctctgggtgtagctcaaatttctttgatgccctttatcgaccgaacgcttcttggtgcttgtgagccaccaactgcatctgttcaacatatcacagtaccaggctgtctcagctatgtggctctccacaacctagagcctggcatgcaagtcatagccacctgacactgctgcggacgattgtaagctcactcggtcagacctaggccggttgcgctcac

SEQ ID NO: 108473 - DNA, 560 bp, Zea mays
  Clone ID: MRT4577_3041C.1
aaaaaaaaaaaaaaaaaaagaaaaatgaagaaaaaaattttagagccgtcctcgaggttcagctgttgtctcgtggagtgagggggcatagcgggctgctgggtgtcatggtgatcggtgcttgactgcgcgcaattgtctgtcccgtgaccataccacacaacatcctggcctgcataatgagggggctagcctgcaggtagttactgagggatcactgtcccattattatgtggtgagctcactgctcgcctgtttcagtaagatgaaatccgtgccagtcgctcgcgctggcatgtagattgatatacgcggcatacagcgcagcgtgtagaggctggcctagtcgtcactggactgctctcttcctctggccttagttgacttgatgtcgagtgggcgttgtgctgtttcagtggggggagtagggtcatctacctaataaggggctataccgcgatcacaccatgtgatcgcataaccccggaaaggccatgatcccaaaaggcggccgggcaggccgccgaaccgtccatagggctcgcgggctgttgtagttt

SEQ ID NO: 108474 - DNA, 255 bp, Zea mays
  Clone ID: MRT4577_30420C.1
acgctaccttcacgtacgccattaaccaggaggaagattatcactcaccctcacgatgggagagctcctctacctctgtctggcgcacgccctctttttatcctcctgctctccatacattaccgcttgacccacttatgtaatagatacctgagcttacgactgccataaaatatatttaccccaccaacagataatatttctcaacccacctgactatacggatcgagagctaatgtcgctgaccccatgaac

SEQ ID NO: 108475 - DNA, 484 bp, Zea mays
  Clone ID: MRT4577_30421C.1
attcgggacgagggttgggtccagagccttccccttttacaaatccactctgctcctccgacgacaccggggtgtttccctctgcagccaatatgacagatgcaccactttctgacgtgtgagaggctgttcaagcacgaacattacttccatagctcggccaatcacacctacctgaaagggcgctacgacgtgatcacctacgtggccattcaccttgaactatgtgcctccattattgtcatgattgggggtggacgttacaacatgtctgatggggttggcaagaaaaactgaaccttcactgttgaacaatagattgtgctccgtgtggaagctatacaagctacactggaaagcgctatgtccgttggaaataatccgggccaccggcaacgggactgcattgccccctcaggcgaacgtgcttatccctgctggcgacgtggaagcttccttgtgataagcactgtgactgtggacc

SEQ ID NO: 108476 - DNA, 328 bp, Zea mays
  unsure (1)..(328): unsure at all n locations
  Clone ID: MRT4577_30422C.1
aggaccaggaaaccagggacgacccacgcgaccgaacaggccaaaaggagggggcgaaaacancaaaagaacggaacgggaaacgagggagacaccagacagaacaaaggagacagaggacccgcacaccaaaaacagggcaggaaagagagaccaaggaaaaggaggaaaaggaaagggaggaagcagagacaacaaaagcacaaagacgaacagggccagcggaaggagcccagaaacccaagaaacncaaaacagaggacgaacagaaagcaacgcagcaaaaggaagacagaaacagaaacaaccacaaacccaacccaagacc

SEQ ID NO: 108477 - DNA, 327 bp, Zea mays
  unsure (1)..(327): unsure at all n locations
  Clone ID: MRT4577_30423C.1
aatcgataattgatgatgtattggaagaacagattttgcaaccatggaaccagtttggcaagttttacatgactggggtaaaaaaaggacatgggtattgtacgcttttatgagacactcgctactagttaatgtgtcacatcagcatgcgcatctgatcataactactcgttggatcatccacattccaccatgcatgcaggcaattccggtttgccaagtgagggaggcagtcctcagnacaagccatcctgaggctgcagnctagctctatgcaattcggaacgcctgcaaagggggagcaaggaaacgctaatccgagcccag

SEQ ID NO: 108478 - DNA, 300 bp, Zea mays
  Clone ID: MRT4577_30424C.1
cccacgcgtccgcccacgcgtccgcaagaacaggtcgaagaaaggcaggaacgggtgatagagcattggtgggatctaacaggagggacgagtggaagggaaggtttggagatttcggctggtccgagtctgacgtcgaatattgggaagcgaccgcttgtcttcttttttatttgtgttaacggatttgctgccaactctttcgtttaaccccaattcgtttcggtcctgattactgctgcaatctgttggtagattttgagatgtggtggcttctatacaaccagtgatgcacaaaaa

SEQ ID NO: 108479 - DNA, 277 bp, Zea mays
  Clone ID: MRT4577_30425C.1
gctgcaggacctgcgggagaacacggagttcaccgaccacgagctgcaggagtggtacaagggcttcctcaaggactgccccaccggccacctgaccgtggacgagttcaagaagatctacgccaacttcttcccctacggcgacgcttccaagttcccgagcacgtcttccgcaccttcgacaccaacggcgacggcaccatcgacttccgggagctcatcattgcgctgagcgtgatctcgcggggcaagctggagcagaagctcaagtgggcct

SEQ ID NO: 108480 - DNA, 358 bp, Zea mays
  Clone ID: MRT4577_30426C.1
gagctctctattcggcggccgcccttttcttttgtttttattcattctagtagatgggtcagagaaatagaacctgcggaaggattaacctgtgatgttacgtggcggaccttgttccttacccactcagcaataaaaggttcacccatatacagtttggttcttacaagttgtcgtgctgattggcgaacatagatgtatgcaaaagggggaaggatatgctgaccaaaagcaagttgagacaaacgcggggcttctggacttgcccaatcaccaaactcatgttgcttaccatcaacatatggttgcagccgatcccttatactttgagtaagtgtctgccttgagccgaatgccg

SEQ ID NO: 108481 - DNA, 861 bp, Zea mays
  Clone ID: MRT4577_30427C.1
tgtatcatcagcagttgtcactacagctggcggactttgtaagaataccacttgagaaagcaggtggtatgatggcactagtcgatgtttattgtctcttcgaccgtgctaggggaacagagttgatctcaccagaggaccttttgcaagcttgttccctgtgggagaaagttgatgtcccagtcatgctcaggaaatttgatagtggagtgaaggtgatccagaccaaaacacatagtgatgaagaggtatttgcaagaatctcatcacttgcacagaagccagatgctcttcagaaagggattagcccaagtgatgctgcattcacactgggaattgctccagctttagcaaaggagcatcttctaaatgcagaaaacaaaggcctgttgtgcagagatgttagtccagatggattccgcttttttagcaatttatttaatgacattgatccccaaaatattcactcgcaaaaaccccatgggatgtacaaggcgtggatctccgttgcgatggcgtctcactgaaaaagttcgactgggatatattgagatactggttgatcaagctggacatcgatgcaattatagtgtactctttgaaaacgtccgatcaagccagtcattggtgcgatcacaatgtatcctttgaaaacgttagtctgcatatctcgccattatgtaccataacaccaaaagatgtgatatagcaattagcaagcccatttgttctgttgaaaaaaaaaaattaaagagcggtgtatgaggattcgggctacattggtaaccgtattagcatgcgaccagattaacttttctgtactgactccatccaaaaataatgcaactctggtatagtcct

SEQ ID NO: 108482 - DNA, 776 bp, Zea mays
  Clone ID: MRT4577_30428C.1
cggacgcgtgggttgtcagctggcggactttgtaagaataccacttgagaaagcggggggtatgatggcacgtgggggatgtttattgtctcttcaaccgtgctaggggaacagagttgatctcaccagaggaccttttgcaagcttgttccctgtgggagaaagttgatgtatgttgatttctaatgagcagcccagtcatgctcaggaaatttgatagtggagtgaaggtgatccagaccaaaacacatagtgatgaagaggtatttgcaagaatctcatcacttgcacagaagccagatgctcttcagaaagggattagcccaagtgatgctgcattcacactgggaattgctccagctttagcaaaggagcatcttctaaatgcaaaaacaaaggcctgttgtgcagagatgttagtccagatggattccgcttttttagcgatttatttaatgtcattgatccccgaaatattcactcccaaaaaccccatgggatgtacaacgcgtggatatccgttgccatggcgtctcactaaaaagttagactgggatatattgagaccctggttgatcaagctgggcatcgatgcaattatagtgtactctttgaaaacgttagtctgcatatctcgctatcatgtgccataacaccaaaagatgtgatatagcaagcccagttgttctgttgaattaaagagcgcttgagtccgatgtattaggattcgagctacattggtaactgtcccccccatgcgtccaaattaacttttc

SEQ ID NO: 108483 - DNA, 3668 bp, Zea mays
  Clone ID: MRT4577_3042C.1
tgatgttactgaagatcgtccaaaaaaacaatcccaacctgttgggcccacccaccctggtttcctgtttcaacccggttctgtgcctctgaagtttttccgggagaaggctgctttcatggccgcacattccttacatgggggtcgcttcgggaacaaaactgtgcatgctggatatgctccgtatgatctctacttccaaaaataccccaggggattctgcgtttgcaattgcatgagttgcaaaaccagctttgcctttgggcccgtatttcacaaaaagttcgggcgggtagttttggaatttgagccccggaagggttcgtacggtgacgtgcatcagcacccactgaggaactaggacgtgagaaaggaccatggaacgggtaagcacgttcgttgtggagccgccccggccctgcggcaaattcggcacgagggaaacactagccgaagcaaatccattccacaagcacctggtgggatcatctcatcatcagaaaccaagagagagattccgtgcccacttgttgtagtagattgtgaggattgaggagtagcaaagagaagcagccatgaatccggacaacttcacccacaagacgaacgaggcgatcgtgggggcgcacgagattgcggtggaggccggccacgcgcagctcacgccgctgcacctggccgcagtgctggctgcggacaagggcggcatcctgcggcaggccatcacgggggcgtcggggggcgacggagcggccggggactcgttcgagcgcgtgctgaacaactcgctcaagaagctgccgtcgcagtccccgccgccggactccgtcccggcgtccacggcactgatcaaggtcatccgccgggcgcagtccgcgcagaaaaaacgcggggactctcacctcgccgtcgaccagctgctgctcggcctgctcgaggactcgcagatctccgactgcctcaaggaggccggcgtgtccgcggcgcgggtgcgcgccgagcttgagaagctccgcggcggggaggggcgccgcgtggagtccgcgtcgggggacactaacttccaggcgctcaagacatacggccgggacctcgtcgagcaggccgggaagcttgatcccgtcatcggccgcgacgaggagatccgccgcgtggtgcgcatcctctcgcgccgcactaagaacaaccccgtcctcatcggcgagcccggcgttggcaagacggccgtcgtggagggcctcgcgcagcgcatcgttcgcggcgacgtgcccagtaacctcctcgacgtccgcctcatcgcgctcgacatgggcgcgctcgtcgcgggcgccaagtaccgcggcgagttcgaggagcggctcaaggccgtgctcaaggaggtggaagaggccgaggggaaggtcattctcttcatcgacgagatacacctcgtcctgggcgcgggcaggacggagggttccatggacgcggccaacctgttcaagccaatgctggcgaggggacagctcaggtgcatcggcgccaccacgctggaggagtaccgcaagtacgtggagaaggacgcagcgttcgagcggcggttccagcaggtgttcgtcgcggagccgagcgtgcccgacaccgtcagcattctgaggggactcaaggagaagtacgaggggcaccatggcgtgaggatccaggaccgcgccctcgtggtcgcggcacagctatccgcgaggtacatcatgggtcggcacctgcctgacaaagccatagacctggtggacgaggcctgcgccaatgtgagggtgcagctcgacagccagccggaggagattgataacctggagaggaagagaatccagcttgaggttgagctccacgcgctcgagaaggagaaggacaaggccagcaaagcccggctgatcgaggtcaggaaggaattggacgatctgagggacaagctgcagcccctgaccatgaagtacaggaaggagaaggagagaatcgatgagatcaggaagctgaagcagcgccgcgaggagctccagttcaccctgcaggaggccgagcgccggatggacctggcccgtgtggccgacctcaagtacggcgccctccaggaaatcgacgccgcgatctccaagctggagagcgaaacaggggagaacctgatgctcaccgaaaccgtcggccctgaacaaattgcagaggtggtgagccgttggacgggtattccagtgacccggcttggccagaacgacaaggagaggctggtcggcctggctgacaggcttcaccagagggtggtcggccagacagaggctgtgagcgccgtcgcagaggcggtgctgaggtcgagggccggtcttggcaggccacaacagcccactggctcgttcctgttcctgggtccgactggcgtggggaaaactgagctagccaaggccctagccgaacagctgttcgacgacgagaaccttcttgtccgcatcgacatgtcggagtacatggagcagcactcggttgctcgcctcatcggagcaccgcctggctacgtcggccatgaagagggtgggcagctgactgaacaagtgaggaggaggccgtacagcgtgatcctgttcgacgaggtcgagaaggcccatgtcgccgtgttcaacaccctgctccaggtcctcgacgacggcaggttgacggatgggcaaggcaggacggtggacttcaggaacaccgtgatcatcatgacatcgaacctcggcgccgagcacctcctcgctgggatggtgggcaagaactccatgaaggtcgctcgcgatctggtcatgcaggaggtgaggaggcacttccgacccgagctgctgaaccgtctcgacgagatcgtgatcttcgatcctctgtcccacgagcagctgaggaaggtcgctcgccttcagatgaaggatgtggccgtccgtcttgccgaaaggggcatcgctctggctgtgaccgacgccgcattggacatcatcttgtctctctcttacgatccggtgtatggcgcgcggccaatcaggaggtggatcgagaagagggtggtgacgcagctgtcgaagatgctgatccaggaggagatcgacgagaactgcacggtctacatcgacgccgcgcccggcaaggacgagctggtctacagggtggaccggagcggcggtctggtgaacgctgagacggggatgaagtcggacatcctgatccaggtccccaacagctcccccaggagcgacgctgcgcaggccgtcaagaagatgaggatcatggaggaggacgaggacggcatggacgaggagtaaaaggcgggccggaggacgcggagctgcgcccaggccgcaggtctggcgccggcatcatcgagtgtcttttgaataagcgtgtagataagcccgtgaatatgcagacgaggttgagatgatgttcttgtaacgctgctgtttgtcaagcatggacgaatggtctctcatatagtatcaaagtgaaaagtctctcaatcgatgtcttgatgtcattatttttatctccctgaatgtttttacatgttttcctctattcattgtatcctttatgcaaaaaaaaaaaaaaaactttcggtccctgtttggttctcaaaaaaaaaaaaaaaaaaaaaaaaaaaaaactcgagagagggc

SEQ ID NO: 108484 - DNA, 232 bp, Zea mays
  Clone ID: MRT4577_30430C.1
gaaaggatgcacgacgccgcccgttgggaaagaagctccaaaggggtccgccgcggagcgcgtgccggtcgggctgagccaatggcacggtcccttggggcgagaacgccctaacgttggtcggggcgatctgctagcacaggcccccgttgctagcttgcaatctgacttataggcgttcaatcataatccggtacacgggtgctttgggccactggctttttaaccaagc

SEQ ID NO: 108485 - DNA, 375 bp, Zea mays
  Clone ID: MRT4577_30431C.1
ctggccggagaatcctcctcattatttcttcttctgggatgaccctaagccttctggcagttgctgttgtattttgcatcaaggtaaagttcatgtttctttgcaagagtaatctagtgaatattctgatgtgcagtattattccagggtctgtcatcccaatccactgaatattctactctcttgtcatcggctattcgtttcaggataacattgcacaagactctgacttgtacaacatcttaagaatagtgtccttggttggtgtcgtggtaagtctgtcgttcgcattttgtcaggggccggtagtcagcgccccggctttagtaccacatcggctagccaagggggccgtgggcagcttataatggagag

SEQ ID NO: 108486 - DNA, 216 bp, Zea mays
  Clone ID: MRT4577_30432C.1
cttatacactcattattaaatcattttctagtaaacatcattaaatagctcttagggggagccatatgagtgtgtgtgcgggacaccagattataactcatcatcctacttgacatccaaatacactttatacagactcccctctcacatttcaaacaatcaaaaaccatacggttccccccctaatatatttccaaaatcacgtacccgttcatc

SEQ ID NO: 108487 - DNA, 211 bp, Zea mays
  Clone ID: MRT4577_30433C.1
atagtgagtcgtattatattgttgccctctctggtggacacaccttgaggaaggtgccacaaagagcggtctggtttcaaaggggccggcactatagaggcctttagcctttgtcaactcttacgtcagggcacttctcggtggtgatgtcgacggccttcgtcacctcggacgtgattttgccctgctgagcgaggcagtttcctgccgt

SEQ ID NO: 108488 - DNA, 149 bp, Zea mays
  Clone ID: MRT4577_30434C.1
gtgttaagctctaggaaagccaccgcccacggggtggggggcacctccacgtcctatcacagctaacagcttgttgggatggggggataaaggcttcccattctcttgtctgcgggtggggtctcttcttcctccgctagaggggcctg

SEQ ID NO: 108489 - DNA, 466 bp, Zea mays
  Clone ID: MRT4577_30435C.1
ggtggttgtttttttgattaccttcctcgcgtatgtataagaccgaatccattctttttcgaaatggatgttcgaaaaagaactactaatccttaacttttcgaggaatccttcatcagtggttgtgaatgactgactttttcaatcctttcgaccttggttccgtaggagcaagtcagaaggttgagaaatagaaccatctgatttgattcgttcccaatagccatgagatgatcatcttagggtgatccttttgtcaacggatgctcctattacactcgtagtctctgaaggatgagaacccactatgtagcatttacatcgataattcaagcattgtatacgtcattagtccgattctttgtaggaactacccgtaataacgagcttgcaaaatggatctgtttatcataaagagattcgttgttcctgaccctgcttcaccttaattgttatttgaacaaaa

SEQ ID NO: 108490 - DNA, 439 bp, Zea mays
  Clone ID: MRT4577_30436C.1
actaaacaaccttttttttgatgtgactgtattaagtaaatgggtaacgagtaacactcttctataaccaaccccccaataaagaatcacgcctgaaacagaaatgctacaaccaaccccaaactaatcacttgcaaacccaaaaaaagggccaatcaaaccaaagggacccaccaccgacaaacaacagcccccccaacccgatgagaccggccaccaaacaccaaggcaacccagagggaaggcaaccaaccccccacaaaaggaaatgggcgaccccctaccccccttaaaaaacggggggcggggccacccttccaaaaagaacaaagcggacacccccctttgacctccaaaaagggatggcgggctaattcccccagcgaacaagcttggcggcctccgctgcaaacctctggaagagtgggggaggaatgaa

SEQ ID NO: 108491 - DNA, 855 bp, Zea mays
  Clone ID: MRT4577_30437C.1
atggcaaaccctgtggaggcaataaaggcaccatgtcatgtgcagctaacctgtgggaccggatggtatcatggtctggacacgaaggtacgcctgagcattggcaagccgcgccgtcgtggggtgggccatcggcttacgctggctctagctccggctgggcatgatgttcccggagtcgatcttggctttgggacttcggttgatgagttaagatccgacgaagaggatgaagctcggggggatggtgacggttcatcggcggcgtggatggggactggtgtccggaagatggcggcgcgacggccatggcgagggccgcttccgccggctggggtgtccccacaactcactttggcagacgttctggccaaggcgcggactttccatgatcatggtggtcgtgggcatgccccaggtgtcttgttggcacacgcctcggcttcctctccggcgccgtcaagcgtttctgctgggagacggacggactcgtcgttcctcgcgtcgcgaccaggcatgcaggatcttggagatcggtctgcctgtcgggctgctgggccgggccgagccattctaatatgcattgagggaagaaaagcccatttcaccttcacagacagtctttgcagcttgtttgggaacgcggggcgcccgaggggtttcacatctcctgcacgcgcgccgccggacggtgtccatccacttgcctcggccattcaagtcacgacaccctcgacactggagccggttgtcgtgcaggcggagttcggggcgaagacaaagtccgttgttgccatggatcgccgcggtgctggaggccatggtcggggctcagatcgcgacgttgcaagttag

SEQ ID NO: 108492 - DNA, 1555 bp, Zea mays
  Clone ID: MRT4577_30438C.1
ctcgaggccggccgggggttggccaatcctgacacattatcctctccacctcttcagaatccggacctcggcagagtccagtccctcgtgcatctcggcctctccactctcctttccacgcccgtccagtcctctaatctgacccctcttctccagccggccggagatggtctcgctgcgatgcacaaccgcgcaccactccctcctcggctcgccgacctgcctcgcgcgcccgcggcggcgggcgtgccccgtcgtgcgcgctgccgtcgccgtggaggccggcgcgcaggccaaggtctcactcatccgaattgggacgcgtgggagtcctcttgctcttgcacaagcccacgaaactcgagaaaaactgaaagccacacactctgagttagctgaggagagggccattgagatcgtcatcataaagaccacaggagacatgatcttggacaaaccccttgcagacattggaggcaagggtttattcaccaaggagatagatgatgcgctcttgcagggaaggattgatatcgctgttcactctatgaaagatgttccaacatatctacctgaaggcacaatattgccctgtaacctaccacgagaagatgtcagagacgcattcatatgtttgactgcaaattcgcttgcagagcttcctgctggcagtgttattggaagtgcttctctgcggagacaatctcagattctctacagatatccatcactgaaagtagttaacttcagaggaaacgttcagacacggttaaggaaactcaaggagggagatgtctctgctacattgttggcactggctggattaaggcggctaaatatggcagaaaatgcaactgctgtactatcagtggaagaaatgcttccagcagttgcccaaggtgctattggaatagcttgccgaagcaatgatgacaaaatgatggagtatctatcagcgttgaaccatgaagataccagattagctgttgcatgtgaaagagaatttttggcagttcttgatggtaactgccgaactccaattgcagcctatgcttaccgtgacaatgatgggaattgctcattccgcggtctattggcttccccagatggatctaaagtatttgagacaacaagaagtggaccgtactcttttgacgacatggttgagatgggcaaagatgctggtcatgagctgaaggcaaaggctgggcctggcttctttgatagcttgcaatgaaaagaatgagcggccatgagcaatttcaattgtcactcttttggttagaaacagagggcccaagtagagtgttgagaggtttgtttttgtttcttctttctcctactagttctgctagagaagggtgtacctggtgtagtggtgagctgagtcatcaggtcgcgggttcgaagcatccagtctccgtatttgcgggagaaggtttgtctcggtttatctcttttccgctactcatatgggagaaatgtgggagcctcagtctgctcttttttttttccaaaaaaaaaaaaaaaaaagcggcctagagcctttactatc

SEQ ID NO: 108493 - DNA, 257 bp, Zea mays
  unsure (1)..(257): unsure at all n locations
  Clone ID: MRT4577_30439C.1
ttcgcgacgagtcgcatcgtcgatcgagatctgtganacctgactgcagacatcacctcgagtgagtctctgacacatgacacgctacggctagatcagacacgaggcatcgccagacagagcgctcatcttgctgcaacagctgagacggcgacgctgtgactacacatcagangagagcacctcactgtgctcgctcagngatgatgcaatctgtgagactgacggagatatcactgagtgatctcgaacatgca

SEQ ID NO: 108494 - DNA, 573 bp, Zea mays
  Clone ID: MRT4577_3043C.1
gggaaaaaaaaaaatttttttttttcccccccggtttaggggtaaaaacccttaaaaggtttcgggggggggaaaggcaaaaaacccccccgtccccccccggggggtccaagtgggggaaacccaaaaactttcaaagaaattttttttagttattaaaaaaaaagggggggggggaattaaaagggcttttttggtttgtgggggggaaaaaaaacaattttaaaacgttgtttgggcccgttatattttggtttttcttttttgggggggagaaggggggggcatttaatttgacctaaaaaaagggggggggggcccccgttcccttttttggggccttaaaccagggggtcaatgggtttgccctggttgagggccacaacccctttttggggttcctcggggggggaccgggtcctttcgcggggaaggtttctggggggcaacttttttgggcaaaaacgggaaaaggggggtaggaccggccctccttgttcctgggggggaccagggggttgtcgttttccagggggggggggggggtctccacttttttgggaaggcccgggg

SEQ ID NO: 108495 - DNA, 337 bp, Zea mays
  Clone ID: MRT4577_30440C.1
gtggactcttggtctgtatctcttttgtattttttttttttttttttttttttttttttttttcccacgcggccgcccaagctttcggggaccccgggggccacccagaaattaccgaacggtacctggaggcccaacaaatttccctatagggagggggattaaacctatggtcaaattatgggcataggtggtacctgggggaaaatgtggaacactctcaattccccaaaaaaaacgaaccggaagcaaaaagcgcaaaacctggggggcctaaagagtaagctaactcaccttaattgctttgggctaaatgcccccttttcaatggggaaac

SEQ ID NO: 108496 - DNA, 395 bp, Zea mays
  Clone ID: MRT4577_30441C.1
gccggccgggcctccgtttccttctcggactcttcgtcgtcttctccgatctccccttcctccctcgctctctcccgcccccgtggtccaaaccctaacaaacagcaatcaagcggaacccctgcaatcgtaatcggttcgctgcctaatcccctccctttctcatctcatgaccatgccggcctcgtccccctccgttggcagcgcctgtgacccaccgccgccgccgcctccgccgccgccgcgggctatgaagcgcgagctcgccttcgcgctccagtccctgtccgagatctctgcctcccacggccgcacgcgctccggccgccccatctcttcccttccagacccatcggcatcagcatctctcaagaggcgcaagagaaatctgaccc

SEQ ID NO: 108497 - DNA, 1671 bp, Zea mays
  Clone ID: MRT4577_30442C.1
cttgctcacgcggcggatgacgcgccccgtcgtgcgcgctgccgggggggtggatgccggcgcgcaggccaaggtctcactcatccgaattgggacgcgtgggaggttttgttagcagttgcatttggggacggcggctatgcgttgcgagcgcctgagagatcctgagtttagctctaccgccgggaattcctcttgctcttgcacaagcccacgaaactcgagaaaaactgaaagccacacactctgagttagctgaggagggggctattgagatcgtcatcataaagaccacaggagacatgatcttggacaaaccccttgcagacattggaggcaagggtttattcaccaaggagatagatgatgcccttttgccaggaaagaatgaattcgctgttcactctatgaaagatggttccaacataactaccttgaagcacaatattgccctgtgacctaccacgagaagatgtcagagacgcattcatatgtttgactgcaaattcgcttgcagagcttcctgctggcagtgttattggaagtgcttctctgcggagacaatctcagattctctacagatatccatcactgaaagtagttaacttcagaggaaatgttcagacacggttaaggaaactcaaggagggagatgtctctgctacattgttggcactggctggattaaggaggctaaatatggcagaaaatgcaactgctgtactatcagtggaagaaatgcttccagcagttgcccaaggtgctattggaataccttgccgaagcaatgatgacaaaatgatggagtatctatcagcgttgaaccatgaagataccacattagctgttgcatgtgaaagagaattttggcagttcttgatggtaactgccgaactccaattgcagcctatgcttaccgtgacaatgatgggaattgctcattccgcggtctattgtcttccccagatggatctaaagtatttgagacaacgagaagtggaccgtactcttttgacgacatggttgagatgggcaaagatgctggtcatgaactgaaggcaaaggctgggcctggcttctttgatagcttgcaatgaaaagaatgagcggccatgagcaatttcaattgtcactcttttgggtagaaacagagggcccaagtagagtgttgagaggtttgtttttgtttcttctttctcctactagttctgctagagaagggtgtacctggtgtagtggtgagccgagtcatcaggtcgcgggttcgaagcatccagtctccgtatttgcgggagaaggtttgtctcggtttatctcttttccgctactcatatgggagaaatgtgggagcctcagtctgctctttttttttttccatactagttctgctagtgccttgtactatcactcgtattgagcagccccattcagctttgtagtatctccctctgggttagagcctttataggtatctgcacagcacagctatatgttttgtcgaacaggtatctgcacagctacgttctcggaagactccagcagccagctgcgtcagcacgatcagatcagtcatgctcgtgcccatccagcagggaaatctggggtagaaatatattctgctgttatacccgttcagtcgagatttcagatttgttgcagcgcatatgattt

SEQ ID NO: 108498 - DNA, 319 bp, Zea mays
  unsure (1)..(319): unsure at all n locations
  Clone ID: MRT4577_30443C.1
ctgncctttttttttttttttttnntttcaaaagtcgacaaaccaattaactttttttccaaatcacttttttttaaaattttaagcccaactaatggcttattcacggtgaggctaatccatgttccttcgatcagaatgactcgcgttaaattcataacccggtacactccctatttattccgctcaatccactttcattggccccctttgggcaccccggtatttccatcccgttcctttaaacctaccacattttcccttaaggggttcgattaacggctggcgttaaccaagccatatccggttcccttgttga

SEQ ID NO: 108499 - DNA, 551 bp, Zea mays
  Clone ID: MRT4577_30444C.1
agttctacagcggccgccaccgcggtgaacactatgcgactaagtatgtaaatgactatcttttttacccctgttgcatgtcctttgaaggttcatttgacttaatggagtaactagatatatccactgactagtccaacgaacgggcaagttaacacttatcctttaggtctgactctgtcctggatctttacacaaatgcaagcagtgattgatgccatttaacaggcatgatcctatcatcatcaacaaaacgcatgataagggcaagcactgcataaagtgcacggcatggcaaagcatatttcttgtctagaaatagcttgatgaagcaacttgttgtgccacagttctccatttctggtagctttactagatctacacttgcatgaagaaatggaatggatactatctgaatcttactgccaataatcactgcttcgggtagggtgtaaaagctttcctgacagaacgagaccaaaattcccttggtaaatgccgcatgattataaaggtacttcttcagggactgctagagtgcgaaatgccta

SEQ ID NO: 108500 - DNA, 764 bp, Zea mays
  Clone ID: MRT4577_30445C.1
ctcgaggccggccgggccggggcgctgctattttcttcttacattgtccactgcctagctagctcgcatctacctggaaagctgaaagctagccagagcgctagctagcttcgttcctcgtcgctgcgcgccggccagatgactgctcaccagacttgctgcgatgatgccgttgccgccggcactgcaccggctgccaggaggaggcgcctcaaattgacgaggccgtcggcctcgctcttgatggcgaggaagctaaggaagaaggctgccggcagcaaacgcccaagggcggcagcgtcgaggaagcgcgcgatggcgatcaggaggaagatggaagcgctgaggctgctcgtgccactctgcggccgagacaacggctcggtgaccggtggggcggtcgaacgactggacgagctcctcatgcacgccgccgggtacatcctgcgcctccagatgcaggtcagagtgatgcagcttatggtccatgcactaaatgaccggcccgaggattaatcttcttcccaagaccatgtgatcttccttctttaatttcttcttcatcttcttcgcgtgcctgtgttgcacgaggcagctgtgcgtcggtgtctgggtgcaaatcattggctgagtgtgttattggtgatattatttgttcgtatatacagaatatatactcatgcatgcatactgtatgagatgatagagtaaatctagacatatatagttcaaggaaaccgaaaaaaaaaaaaaaaaaaagggcc

SEQ ID NO: 108501 - DNA, 638 bp, Zea mays
  unsure (1)..(638): unsure at all n locations
  Clone ID: MRT4577_30446C.1
ttcggcacgagnacgaccccgtttcctcgctccttcgtctctcgctgacactgtttgacccctgtcctccaggctcggctccagctaaggtcgagcggcgaggcgacagccctagtgtagcgcggcgcggtaccatagatggggagacgaatggaggccccctcctcgccggcgtgcggggggggcgtcctcctcctcggctcgctgctcctgcaggcacgcgccgatgacccctacaggttctacacctggaacgtcacctttggcgacatctacccgctcggcgtcaagcaggaggggggccgcagatcgacgccgtcaccaacgacaacatcatcgtcaacgtcttcaacaacctgccggtccccttcctcctctcctggcagggaattcagcagcggaggagctcatggcaggacggcgtgtacggcaccaactgcccgatccctccgggcggcaatttcacttacaacatgcagttcaaggaccagatcgggagctactactacttcccttcccttctgtttcacaaggcagctggcggttacggtgccatcagggttctcagccggccgaggatccctgtcccgtttgacccgcctgccggngatttcaccatattggcgggtgactggttc

SEQ ID NO: 108502 - DNA, 669 bp, Zea mays
  Clone ID: MRT4577_30447C.1
gtttctccctttcctccctgccccctttgttccctgtgcggctgcaccccgccccccgccacccacccacctcactccactgcacgctcgtcactcttactgagaggagggcacagtgggcagccccgtcggtggtaggagtttgcgcgtgttgacgacagaggctggaaatgaagatgtcgtctcccgccgccctctgcgtcttcgtcctcctcgcctccctcctcgcggcggccagggccgaggacccctaccggtcctacacctggaacgtcaccttcggcgacatctacccgctcggcgtcaagcagcaggtacgtacgtacgccggcagtgcggcggcgcattgctctgcatcttcgtcctcttctcctacatcctcttctttctccttcttgctctgtttctgctgagccgcgggtgggttcaggggatcctgatcaacgggcagttcccggggccgcagatcgacgccgtcaccaacgacaacatcatcatcaacgtcttcaacaacctgcccgcaccatttctcctctcatggtaggggattcagcagaggaggagctcatggcaagacggcgtgtacggtacaaactgcccgatccctccggggggccacttcacctacaatatgcactttaaggattagatcgggagctactactactt

SEQ ID NO: 108503 - DNA, 2249 bp, Zea mays
  Clone ID: MRT4577_30448C.1
gccggccgggtcatccgagacagacacacccccaccccacgctcccctccctcggatccagattatcaccgcacctccctcatttatattcgctggcgcccggcgggcccgggagcagatccaccggcacgagaccgaccccgtttcctcgctccttcgtctctcgctgacactgtttgacccctgtcctccaggctcggctccagctaaggtcgagcggcgaggcgacagccctagtgtagcgcggcgcggtaccatagatggggagacgaatggaggccccctcctcgccggcgtccctcgtcgtcgtcctcctcctcggctcgctgctcctgcaggcacgcgccgatgacccctacaggttctacacctggaacgtcacctttggcgacatctacccgctcggcgtcaagcaggaggggatactgatcaacggccagttcccggggccgcagatcgacgccgtcaccaacgacaacatcatcgtcaacgtcttcaacaacctgccggtccccttcctcctctcctggcagggaattcagcagcggaggagctcatggcaggacggcgtgtacggcaccaactgcccgatccctccgggcggcaatttcacttacaacatgcagttcaaggaccagatcgggagctactactacttcccttcccttctgtttcacaaggcagctggcggttacggtgccatcagggttctcagccggccgaggatccctgtcccgtttgacccgcctgccggggatttcaccatattggcgggtgactggttcaagctcaaccacaccgacctgaaaggcattctggacagtggcaatgacctgccgtttcctgacggccttcttatcaatggccaaggttggaatggcaacagattcacggtggaccaagggaaaacgtatcggttccgggtgtcgaacgtgggaatcgcgacctcggtgaacataaggatccaaggccattccatgctgctggtcgaggtggaggggtctcacaccatgcagagcacttacacgtccatcgacgtccatctaggccaatcatactcgttccttgttactgctgatcagccacctgcagactactccatagttgtctccacacgctttaccacccctgtcctcaccaccgctgccatcctccactacagcagctcaaatggtgctgcaagtgtgccgcctcccccggcgcctaccgttgagatcgatttctctctcaaccaggctagatccatccggtggaacctgacagcgagtggaccaaggccaaaccctcagggttcctaccactacggtctcgtcaacaccacaagaaccatcaggctcgccaactcgcgggcaaccatcaacggcaagctgagatacgcagtgaacggcatctccttcgtcccggccgacactcctctcaaggttgctgatttctacagcatcccgggagttttcacgctgggcagcatgcccgacaacccgacgggcggcggcgcttacctccagacgtctgtgatggcggccaacatgcgggactatgttgaggtcgtctttgaaaacgcggagaacttggtgcagtcgtggcacatcgacggctacgcgttctgggtcgtcgggatggatggaggacagtggacaccggctagtcgtcagggctacaacctcagggacgccattgctcggtacacattgcaggtgtaccctcagtcatggacggctatctacatgccgctggacaacgtggggatgtggaacgtgaggtccgagagctgggccaggcagtacctcggccagcagttctacctccgcgtctactcgccggcgaactcgtggcgggacgagaacccgatccccaagaacgcgctgctctgcggccgggcctctggacgccggaccaggcctctctgaagctgaatccctgagcccaagaagaccatgtttgttcggccacgaaggggtggccggaacttgcggggatcaattgaagttgagggaagagatgattggagtgttcagattgctgaactgagttccattttgtggcgctgatgatcgttcagctcatatattatttagcaattgtagctaaaacattaattcccggtcgatttgttgtatgtgaagcttcctcgcttcctcgctcacatcattgatgatgataatattcatagtaaccagattttcctttttcaaaaaaaaaaaaaaaaaacaccgatctgaatgagttcaagaaaaaaaaaaaaaaaaaaa

SEQ ID NO: 108504 - DNA, 779 bp, Zea mays
  Clone ID: MRT4577_30449C.1
gccatatcgaccgatccctttcctccctgccaccctttgacccctgtgcggctgcgccccccgccacccacctcgctccactgcacactcatcactcccttgctcagaggctgaggaggcgagggagcactgtaccgaaggtgtcggcggcggcggtggtgggagtttgcgcgtgttgacgaaggagactggaagcggagatgccgtcgcccgccgccctctgcgtcttcctcctcctcgccctcctcctcgcggcggccagggccgaggacccctaccgcttctacacctggaacgtcaccttcggcgacgtctacccgctcggcgtcaagcagcaggggatcctgatcaacgggcagttcccggggccgcagatcgacgccgtcaccaacgacaacatcgtcatcaacgtcttcaacaacctgcccgcccccttcctcctctcctggcaggggattcagcagaggaggagctcatggcaagacggcgtgtacggcacaaactgcccgattcctccggggggcaatttcacctacaacatgcagttcaagggacagatcgggagctactactacttcccttctctcgcgttccattaagcggcgagcgggtacggtggcatcagggtccttagccgcccgaggatccctgttccgtttgacccccctgccggtgatttcaccatcttggctggtgactggttcaagctcaaccacactgatttgaaaggcattctggacagtggtaacgaccttcccttccctgatggtctccttatc

SEQ ID NO: 108505 - DNA, 205 bp, Zea mays
  Clone ID: MRT4577_3044C.1
aacatccaccaacattgcagagagtataagttcaaccaccacatcgagtcaacgagtacgacatagtattgaaatataagtacgacgtatgttcaagtgcgaccaagaggccacgagttaagaaacatgttcatgtgtttagagataaccaccattggggtggttagggcttataccgcttccgtcgccaccaccaggaagaggg

SEQ ID NO: 108506 - DNA, 338 bp, Zea mays
  Clone ID: MRT4577_30450C.1
ataccattcatataaacatattttctttttcttattcattcctccaaaaattttattttaataacctttttacaaaaaaaatcaatgaaccactaataacgctattaaaacacctaccataacgacttctacattacttacacccctggaaaaccaacatcatgcccaagaacaaaatgttcttacatcatatacatctactcaattctgctaaacccaactttaaaaaaaaataacaaaacttacagcaacaacacggtcttgctgaaaaccataccaaacgccccctattccgtcttagaaaacaaactgttacagactccgcacctgccttgacc

SEQ ID NO: 108507 - DNA, 280 bp, Zea mays
  Clone ID: MRT4577_30451C.1
cccacgcgtccgctagatcgcgagtggccgcccttatttttttttttttttttttttttttttttttttcttttcatggggcacccaacaccagcgccggtgctgtcacacaaaaaggacagactttatacaaccggaaaaaaaccagacagctcaacgaataacaaccccactgccttactaacctataaactccataactaaacgataaacgggcactcgcccgcaagcgcaatacaaccacgacacttgttcttgtaacaaccacttattaaaacca

SEQ ID NO: 108508 - DNA, 237 bp, Zea mays
  Clone ID: MRT4577_30452C.1
ggggcacctggggaattttaactcatcacagaaaaccaaccaccccctaattccatgattcccccaagagcacggacacaacccctacattgtaatgccctggggaaagaggaaatgacttatcaatgtcccacataattacagcccgtagcataaaaaaccaaacccccggtccctaacgaaagagcctactcccattaaagggggggcgctcaatgcccacaatacaaacccaaa

SEQ ID NO: 108509 - DNA, 227 bp, Zea mays
  Clone ID: MRT4577_30453C.1
gtacgcccaaccttcgcctgtgtcgacgtgcaactcgaggtgaatgagtgtacgtcttcaagagcaagtctgttggtaatctgccaacaggccagtgctctaatggaaagttgctatgccatcctagtgagctcagggtatctaatgctgatcatcactagagggacggggatgtgacttcacattgccaggcaggcaacacttaatcgagatcaccaaaaagaaaa

SEQ ID NO: 108510 - DNA, 361 bp, Zea mays
  unsure (1)..(361): unsure at all n locations
  Clone ID: MRT4577_30454C.1
ttcttttgaacgtatggattgcagtataaattattgttttgacatttttttttgtttctaccagttttctcagtatttgtgtttgatgtacacagtttcactagaatgtttctaatggttgtcttttctttgcagtgctgactcctgagcaatagtggatcaacgggacagcaactttgcaagtggttaagtttgtaaaggttgctgactgggggggagagtacgaaatccgtttttctccagcagtattaagcatgggatgtgctctaggattggcttatccacatacgaagntggaccacaattaatcaaaacttcatcattgggctcgataggaaatgtggcgcttactttgttacat

SEQ ID NO: 108511 - DNA, 243 bp, Zea mays
  Clone ID: MRT4577_30455C.1
ctttctcgcctcttccgcaccgcttctcgctccggattccggataccctctgctcttttcctaacgatggttgccatggtggggatgtgtaaggtcgtctgctcaggcgccgccaagaaggccacgtccaggagctccaaggctggcctccagttctccgtgggaaggatcgccaggttctcaaggccggcaagtaatgccagagaatcggcgccggcgcccctgtctacctcgctgccgtgc

SEQ ID NO: 108512 - DNA, 306 bp, Zea mays
  Clone ID: MRT4577_30456C.1
tcgcgaactctatactccataacactattccttttattaatgtcaaaaaactaatactgaacatgtccatcaaaaaaagcgatacatctactaaaacacaccaacaaaatatctaaatcaactgaaatgcctgtaacctgtattatccatagcatagctcactttcaagtattttgctatccttaacattgataagacctctttctttacaccttctcttattccgtattcaatgcatataccttaaatttacccaactttacaggatttccaactgattactttaaaccagattcactttttata

SEQ ID NO: 108513 - DNA, 320 bp, Zea mays
  unsure (1)..(320): unsure at all n locations
  Clone ID: MRT4577_30457C.1
ccccaaaaggacccaagcggacggacgcgagcaaggngacgcaaagcgccgcaagaggggcaccaaaaagcacagcacgggccggcgcgggacaacggcgggacggggaaaacccaggcgggacccaacgaaagcgccgggcagcacagccccncaacgccagcgggcgaaaaagcgaaaaggcccgcaccgaacgcccggcccaacagaggcgcagcccgaagggcaaaagggacgcgccccgaagcggcgcaagaagcgcggcgggggcggggggaacgcgcagcgggaccgcaacaccggccagcgcccaagcgccc

SEQ ID NO: 108514 - DNA, 319 bp, Zea mays
  Clone ID: MRT4577_30458C.1
gaaccagcctctatgcaatattggcaagggagctgtctataaaccttttccaaaccctacctttatgtgaactttcatcagtgggtggtatgcttattcagtgacattctatgctatattcctcgaccacttatgccaattgctgtacagaagtgttactagcctttctattgcttctaactgttttttttttcaaaaacagataaatcttccacacagttttattatgtagcatgctggctcgctgtcacttcattcatttaactttaacttcatgtccttttagaggcccctgaatatttttgcataattagtatat

SEQ ID NO: 108515 - DNA, 436 bp, Zea mays
  Clone ID: MRT4577_30459C.1
ccgacccacgcggccgacttttgctacaaatttttttctaaatttctgaactccaacaatggctgcgcgggcttgatccattatactgggcacccacctcaacttcgcgggctcctcccgctacgccaccgcagcgcccaccgcgatggctcagaagattgactcccttttcaacaagaagcctgcccagaagcccaatcccgatgctgcatcgtcgttttctccagacatcagcgacaagctcgccaaatggtatggtcctgacaggaagatctacctgccggattcgctgttggacctttcggatgtgcctgagtacctcaccgaataggtccctgcagactatggctacgacccttttggcctgtgcaagaaaccaaaggacttcgacaaataccaggcctacaaacttatccataccaaattggccaatctc

SEQ ID NO: 108516 - DNA, 1654 bp, Zea mays
  Clone ID: MRT4577_3045C.1
aattcggcacgaggttttttttggccgtcgccccagcctgtcttccacctccatctctccctcgtggccatggtgagctcccctgcgacgcgcctccacgtcacaggccagctcggcctcctccctagcaccgtcccatttcctccctgcaccggatcccctttcccctgcgtgccggactttcctccactcctccatccatggctctctgctgcttttactccctcccctgttcgcccatggaagtcgcgcccttgccaagctccctccgcgccgtggtgctccagctcggcctgcttcccagctcgctcggccgaagcgccctgctcgccctcctgcgtcgcgccctggccccttctctgcgcgctcctccaagccggcgtcctctgcacgccatggccgccgcgccccgggtcgcatgctccaccgtgccgagctccctagcgcttgccctgccctctgccatggacgtcgtcggccttgactccctctggctgcggcatccgtcttgctccctgctccgaccaatccgcctaggttcgaccatggcacgccgcggccgtgtggaaatgtggcggatcgaggaaagccttcgtgttctccctgctctgcgatgccgaggtccctcccttggttgtgctcagctccagctccgtgccttgtccctggttgcgcgcgtgctcgccagtctttcctgtgcgcgctccacctcgtccatggcgtcgcggccttcttgcccgccagcacgccctctcggttcgctcggcctcaatctccatcgcgccgcgctcctccccctgtccctgctacactgtcggcaactccctgtttcccctcaatctccatcgcgccgcgctcctccccctgtccctgctacactgtcggcaactccctgtttccctggtgtcgcgcgcgctcttggtccttgcgagtccaccttggtccgccagcgacacccgtgtcggctctgtaatgcttgtacgcgtctgtccacgtcgctggcagctcggtctctacgtgtgtcttcctcgacatctcgacaccggaactccatcatgtctgtatgtgtgtggaagaatggagtcgatggagaagaaagcgaagcccgtgtggttcttgcgttcatctggtgtggaattggagctatggttgaagaagaaaatgaagtccgaaagcgacgcttgtcatgaacctcgtcgtcgacccacgttgtatccacgacgtgctcgtcgactccgatgatctgttttccaattgcgtgctgcctacgtcgattttcagaactccttgtcgtgctcgaccctattgtcgtcgttccgtgcgtcatcaataaatcctaaaagttggctgaagacgaagctaatagcgtgatattcaccaagtgctcgacgcaagggccgaactggaatccttgccgtgttcacggatagcgcatcaaatttagtgggtaaaccaattcatatttctgttagcttaattattgaattgatcaatggatgcgtctagtattattgaattagttcgatgaatacgatgtgattgttttcatgactttggaatagtcgcgttggggtgctattgttaggtttaaaatgttaattatgtgatgtaaggtaaattagtgaatgaagtttaaatttagcatttttaaaaa

SEQ ID NO: 108517 - DNA, 586 bp, Zea mays
  Clone ID: MRT4577_30460C.1
ccgggctggcagctggccgcctggccgtaaccagaccacgctctgcacgacctgtccctagttggtgtggtagctagctagtgtacctcagcatggaattgggagcaggtttctcttccagttccactgcaaaattgagattctaggctcttggtgtggacgtcgatctgcacctacattcgaagcatatttcataggatgtctagagctatctcaaatttattattattttattattatctcagtgtttctagttgagctgagcatcagtgtacattatcaatatctcagtgactcaaaaaggctttgaatttaggggaaaaagtacacaaagaggtcaattatttgttcttttattttgcagagaacagaagctggtgagcgatccagaattcggtcgtgaactgaagtgtgatgttggccatgagtattcctttttgtactagtgttcaagcaaaacaatcacttagatgtctgtgaatttgtatcttgaaatcatgtcagacagcatgaattgacatttggagagcccttttctatgatgcagcttgacatcgttcattgtcaagaaaaaaaaaaatagaga

SEQ ID NO: 108518 - DNA, 457 bp, Zea mays
  unsure (1)..(457): unsure at all n locations
  Clone ID: MRT4577_30461C.1
cgctgggcgacctcaccaatacggngcgggcggcgtgcgggtgctcgagggcgccgaggcgcccgacctcaggaagctgtgccaggagatcgcgtcgccggatttccggacagcgctggtggagcagatggcgcgctcgctcaccaaggactgcaagttcaccgacgcgctggctgccgcgatcctgcaacagctgccggggtactagtgtgtaccgtttcccgcgcaccagtacttgtccgtcttcaaagaacggttctttcataaaaaacattggtaggaacagttttacatttaggccttattcgtccggttaggaatcgtttcgacccatcaatccggcacaaacgtacaaagccttactgagattagagtcaatctcccctcacgtttgtatgcataatttgaagtttctttcttctggttatagtgatctgaactggaactgtacatcata

SEQ ID NO: 108519 - DNA, 264 bp, Zea mays
  Clone ID: MRT4577_30462C.1
ccaacagcaccgaggctacattatctgagcaccaaagaactatgtgtcaagattttgtggtatccagggcctgtacctgggatcatgactaatattgcctcttttgttgatgcatatggctgaaaagtggatttggttgacatcaccgacttcctgaaggagctgcactgaaggctcgggatacccagctgctgtgctaggatgtagcaatgccttgtgtggggggtaataagatgtgcgcggccttggtctccgccctgatta

SEQ ID NO: 108520 - DNA, 294 bp, Zea mays
  Clone ID: MRT4577_30463C.1
cctccttttacacaaacggtcgtccaaaacgggggggtttttcacgcagttgtggttggacaccctaacatagcaactaaaacacgaggaggggcacagactattggaagacagcctgtctggacactggtgactagaccttcaaagcacgaaacagatcacgaaaggcacgaaaactgtttggtgggccctagcaatgtgcatgtgaaaagtgcatgagacaacctataaaactgagaggaaaccggtccaacatgaggccatcgcatcatgagcccacttatctggctatga

SEQ ID NO: 108521 - DNA, 672 bp, Zea mays
  unsure (1)..(672): unsure at all n locations
  Clone ID: MRT4577_30464C.1
cctgccgggggctccaagcgctcgctctgtattctactttctcctcattctctatccactggtctatttcctgaccggacgcgcctggaccagacagcgggagaggtggctagccagagcacgcctgtgctgccgcgcacagcgtgaacgcgactctggaagagacccatactcgagcgcgtcactgaaaaggcggggcgcctccggctcagcgccattttgcgagaggcaggacaccatggccgtccaggagatgaggtcccgcaggccgacgggcattccgtcgaacacgctgtgcgcggcggtcacgacgctacacatgcagtagagcgtgaggagcgagttggcgacgacggaatcagtctcgacctataggaatcgttgaatgcccggtacaaccgatcaagtttcgacaacccctggttcgtcatcggggtctcctactccggcgctctcagcgcctggttcaggctcaagttcccccatttgacatgtgggagcctcgcgagctcaggggtggttcttgcagtgtacaactacaccgactttgacaagcaggttggagagtcagctggtcctgagtgcatttttttcttcaggaaataactggactcgttgacgaaaagctccggctggagagtcactcggtgaaggttctattnggagcacaga

SEQ ID NO: 108522 - DNA, 270 bp, Zea mays
  Clone ID: MRT4577_30465C.1
attcgctcgaggctgccctgctcatgctgcttgtcctcgccgtatcgttcaccctcatcgcacaggaagattccatggcccacaacaccctgactttccttgatggtatcaaggacgttccggtgagcgagaacgaccttcaccttcaggagctcgctcgttttgccgtcgatgagctcaacaagatggccagtgctcttctggggtttgtgaagcttgcgaaggccaagacacaagtcggtgtatggcctgatgtactatctgactatt

SEQ ID NO: 108523 - DNA, 337 bp, Zea mays
  Clone ID: MRT4577_30466C.1
gtcctccattgatgcgtgttatgtcactctcatcttattcttgatcaccttctcttctatgattattggagtcaaggagggtttcaaggatgcctatccctagaatgtaacatatttttatttttttggtattactttccttagtctcttttatattttttcttgttgcttttttttttatttcctaattttttctaatgattatgaacgtatactttaatgcaaactacattttgtgattaattatataatgttttgttagtcaatcgatttatattatgtgttggattatattttttctgatgtttttgaatataccaagagttttccatttcat

SEQ ID NO: 108524 - DNA, 2648 bp, Zea mays
  unsure (1)..(2648): unsure at all n locations
  Clone ID: MRT4577_30467C.1
nnncgatctgatcctcatgnaccagccttgcnattccccaactgcctgcaaaattcaccaccatgaacagcctggctaaagcacaccatggcctctacatctgcctcagctaggcattacactgcatcctgctggcatggcaccaatctgggctgtctccaatcaccgcacgtgcttgtgcccagtgtgcacaatcatcagaaaatcaatccaatgaggacaagngtagaggaagcctgccgccccccccccgccgcccccatccatcccccagccccacccccccccccccccatcccccacacagcatcccatccccatcccgcagagccccaccccccagcccccccagcccacacatcncccccactcccgcccccaattcggcacgaggtgataacgatgtttgtaatacttcggacaatggatctgttattctgcttggtaaaagaactccatctgcttctggcttaccagaagattatcctaaggatagtgacttgcaacaaccggttttagatagcttctcagtggtttcatcttttcaagacaatatatctgggaaaaaactgtttctggtgtagcaggcagtgagattctttctttaagtttagcaactcctgattataaacatgaagatggtttctctgaggaagcagtatgcagaacaaagaattatactggaacttcctcggtagatccgaggcatttagacatggaggggcactctatttactctgagggagatacataccaaggtccttgtcaagatctaggcagacatgaagaacaagagagctgcatgtctattcctatgcaagccaaagaaagtggaggggttttgaggtctagccacacgaaagggtcagttacagcagcccaaattgatttggcaggtgatgcccatcttattgtgagtgataatgctgctgccaagcaagtgtttagtgaggagaaagaggaaacaaaatctatctcttcttcagatattgatatccttcatgaaaaatcatactccagtggacacgatgaccatgctgcttgtgctgccgaaactcagttctaccatccacagaaagcatctatatctgatggactacatttgggtcctagttctttgcaagtagaatcactggatgctttggatagcgatatactgtatgttaacacaggagttctcgagcagcatcataaagagggttactatgaacccagtgtctaccaaatcacttcaggcatttgcacaatgtctgaagctgaaccattcgaagttttagaaactggaaaagatgtaaaaacgccatctaagctagatgagcaacttaatcctgggttggacggagatgaagctgagaaacacagcttagactgtggtacagacaccagtcctgtgatgagcaagagaaccctttcttcaccaggatcaggaccatgccagcagtatgtaaatgaaagcaccaccagtacacagtcgactgataatcacccaaacgacctacccgctccgagatctcctgaacaatccgcgtgttttcagaatgacaacgattcgggttcagtaggcatttgtcaaagcagcaggcgaagaggtatagatgaactttgcggtaagctgcaaagtttcaaagtttccagcgccgtaaaaggaagctacgtagctatgggtgcacctcgtccgaagcctggggacagcacgagccgatcttcagccgcgatgctcaggaacatagagaacacaactgctgttaaaactgtccgtcctcctgtcaagccaaacgccgatggtaaggactcgtctaggcgagccctgcagcccataagcggaaggcctgacatgaagctgagaaacgcagccttaataagtgtgtcgtgtttgtgttcaaccctttgttgaaagccaggtccgtgtatttgtgcagcttgttgtcatgaagctgctgtgtgcgtgtcatttagcataagcgtgcgtgaagttctcctaaacgacctaccaaatatgtgatctcttggaggtcacgcgtcttttcagaatcacaccgtttcgggttcagtaggcatttgtcaaagcagcaggcgaaaaggtatagatgaactttgcggtaagctgcagagtttcaaagtttccagcgccgtaaaaggaagctacgtagctatgggtgcacctcgtccgaagcctggggacagcacgagccgatctgcagccgcgctgctcaggaacatagagaacacaactgctgttaaagctggccgtcctcctgtcaagccaaacgccgatggtaaggactcgtctaggcgagccctgcagcccataagcggaaggcctgacagtaggtagttcggcggttccttaataagtgtgtcgtgtttgtgttcaaccctttgttgaaagccaggtccgtgtatttgtgcagcttgttgtcatgaagctgctgtgtgcgtgtcatttaacataagcgtgcgtgaagttgtgttatggaagtggctaaatatgtgttcgttaggaggtcaattggcttgaactgaccctgctgttccgtgatttctgtctaaatatacttgtgtggctgtgtcactttgattggccttaaaaaaaaaaaaaaaaaaaaaaaaaaaaaaaaaaaaaaaaactcgaggaggggcgccggtac

SEQ ID NO: 108525 - DNA, 470 bp, Zea mays
  Clone ID: MRT4577_30468C.1
ggacctttgggctgatttatgtgcttgtttatgtgcttgtttatgtgcttgtcagtcaaagtaataaggtagtagtataagtaagaatggatattcttctttcctgttcgcgactacgctgctccgtcgtggtggtaagcgtgggcgtggtcttagtcgtcttcgtggtagtggacgtaatggtcgtggcacgcatttcgatgcggagattgttgttattagtagtgctaagattatggcttctgttgtgttgattattaaggttagtgttggtggtcctgaggtggttattgagggtggtggtcgtgatcgtaatattcgtaagcgtggtattagtcgtggtcgtcttcgtcgtagtcgtaatcgagttggtttggtctggtgacggtgtatgagagctgagaggatgatgatgaggaggtgcacaacaaacacaacagtggtgcttagcaaacaagacttcgctaatc

SEQ ID NO: 108526 - DNA, 1005 bp, Zea mays
  Clone ID: MRT4577_30469C.1
cccacgcgtccgcccacgcgtccggtatgttaacacaggagttctcgagcagcatcataaagagggttactatgaacccagtgtctaccaaatcacttcaggcatttgcacaatgtctgaagctgaaccacgtccgattcgaagttttagaaactggaaaagatgtaaaaacgccatctaagctagatgagcaacttaatcctgggttggacggagatgaagctgagaaacacagcttagactgttgtacagacacgagtcctgtgatgagcaagagaaccctttcttcaccaggatcaggaccatgccagcagtatgtaaatgaaagcaccaccagtccacagtcgactgataatcacccaaacgacctacccgctccgagatctcctgaacaatccgcgtgttttcagaatgacaacgattcgggttcagtaggcatttgtcaaagcagcaggcgaagaggtatagatgaactctgcggtaagctgcagagtttcaaagtttccagcgccgtaaaaggaagctacgtagctatgggtgcacctcgtccgaagcctggggacagcacgagtcgatctgcagccgcgctgctcaggaacatagagaacacaactgctgttaaagctggtcgtcctcctgtcaagccaaacgccgatggtaaggactcgtctaggcgagccctgcagcccataagcggaaggcctgacagtaggtagttcggcggttccttaataattgtgtcgtgtttgtgttcaaccctttgttgaaagctaggtccgtgtgtttgtgcagcttgttgtcatcaagctgctgtgtgcgtgtcatttaacttaagcgtgcgtgaagttgtgttatgcaagtggctaaataggtgttcgttaggaggtcaattggcttgaactgaccctgctgctctgtgctttctgtctaaatatacttgtgtggctgtgtccctttgattggccttaccgatcacatgcaatgggatcacatctagcgtgcttt

SEQ ID NO: 108527 - DNA, 479 bp, Zea mays
  Clone ID: MRT4577_3046C.1
caccgatagcaaatggcaaacgataaccgcagccgggcttccgttccagccggcaaccctcctgccctgcctgccactccagctgctgctacggaggttaagcctccggcggctgcttcaggtagcgaccctccagctacgactccaggcagtgattgtccggctactccaccgcaaggtccgccgggtgaacgaaagcccaagaacgatccatttccaccattccctgatccaatacctcgccagtgatagtcggaatccagtagtttccatgctatcatggatagaaaaatcggttcaatcgcatcggttctggaattttggtttcggagtctaactttttagtggagttgtgttcttagtaataagtaaatcgtgctgctatgtgaagggtgtatgggtgttaaatcataattatattttgtgaacagtacaaaagcaagtggagaaaaggttttttgtatttatcttcattgagt

SEQ ID NO: 108528 - DNA, 712 bp, Zea mays
  Clone ID: MRT4577_30470C.1
aattcggcacgaggaaactgtttctggtgtagcaggcagtgagattctttctttaagtttagcaactcctgattataaacatgaagatggtttctctgaggaagcagtatgcagaacaaagaattatactggaacttcctcggtagatcccaggcatttagacatggaggggcactctgtttactctgagggaggtactgaaaaatctaatctgcaagataatcttgcatttctaagcgctgagagtggaaaagatgaacctattatttgccatgttgagaaactggttgacgcacatgcttcttcagaaccttatacataccaaggtccttgtcaagatctaggcagacatgaagaacaagagagctgcatgtctattcctatgcaagccaaagaaagtggaggggttttgaggtctagccacacgaaagggtcagttacagcagcccaaattgatttggcaggtgatgcccatcttattgtgagtgataatgctgctgccaagcaagtgtttagtgagaagaaagaggaaacaaagtctatctctacttcagatattgatatcctccatgaaaaatcatactccagtggacacgatgaccatgctgcttgtgctgccgaaactcagttctaccattcacaaaaagcatctatatgtgatggactaaagttgggtcctagttctttgcaagtagaatcactggatgctttg

SEQ ID NO: 108529 - DNA, 697 bp, Zea mays
  Clone ID: MRT4577_30471C.1
acggttgtagccatcatcgcgtgctcgtcggatagtagagagaaaattgagatcgcaggcagttgattgaggtcgcaatcgcaccttcgcctaagccaactcaatgcttctgaagatcgtaggcgcgcgccgcacctggctgtatcctcgtgtggcgaagactgtggctgggcgctgagaacagagatgtcgcgctggatgctcatcggggcttggtgacggaccgtcgtggtcgccctgggggtggaccctagctgcgcgtggaggccggtgccaaactctccccctctgtgactactagaaggccatctccttccgcgccgccgttttgcatacaccgatgaaggggctcgtggtgtcatcgtggggtggcgcggcgacttctgggaattgcctcggcgaggattgggcgtgaggtcacgaggatttgaagaatcaccctggttactggaatctcaagtgccagccttacacttcacatgaactcccacctttggtgagttcatgcatattattccccacaacttgttgagtgatgaacatgtgtgagctcacccttgctatatcacacccccccataagagaagaacaggtggttcaagaggagccacacatttaggagtttgattcagtctaggtggcgtctcccacttgactttctggcgccaaggatggattttagatccctttatatttt

SEQ ID NO: 108530 - DNA, 243 bp, Zea mays
  Clone ID: MRT4577_30472C.1
cacactacattttacatgtcatctacctttttgttttgttttgttagatggataaattctgttaacatgtggtatataaatgggggcgggcaaaaagaggaccgaccgctgtccccacaatttttttatctggggtgtgctcccctggctaaaaactattgcacaaaagacccgagacaaactttgtggagacccccctaccactgttaaaaaaatttttcaaaattactggaccacacgggg

SEQ ID NO: 108531 - DNA, 256 bp, Zea mays
  Clone ID: MRT4577_30473C.1
gcactgtggaatctcggcaggctcaggacctcgcccgaagctacggcatcccctacatcgagacctcggccaagacccggcagggagtggaggatgccttctacacgttggtgcgtgagatccggcagcacaagctgcggaagctgaaccctcctgatgagagtggcgccggctgcatgagctgcaagtgtgtgctctcctgacgcagcacaagctcaggacatggaggtgccggatgccagaaggaggtgcagac

SEQ ID NO: 108532 - DNA, 446 bp, Zea mays
  unsure (1)..(446): unsure at all n locations
  Clone ID: MRT4577_30474C.1
ctgttaccaacggaccgtaccagccgcggaaacccaatccttgaaccctacaggataccacaggcaatcgcagctggcatattacctttatcacccttgctcctccaacaatcatcagccctattacaacagacacctttggtgcattgaggggggcaaaacaacagggttcctcctctacaacnaacggngcnagcaaacctcgcngccgacgctcagcaacagcaggcgcggccattcaaccaacnaggnncanngaacccngcnncnnannngcaacaacaacaacnaccanncagccagcnaccngcngccnacccccagcaaanncnnccatncaaccaacnagcagcanngaacccnccngcnnannnacagcagcaacaacnaccaccanncagccagcnagcnggngngagcccngcnaccnncnngacacaaccaca

SEQ ID NO: 108533 - DNA, 485 bp, Zea mays
  unsure (1)..(485): unsure at all n locations
  Clone ID: MRT4577_30475C.1
ccaggcgagccccccggcgcaaccaaaaccccaacgcgccccgcnnacgaggcgcccaaggccgagaagaaacccgcggcgaagaagccggcggaggaggagcccgcggccgagaaggcgcccgccgggaagaagccgaaggcggagaagcgggggccggggggcaagnccgcngccaaggaaggcggcgagggcaagaggggcaagaagaagggcaagaagagcgnggagaccnacaagancnacancnncaaggggcngaagcaggggcacccggacangggcancnccnccaaggccagggccancangaacnccnncannaacganancnncgagaagcncgcngcngaggccgccaagcncgcgcgcnanaacaagaagccnaccancaccncccgggagaaccagaccnccgggcgccncgnccnncccggggagcncgccaagcacgccgncnccgagggcaccaaggccggcaccaa

SEQ ID NO: 108534 - DNA, 411 bp, Zea mays
  Clone ID: MRT4577_30476C.1
tctcacgcgtccggcagcaacggtcgaccgggggaccggccggccggcgcgcgcgcgcggtggcaaataaagagcttagagccgtcggccgggatctatggggcgcgaggcggtagcgacgaggccgcccaagctaaggaggggcctgtggtcccccgaggaggactagaagctgtacaatcacatgatccgccgtgacgccgcaccaccatcgtggtcatcagggcgaccactgcggggccgccaatattgatactaatcatactattaatcacaacagcgacaatcggcagctgcccttacccgaccaccactggttagccatgagcagtgactaccctttcgggccacactcgccgaccgtcaggttacacccactgggcgtaaccaacgatcccacgggaatgcaac

SEQ ID NO: 108535 - DNA, 188 bp, Zea mays
  Clone ID: MRT4577_30477C.1
attcccggtcgaccgactctcgcaaagcaacctctatgacatctttactatcaccacacatactacaaacgtgattcttaatctccttcccttgctgacacctgatcagctgtcaacctgtcttgctcatccgtgatcatccaacacatctctccttccgaccatcctgtatagatctcttctcttca

SEQ ID NO: 108536 - DNA, 209 bp, Zea mays
  Clone ID: MRT4577_30478C.1
gtcctccccgcccctccgcagtcgcagtgccgcagctatcgtcgccaatggctctcctcaagaactccctcatgctcccggggcggttgcgccatgcggcggcggcgctcactgcgcggcgccacgcggcgacgttgacggaagagaacgcccgccggaactacaccaataacaacttctgactacaacacgcattatatggcccaccc

SEQ ID NO: 108537 - DNA, 251 bp, Zea mays
  Clone ID: MRT4577_30479C.1
gaaggtgtggaggatcggggcggatgatccccggaaggcggtgcacgggctcaaggtcggcctggcgctcgcgctggtctccgtcttctactacacgaggcccctgtacgacggcgttggcggggctgccatgtgggccatcatgacggtcgtcgttgtcttcgaatacactgtcggtggcagcgtgtacaagtgtttcaaccgagtggttgctacggcgagcgccggcgttctcgcgctcggcgtgcact

SEQ ID NO: 108538 - DNA, 194 bp, Zea mays
  Clone ID: MRT4577_3047C.1
attatggtttagttgtttacacattgagcggaggcgggcaattatttttcttttggggagggccaaaacgcataaacatgcagtgcaataatgcacagactgcggacggggcacggaaacgagcgagcgagagacacacagagggagagagcccaaggcttgatgaacgatccattcactcgacacgtctgggg

SEQ ID NO: 108539 - DNA, 1313 bp, Zea mays
  Clone ID: MRT4577_30480C.1
gccggccgggccgggatgcgaaaggctgcaagggccgaatttttttccaatcgttccttctacacactgtcgaggagggcagcgggaagggacgagtcgacgccggtgtgcggtggcggcggtcgcgcggtaacgtttcccttcagcttcgatcatgttggtggcggcgccggccacaaaaggctcacccaccaaggatttgacggctgtcgagcccggggacgagggcatgccctgagtcgtgagaggtgacaggaaacttgttcatagtcgttttcgctaccgtaggtggcgcagtcggtgttcgacgcagggggagctatgggttcggtctcggtttgtcaggcgaatggcaactacccgccgccgccgccgcaggcagaagcggagcaggtcgtcgaggatggcgttgccgtcgacaggatcaatggcaactaccagccgctggagctggtggctgaggcggggcaggtcgtcgaggagggcgatgccggcgtgaccatggaaggcgtcgcttccatcgccttgctgcctaccggtgccatctccggccatttcattcgcctcccggactccatctgctacgggctacacggcaccccaatatcttgcgagagggaatgtagccgaggagaggactaccgccttataaagctcaccatcattgattttaagagcaagagagagaaggtgcttgtggtggaatgcaggggccatgatgctgctcgattacaaaacattgaccatttgcatgggtgggaagatgacattgttggtttggttgagaaggatcacggaaatcagaaagtcttgctctcctttgaatgcgagacgctgaaggctgataaagatgcggaagatcatattgccaaatatatgccaaatctgtgtggactggacgcagttgtaaatatagggaaaatgagcatctcaggcatcaatctcgacgaggacgcctaaccaataggggacaactgatatagtgaacagtggcatctgatcatcagctctcgtcaactctgcacgaatcacatcaaacgcttacactgctctacatatgtcagtgtgatacaggtctggtaaactctgcacgaatcacatcaaacgcttacactgcactacatatggcagtttgatacgtgtctcattaccagtgcctgtacttaaaattctgtggctgtgaatcggattcaaaaccctttatacgtttcaactttcaagttcggtactgtttgtcacgctttgtacgtatgactagcattgctgtctgttatgagagtggtgctggtttcgtcaaaaaaaaaaaaaaaaaa

SEQ ID NO: 108540 - DNA, 160 bp, Zea mays
  Clone ID: MRT4577_30481C.1
ccacaacggtcccagaatggatttatatatatgcggtttggggcatacacaaaaaactgcgagctgtagcagaccgaccacccatagatttgtcatgaaacaaaggcttttccacaaggagtgacgtttaagaagcactccctggggacaattagttgga

SEQ ID NO: 108541 - DNA, 733 bp, Zea mays
  unsure (1)..(733): unsure at all n locations
  Clone ID: MRT4577_30482C.1
aattcggcacgaggctttctcatagtttaccagggttttcaatgtggctcatttcaagtccaaaatgcatttttcttgcagaaatgagttagtagccaaaccaaagtgctagaaacatagaatagagtatgtgaaatttattcaaacacttaaacctcatgtttatgttgttttacccaaagttgcacttcctccatattagcttatttagacttgatctcttcaacttgccttcatgtagacatgtgctcatactcaaatcaatatagttagtccaatgtggtgtgttggacacttaatcaccaaaacaggtagaaatgaccctatgacacatttccctttcgggaggatgggatcagacatagatagcaagaattttttgaatggaagaaacaacctttagttggatgagtttatatggcaccattagatgcttttgcgtagtatccaagaattcgaggttattgaaaaggatgcaaggtggtaaggcgacgggccttgatggtatatcccaattgaggcctagagatgtctcaagaacatatctataatatggttaaccaagttgttcaatcatattntttcggttgaccaagatgttatacaagtggagaagcatattggtatcgatctataagataagggaggtatttgtagttgtagtattactggggaataaatgacgagccatattgtgaagctagaaccatggagatagttgcgagcatagtct

SEQ ID NO: 108542 - DNA, 825 bp, Zea mays
  unsure (1)..(825): unsure at all n locations
  Clone ID: MRT4577_30484C.1
gacactcgaggcttgccgggagcaccctcctcctcctcggttcgctcattcttcttcagagttcatacctcctcagactccaccgcctctcttcttcctctcggcgctacacacaactctccgtccctctactacacccgcaatggcgtgcctgtcgccgtcgccgtccggccggcgcctgtcggagctgctggaggagaagcaggagccgttcgtcctggacctgcacctgctcgagaggggctgcgcatcctcgcgcctcctactcaacggctacgacgccgcgccgtgctggcccgccgccgccggcaccgacgccgccgccgcggcgctcaggcgcctcaccagcaagaagaacaacaagccggccgccgccgccggcaacaagcagcagcagaagcctgccggcgggctcctccgcctcctgctctccaagatcctccgcggcggcggcggcggtcgagcggcgaccccaccgcggaagcccgccgcgctgcagctctccggctccttcaagctggcgcccaccaaccccgccgccgtcgcgcctgcgccgtgctgctccgaccgtcgcctggagctggacgccgtcaagactaccgccgccgccgacgacgacgacgagaagcagcagctgagccccgtctccgtcctggaccacccgttcgacagctccccgctccacggcaacctgctgtccccgacgtccaaggacgtcttccgggacctcctggacgcggcgtacagccccgcgctgctggcccagctgctcgccaagtccgagcacctcctcatggacggtgacgntgacgccgacgcagacga

SEQ ID NO: 108543 - DNA, 403 bp, Zea mays
  Clone ID: MRT4577_30485C.1
ggcccccgacatttattttattccatcccgacgggggaggggcccccaataaaacatgcaaaaaaaccgcaagggcttgcttattggggggggcccgcccgcttaaaaaaagggggccggccgggggaacatggaaggacccctcggctggccccctggggaaaaatctaagggatcttgcacccccaattttcggggaaaaaagcccggcacctgtacttgggggggcccttgtcccgggacaccgggacccaatttttgcaggggggggcccacttggggaggagggcgtccaaagtccacaccccccacaaggtggggcacttcccgaaccaaaactgtttttttgtcggcggccctgaaagtcctttggccaccgcccaaaaaaccaaaagggcctgga

SEQ ID NO: 108544 - DNA, 548 bp, Zea mays
  unsure (1)..(548): unsure at all n locations
  Clone ID: MRT4577_30486C.1
gacgctttactcaccgttagggcttttgaatgcgtcatacgctgttagctagaacgcgcacaggtccttccgtgatacgccatacagccctcgtaggtgatccaccaatcggccagtgcttagcgtacacaccccgaccgggatggcggccacaggaaacccccttagcgtagtaccacctcgccggccgtggtgccctaggagtctgcccgctccgaggccaaagcccatgccaaagctgctgctagtgctgtagccacatgagctgcccccggcctaacaagaagaacggcgcgcatgactgggcaaggccgcagcntccgtgcatgtgtgtcgcatactgagccacgtagcgtcacctaccgggcggcgacgcgtaggctgatgctcctgcatgatgcaggagagactcctgcagacgagcaagaagcagctgacgaggaggaggctgctgctgaatctcactgctgtagccgaggatccagccaaggacgaccctgttgctgaggctgacgctgttgatgccaaggagctcaacgtggactacc

SEQ ID NO: 108545 - DNA, 398 bp, Zea mays
  Clone ID: MRT4577_30487C.1
gactgttaataccctttctcaaaataaaacagcctcggatgtcacattcgtacgtgggaacctaggctgttgaccgcgaaacgtataactgaaccgcgctcgacgcgatacagtccaaaagccatgtatgatgaatggctttgcagccagccggggtcgccagttcctgggcctaagctaatctcttgctgatggtctaaagggcgtctaggttgttgcggggcattggcgcctccatgctgatgaggaccaaggacgtgctccggagcttggcctgctccagaacggacccccctgttgcggggatcaaatttttgttgttggccctggatgccggcctggaatgggcactgaagtagaaggtgaatccagggaacagacctggtgcctggtggatc

SEQ ID NO: 108546 - DNA, 319 bp, Zea mays
  Clone ID: MRT4577_30488C.1
gtctcactaacttctgtcctgcttatactttttgccctcgccgtatcttccaggggaggggcacaggaagattctatggccatcaacaccatgacgttggtgaacggcatccaagacgtcccactgagcgaaaacgaccttgacctccaggagctcgaccgcttcgtcgtcgatgagcacaacaagaaggcccatgctcttctggggttcacgatgcttgtgacggccaagacacaactgtgcgctggcaccatgtactatatgactattgacgagaaggatggcgaattcaacaacctctactactctgacgtgtgag

SEQ ID NO: 108547 - DNA, 268 bp, Zea mays
  Clone ID: MRT4577_30489C.1
tgcatttccctccctgtttcagtaaaagatgatgaaagccactatcaatcctcactgctgagtggcagggagaagcagatccactctcagctcttttctaatcttgtatcttagtgctagaagtctctccaggctattgcatgggcatttgttctctgttggagctgtaagcagatgaacccaagtagagaagatagatcttggaaggagagatccattgagtccagaagccagatcagcaaatggaggaacctcggaggtgaccaga

SEQ ID NO: 108548 - DNA, 317 bp, Zea mays
  Clone ID: MRT4577_3048C.1
ttttgtagcaccaaacgagagattcatgaaatattgcaagcctccaagtttgtcgcgtacagagactgttggagcattgctttaaaatcccaaacagagcccttaaatactatcttgatgagaaatacacgcctatagctctaaaacgctccaaatgtgcatgacacaaaccacattgctacaaaattccgcacaatctaatatatagcgaacaacctattgcgcataaccgaactgcctcggtcgcagcaaacacaacttcagagatatatgttttattagggtaccgacgccccgattctggtggctcgagggcg

SEQ ID NO: 108549 - DNA, 212 bp, Zea mays
  unsure (1)..(212): unsure at all n locations
  Clone ID: MRT4577_30490C.1
gnnnnttgcgattgcgtacctcgcaggcggccgggaatgcttcctcatactccgaagtttcgaggaactcccggcctcgaggagatcgtcacaatgatgggagggcgcgctctcctgctgctcctggtctcggcgctgctcgttcacatcagagcctctgacccgctgccgcacgacccgtttgatgaggacatccaggtgtagatgcatcc

SEQ ID NO: 108550 - DNA, 272 bp, Zea mays
  unsure (1)..(272): unsure at all n locations
  Clone ID: MRT4577_30491C.1
gtgagagaaggagtgaaggaccgangagggaaacagagaagatnggcgacgaagcgcgacaaccgagtcggacggcganngctccaaccccgtcggttggtggcgcgactccggcggccctaagncgncggccctgtcgtattcctccttcggttccgcccgggacntnggttggcggcgccttccttngantcaagcttcggaaattgacaaagcttatnaccaagaagggtttnaaggtcatttcngcaatncaggggcttnncaaagtt

SEQ ID NO: 108551 - DNA, 476 bp, Zea mays
  Clone ID: MRT4577_30492C.1
tattcggcacgaggcaacgccacgccaatagcgggcgcgcacccgacagccttgaagcccgctcgctcgctcgacaggcgagagagacgagatccgctccggaccggcggcgagaaggatcgccgaaggccgggcgatgccggtgacggaccaccagagctcatctccctcgcccttctccttcggacgctcgctgctctcgctgcgcagggaccccaccgccatgccgtcgggcgaggaggccgacctcgaggcgttccagcgccacgtggcgtcgacgctcgcggagcttctgcccgcggcggaggccggggtcggtggtagcgacgccaccgccggggcgggcgaggagttcctctccgccgcgtggatccgccgcctgctcgaggccttcgtgctgtgccaggaggagttccgcgtcttcgtcgcccaggcgcggtcctgtgctggggcgctctccttcggccgcgcgcgcg

SEQ ID NO: 108552 - DNA, 1704 bp, Zea mays
  Clone ID: MRT4577_30493C.1
tacacctgccgggaaaaaaaaaaaaaaaaaaaaaacgcatcatccccttccaatctcgtcttcccagcacccgaaccgatcaaattcacttccgctcgattctccgggagggggagggtagctgaaggacatcccggggacgcaatgcgcgtcctcgccgtgttcctcctcggcgcagcgttcgcggcggcggccggaggcggcggggagcttccggagttccgggaagctccggcgttccgcaacggcgcagcctgcgcggacgcgccgacgatccacatcgcgatgacgctggacggcacctacctgcggggctccctcgccggcgtcctctccgtgctccgccacgccgcctgtccggagtccgtcgccttccacttcgtcgcctcctcggcctccccggcgcgccgcctcgcctcgctccgccgtgcgctggcggctgccttccccacgctcccggccaccgtgcatcgcttcgacgcacgcctcgtccggggcaagatctcctcatccgtccggcgcgcgctcgaccagcccctcaactacgcccgcatctacctcgcggacctcctgccgcgctccgtctcccgcgtgctctacctcgactccgacctcctcgtggtcgacgacgtggcccgcctctgggcgaccgacctcggccccgacgccgccctcgctgcccccgagtactgccacgccaacttcacctcctatttcaccgacgcgttctggagccaccccgagtacaccgccgtcttcgccaaccggacgcgcgtcccctgctacttcaacaccggggtaatggtcatcgacctggacaggtggcgctccggcgggtacaccgcgaagctggaatactggatggaggtgcagaagcaggaggccaggatttacgagctgggctccctcccgccgttcctcctggtgttcgccggcgaggtcaaggccgtggggcaccggtggaaccagcacgggctcggcggcgacaacgtggcgggccagtgccgggagctgcaccccggtccggtcagcctgctgcactggagtgggaaggggaagccgtggctgcggctggacgccgggcggccgtgcccgctcgacgcgctctggatgccctacgacctccttcgccgccgcggcgctcgggacgatctcctcgccgccgtctcctgacaatgctgtccgcgcatcgctgcagggcgatcgatttgctcgcgtccgatcggatcatatgccacggcgcttggctgctccgctcgttccgtcgtcccacgggtcggcgtcggtcaccaagtcacagacacgttggacccacctggacactctcctctccgcatgggtccatgcgcaatggcgttagttggtgtggccctgtcggtactgaagtccgtcggccccactcgttggtggcggatggggatttttggggtgggggccaaggtgaaattcagacatgggctgtgtacagctgttgtttttggcctgttgggatattagttctatattctttttattgtgttcttgttgtagattcttgaagaatctacctccatataatagacaatagtgcaggcacaggtttatcaccgtggaataaaattgggtatatttggaattagggtttatatatatttataaaaaaaatgatcgtcagaggttagggctcagcaggtggaaacaaggagagttgttcttgggcaaaaa

SEQ ID NO: 108553 - DNA, 635 bp, Zea mays
  Clone ID: MRT4577_30494C.1
ttgcgaagttgagagatgcaccaacactttccctaaggcacgcacgtaaacacgttgatgagaagatcaagatagaagaaggaccagtgcctgatggatggcgagtcagaatctcctctccttgccgcagttgttgctccgacccgtgcaggcgaccgtcgctaagtcggcggctatgaatgagccgttcgtcgtgagggtcagctctagccctccggccaaggatggaggcgacaggcacctgtgattcgcgaccaagtagaccctctgctacctcgatgctacgctggccggagactatggattcgacgacaatgggactgtgggacacggagggcaccggggtacttcatgccaccgaagtggttgtcctacggcgacgagatcgacggccgctactccatgctggaggcggaggacaccttcgtccaggagatcttcatcaagatgggaatgatgctgccgtataccgcgctagcgtggttcgagactgacgtacatgacgaccggggaggcctagaactactgagtcgactcctacacgctcatcaacttcaatatgggtgtaatgggcttgtgtgagtaccgccggctccagtactggaacaactcgagctccatgggaaagcagtact

SEQ ID NO: 108554 - DNA, 2184 bp, Zea mays
  unsure (1)..(2184): unsure at all n locations
  Clone ID: MRT4577_30495C.1
ggaggaggccccggcgcgatggagtacctgaccagcgtgctgtcatccaaggtgtacgacgtggcaatcgaatcaccgctgcagctcgcctccaagctctcccaccgcctcggggtcaacatctggatcaagcgcgaggacctgcagccggtgttctcattcaaattgcggggagcatacaacatgatggcaaagctctcccgtgagcagttagagaggggcgtcatctgctcctctgctggaaaccatgcccagggcgttgctctttctgctcagagactgggttgtgatgctgtcatcgtcatgcccgtgacgacaccagaaatcaagtggaaatcagtggagcggttgggagcaacggtggtccttgagggggactcatatgatgaagctcagtcatacgcaaaattacgatgtcagcaagaagaccgcacattcatacctccctttgaccatcctgatgtcatcactgggcaaggaactgtcggcatggaaattgttcggcaactgcaaggtccactgcatgcaatatttgtacctgttggaggcggtggattaattgctggaattgctgcctatgtaaaacgggttcgcccagaggtgaaaataattggagtggaaccctccgatgcaaatgcaatggcattatccttatatcatggtaagagggtcatgttggagcatgttggtgggtttgctgatggtgttgctgtcaaagctgtaggggaggaaacatttcgcctgtgcagagagcttgtagatggcattgttatggtcagtcgagacgctatttgtgcttcgataaaggatatgtttgaggagaaaagaagtatccttgaacctgccggtgcccttgcattggctggggctgaagcctactgcaaatactataacttgaaaggagatactgtggttgcaataactagtggggcgaatatgaactttgaccgacttagacttgtaactgagctagcagatgttggccgaaaacgggaagcagtgttagctacatttctgcccgaggagcacggaagcttcaaaaaattcacagaattggttggcaggatgaatattactgaatttaaatacagatatgattttaatgcaaaggatgcccttgttctttacagtgttggcatttacactgacaatgagcttggagcaatggtggatcgcatggaattggcgaaactgaagactgttaatctaactgataatgatttagcaaaggcccaccttagatacataattggaggtagatcagaaataaaagatgaacagctgcaccggttcatttttccagaaaggcctggtgcccttatgaaatttttggatgcattcagccctcgttggaacatcagtctttttcattaccgtgcacagggtgaaactggagcaaatgtattagttggtatacaagtgccgccagtggacttcgatgaattcaagagtcatgctgataatctcgggtacgagtacatgtcagagaacaacaatgagatatacaggttgctgttgcgtgacccagaggtctagtataataggtgccgatgggttcctttgctcctataatttggtgtcacttttgaagtataaggttccactccaaggtagaaggtgcaagtttcttcttcagttggaatgcagtcattgccaaatataccttcaatgtgccatctcaccatctgtttactcagttagatcatgtagtgtatcagtcgtgtatttttattgttgtgcttcgtgaactcacttatccgtttgcggcacctagagtgtgtcaaataatgataactaatatgatatctaaatgtctgataatatatatgtatttatgatttgggcagcatcgttgttgtaaagtgtaaacccttgtccctttgcaatattgagttcttttaacaaatttgagatattaaaaaaaaaaaaaaaggcggcgctcgcgatctcgcgatctagaacctcagtttagatcatgtagtcccccctggntcggtctgcctgacggatctttgtggtgccatccccccccggttatttccaatcgtaactaaatcttctctcgctttttccgccttgtgaccccaatagctcttccccgttcgctctggctctctcggtccctcagccttttttatcgttccatcttttttgtaacccacctcttttcctcttgatctctcc

SEQ ID NO: 108555 - DNA, 2253 bp, Zea mays
  Clone ID: MRT4577_30496C.1
ttcgggagaggatttgacgaggcaccgtcccagtcaccaccatggcggccgccgccaccaccgcttcgccctcggcctccttccctgcggcatccctccgtcgcgacgcgcgcaggacctcatgcgtagccgccgccgccgcggcgacgacggccgctgaggcggggctcgcggccgtcccggcgccgccgccaacgccgatggttcgggtggtgccggagtcactgcagcgggaaagcgggtgcctcgtggagggatttagggcgcgcggtgcgtgcgcggcggatggggaggggtttggggacgccgcgggggaaggaggaggccccggcgcgatggagtacctgaccagcgtgctgtcatccaaggtgtacgacgtggcaatcgaatcaccgctgcagctcgcctccaagctctcccaccgcctcggggtcaacatctggatcaagcgcgaggacctgcagccggtgttctcattcaagttgcggggagcatacaacatgatggcaaagctctcccgtgagcagttagagaggggcgtcatctgctcctctgctggaaaccatgcccagggcgttgctctttccgctcagagactgggttgtgatgctgtcatcgtcatgcccgtgacaacaccagaaatcaagtggaaatcagtggagcggttgggtgcaacggtggtccttgagggggactcatatgatgaagctcagtcatatgcaaaattgcgttgccagcaagaaggccgcacatttgtacctccttttgaccatcctgatgtcatcactggacaaggaactatcggcatggaaattgttcggcagctgcaaggtccactgcatgcaatatttgtacctgttggaggtggtggattaattgctggaattgctgcctatgtaaaacgggttcgcccagaggtgaaaataattggagtggaaccctcagatgcaaatgcaatggcattatccttgtgtcatggtaagagggtcatgttggagcatgttggtgggtttgctgatggtgtagctgtcaaagctgttggggaagaaacatttcgcctgtgcagagagctagtagatggcattgttatggtcagtcgagatgctatttgtgcttcaataaaggatatgtttgaggagaaaagaagtatccttgaacctgctggtgcccttgcattggctggggctgaagcctactgcaaatactataacttgaaaggagaaactgtggttgcaataactagtggggcaaatatgaactttgatcgacttagactagtaaccgagctagctgatgttggccgaaaacgggaagcagtgttagctacatttctgccagagcggcagggaagcttcaaaaaattcacagaattggttggcaggatgaatattactgaattcaaatacagatacaattctaatgcaaaagatgcccttgttctttacagtgttggcatctacactgacaatgagcttggagcaatgatggatcgcatggaatctgcgaaactgaggactgttaaccttactgacaatgatttggcaaaggaccaccttagatactttattggaggaagatcagaaataaaagatgaactggtttaccggttcattttcccggaaaggcctggggcccttatgaaatttttggacacgtttagtcctcgttggaacatcagccttttccattaccgtgcacagggtgaagctggagcaaatgtattagttggtatacaagtgccgccagcagaatttgatgaattcaagagtcatgccaacaatcttgggtacgagtacatgtcagagcacaacaatgagatataccggttgctgttgcgtgacccaaaggtctaatgtcatatgcctttgctcccataataagttggtgacacttttcaaggaagattttgctccaaggtagaagttgcgagtttcttctaaagttgaaatgaagccatcaccaaatgtagcttcggtgtgccatctgtttactcagttagatcatgtagtgtatcagttgtgtatctttgttgttgtgcttcgtgatctcaatttattgctttgtgcacctagaggttgtcaaataatgataaccgatatgttatctaaatatctaataatgattatgtgattgtgatttgggccgcatcactgctgtaaagtgtaaacccttgtctctgcaacatgagttatcaacaaatttaagatttgaatgttcaaaaaaaaaaaaaaaccgagggggggaccgggaccc

SEQ ID NO: 108556 - DNA, 216 bp, Zea mays
  Clone ID: MRT4577_30497C.1
acgacataatatactttgcacggttcaaaaacgacgttaaaaagtagaaatgtaccttaataaccatccgaagctgagaaaaatttgccaattttaacaaaaacagatttctttatccagaaaccttatcaggcatactatacatagaaggatggcgacattggccggcagctgcttaacggttacgtgagtcaacctgaggatgtgaaacagcat

SEQ ID NO: 108557 - DNA, 152 bp, Zea mays
  Clone ID: MRT4577_30498C.1
aaccagggtttccgctggtgtctgtcacagcgcacacggtagtggtcgtcagcatggggcggcatcagaccccgtaggcgggcttcatgcgcgggaacgacgaccatggtcccagccaacgcgatatccctctgggccgggcacatcactca

SEQ ID NO: 108558 - DNA, 234 bp, Zea mays
  Clone ID: MRT4577_30499C.1
atatcatcagacagcactgtgcttataaactgacattggggatacacaacacgatcgggaggcaaggatcaaagaaagaaatttaatttaaaaacattagaagaaaaaggagccagtatacctaccgtgcacaggatagacaccttggtacggaccgccttgagctggttcttggcatccaaggtctttaccttgctggcgggctgcttaagttaagtggtaaggccctcaata

SEQ ID NO: 108559 - DNA, 672 bp, Zea mays
  Clone ID: MRT4577_304C.1
atggaaaacccctgggtgattaggacttcctattgctcagaggaggaaggctttcctcaccttcttcgaagctgcgcactgcgcctggggatccgcaagaagcccgaatatgtctggaaagagtaccgtgaaaatggaatggaaaacaacaaaaacaccccaacctggaagaaaagagtccatgctctatcaggaggagatcccatagaagatgatcccactatcgtctacatggccggatacctccacaccctcgacaaccactacgatgagctctcctcccattgtacccacctaaactcccgagtggaaagcctagagcagcaagtcaaagagcttacgcaagagaaggcatctctccaggagagtctcagcatagtggaaggcgaggaagccaacacccgtgaggcctatcggaccttgaagatagactttgacaagaagctaaaggcactcgcccccaaaaagaagatccagaagaagaccactaaccaaggatgccagacagagaagaagaagaagaaggcccctctagccctacctccccccagaatcgatgactggtccgacgaagaagatgtatccctagccagcctcgatgatcttctcaaggcatttggggacaccttagacaaggaactcgctagcacctcgaagaacgccctcgtgtag

SEQ ID NO: 108560 - DNA, 423 bp, Zea mays
  unsure (1)..(423): unsure at all n locations
  Clone ID: MRT4577_30500C.1
ggggggggggccaaaaaacaaacaacggtgtgcctcctctcncccgnagcccggaccctcgcgagggtggtcgctgactgcaccatcactgcggcggggtacctgggcgtgtttttatcttttttacttcaccctnctaccatcccggggggggggggttgcttccattgcctgcaccttcctgacatataactcaaaaaaaataacccaccttcacaataaatttgtgtcatcatgattcgttccatattagcgcaaatccaagcagctgggagaccgccattgccattgcccgnaagggctattgtattactattattatatgttcgtcgatttttttgctataaattgaatgataaaatgattgtagctactgnnnaaaaaaaaaaaattnaaaaaaaaaacaacatcctcggcccctct

SEQ ID NO: 108561 - DNA, 470 bp, Zea mays
  unsure (1)..(470): unsure at all n locations
  Clone ID: MRT4577_30501C.1
ccaaaatgcccngacnggccagccnnncaaccgcnccnncagcgggagcggggcanccagggacanngnggngnccagnggcagagcnnacccgagcgcccngaacaagaacngcagnnncgcnggcgccgngaaagccagcagcgangnagcngagaccgcaagcgncccgagcggggagggagcncccgcnnggnncagagngacangnngnncaaaaanncngcnggaaggaagggcccnngagcnnaggacaggcaggaagncnnggggcccacgnagngagngnacaannncngnancncaaanaccgngcncgnngccagnnngnaccgnaccanananaaaccanagaancngnngccacnnagaagncnggccaagggcagcngnaaggcnncacaagcnnanagccnggaaacannagacanngaaaaacccgagcagngaanaaaggangcccaaggnag

SEQ ID NO: 108562 - DNA, 420 bp, Zea mays
  Clone ID: MRT4577_30502C.1
ctattatgtcattttttgtcatggacttctccacagagaaacaagggccccgaaagaacatgataacgccagaagtaccgtcaccaaggaattggggttagccaacagaaacagcggtgctgtctgaataatgggggattcccaagataaaccccaatgcaaataccgaccaaaaaggggcccgaaaaaaagaaccaaagccaaattttctgagggtgccaatcccgcaaggataagccctgtccccagtgttaaaaaaccaaaataggcgcaaactgtggggcccagatgtccaataacaaacctgcacaacttttaaaacccctgcttagagaggaaagtccggagtgtctaaaaagtgggcgcaaaaaaaaaaaccgaaggtaaattactgacgggttgcaaaaccccaagcgggcc

SEQ ID NO: 108563 - DNA, 765 bp, Zea mays
  Clone ID: MRT4577_30503C.1
ctcgaggccggccgggaaaatcactcgacgcagcaggcagcacacaacccaacactactctccctcccagtctcgccaacgccaccacccccaccattccaaacccccgtctcccaccggctgccgtttccctcccccctccctccctgcctccctcggcggctcctcgcggacggagagaaccccgctcccttgcctagggttcccggaaccctagccccgatccgtacgcgcgagggtccccggcgacgaggaggctgctgtgaggggagggggcagaaggcgcgggaggcggaggcctgtgctgtatgtcagatcgtgggagccggcgaggcggaggcggaggaggagactacggacacggtcagctcgcgaacccgctccaatggccgcagctaaggaaaaggcgtcggtatgctgccgcgatgcgcccgcgcgtgtcgctggcgccccagtcgtccccatgcgcgcgatcgccgcgtccccggtcggcaaggtcgtcgccctcgccgcgggaggcggtgagcgcgtttctgcgtcggctgctggctcaagcggcgccgtgatcgaggagatcgccgcggtccagcccaccaccgcgaaggcatcctccaaagggataccaataatgacaagagcccagaggtgtcaccctttggacccattatctgctgctgaaattgcagttgctgtagcaactgtaagagttgctggaagatctcctgaggaaagagacagcatgcgctttgttgaagctgtgctgtt

SEQ ID NO: 108564 - DNA, 902 bp, Zea mays
  Clone ID: MRT4577_30504C.1
aatccacaagcttagcagcactcacaactgaacagtgtaactaaatgataaggttagttcagtgacatctcattgatcacgatgttgttccctattttgtaatgtttagaatgcttaatgatggctcaatcgacctcacgtagagtgcattttgtttgtggcggaagtaactgtatgttaactagttagtcacatataacttctggactaatgcatttttcctctactgctactgcattgggttctgcacagtccttcctcctaatgctcaccatgtaccacaagtagatgatcattatgttcttctttagcatgctatcataaatcaatctggaaatattgtacttatctataagacccaactaatttggtggtggtttcggtgtagcgctaaatttctcttatcatggtttatacattctgcttatcatcagaacgagacactaatccactaatatattatgtgcctattctgcttcttctgtacgggcctgatagtttctctaaattttaactagcaagaaagagcatatttgccttgtgccattgtccttgatcttctgcctttttttagaaaaaggaattaaatggtactcctaacaggataagttggattattagatgccctgtgatgctttggtttattgggaaaaaagatcgcaattgatattggttattcaaagcagacacttccctactgcatttaatctttactgtatttcctttgttatgttatatttcattgccccctctttattttggttcctggccttgttcttttgtttcttctgattcattttcagttctagctgtgtgctgaagtgttattctggatgtatacttgattatttgtcagtttcctaaacgcacagcacattactaccattactccccccattgct

SEQ ID NO: 108565 - DNA, 194 bp, Zea mays
  Clone ID: MRT4577_30505C.1
acagtatgtatggccaagtaaggtgtcactgtatccatcaccccttttcaccacagtgtgtccaactgtccgaggccttttttttttgggctgaaaaaaaacaaaacaaacctttttttttctgggcgggttgtttctccaaacaactattcaatttggaaatgttcccaagaaaaggctagggaatcctgccc

SEQ ID NO: 108566 - DNA, 2567 bp, Zea mays
  Clone ID: MRT4577_30506C.1
ggccgcgacgcggtccgcagccacggccttccgtaatgtcataactccccttctcgagtccatctccaacctcatcctctcgagtcccctcccaccccaataatacatccagccggcgccatcaggcccggcaacgcgcaagcggggctgaccatcgaaccctagtccccggccgagccgccctccgccgagccttgcggccgctctgcgtcatccctcttagtctccctccgttcgacacggcttggatccgagatggaatcaccgcccctcacagctgaagcaattgcttatacagagaaaaagatggacatggctttggaggatataattaaaatgtcaaagaaaaagaatcctggaggcaagaaacccccgaggcagccgataaaaaagcatccattccagaatggcaactctaataaagggaatggcaaggttcaaagttttatggagtctagatcaaccattagacaaggtgttcttgcacagagaaggtcaaatcttggtggaaatcagttccctgctacaaagcaggctgcgaagaaggctgctgttatgccaatgcacaagggggctatccgttggaacaagccaaggtaaacaatgatgttcttttattgcttatgagaaagtttactgcattaagtgggttgttcaatttattgagtcatgcaccttggattatattggctgagaatgattgtgatgctggtgtttacatggaactgccttaacttctctggttatacacacacaagcttataaagaacaatcgatttcatattcttgtggcacaaggcctgttttcttggttgaactgctacaaatatatggtgaatatagcatatgagccttgaagcttcattgaaagttatggccttctcctttatctgctgttgcctgacatttttctatgcagtttcatggtgtaatttatagctgctggatgagtgttattttggacaccagcattaactgtctgtgagggtttcattagtgttatttgtcaactattgttggaaggactgaaggagatgtgataatggttagcgtctcatgccactggtgacggatcatccatatacagggtacgttacatgcctgagtttgaattggttttgactactggctccttggcagtgttcagtgtttatttgttgaatgatgaatgcagtgtaaatctagggtagtgctgctaattggacaattgttgtatgcctccaagggagtatattttgctactgcctcatattcaagttggctgtatccgtaacatcatgccagttttgagcatcctatcataatctgctatatgctccccttgttcactgcgtcccacagagataatgcttgcctgcatttctactggataagagtaaatcatgtgcaagtaccttagtgcagaggaggcctgtaggtggtgcttttcagaatgccaaggtcaaggagtccaaccaggcagcaccaaggacgatggatgcactctttgcacagatgaaggcgcaacgcttgaggacggtacctcaacagcaggcaaattcttccccctggagtcatttcaaccagcatcgacgtgttcagcagcagcagaggcgaggcagagggtatggtggccgtaatgttggcaaccaatgaatccaactagacatatctactgcatcggagccctttctcttcactggtcttttggaccttggaagaaaggacgccccttggaaaatcaaacttggctttgtttattggaggggtgacaatgggctctaacttggctttgtttattggaggggtgacatcgggctctaaattttacactataagatttaaggatctgattaagatcaggccctatttctattcatttttaaactaaaatttatttagtgtcctactattttgtgaagcgtttggatcgtgatccattaccacctcacctttggacgtggacaggatatgaagcgaagtttgctccgttgcttatgatgcttggtactcgagcactcctgctcatgtgagatactaatgttttgattttgatacagtgcaagtaccttagtgcagaggaggcctgtaggtggtgcttttcagaatgccaaggtcaaggagtccaaccaggcagcaccaaggacgatggatgcactctttgcacagatgaaggcgcaacgcttgaggacggtacctcaacagcaggcaaattcttgccccctggagtcatttcaaccagcatcgacgtgttcagcagcagcagaggcgaggcagagggtatggtggccgtaatgttggcaaccaatgaatccaactagacatatctactgcatcggagccctttctcttcactggtcttttggaccttggaagaaaggacgccccttggaaaatcaaacttggctttgtttattggaggggtgacaatgggctctaacttggctttgtttattggaggggtgacatcgggctctaaattttacactaagatttaaggatctgattaagatcaggccctatttctattcatttttaaaaaaaaaaaaaaaaaaaaaaaaaaactcgagggggggaaccgggtaccc

SEQ ID NO: 108567 - DNA, 1055 bp, Zea mays
  unsure (1)..(1055): unsure at all n locations
  Clone ID: MRT4577_30507C.1
gccggccggtccgggaaaaaaaaaaaaacttaaacatagagactagaacattgcaaacattcctcccgagtggatcctatgacagcgccgtgtgggggggggggacgtgatgggaatagatgaagtccatgtcttgggtcaccactcccagcgtcgtcatggacaagacaccgagtataagtatggcccagttcgccttgctgtagaaaccatcgcagtccacgactttcgattctcactcattcattcgcttcttgcaatcttctcttcttttgaacatatattcaacttactctttactcctccaacatgaaggctggtgctctcctcgctctgcttgcggcgcccatggcggccaatgcccactacatcttcaacattctcgtcgtcaacggccagaccattggtggcgagtacgcctacgctcgtaagaacagcaacgcgtacaaccccgtcatcaccaacgacattgtcaactccaacgacctccgctgcaacaggggcgctgtcgctggtaacaccggtacctacaccgtcaaggccggtgacaagatcggcttcaagatcttcaacaacgagaggatcgagcaccccggtcctggattcgtctacatctccaaggctcccggaaaggtcaaggactacgatggcagcggcgtctggaccaaggtcatggagagcggtcttgccaaccccagcgcccctggtgttgacaagagctgggccaactgggacaaggataggctcgagtggaccatccagaagagcattcctgctggtgaataccttgtccgtgtcgagcacattggtcttcacgagggtcacgttggcaaggcccagttctacatggagtgcttccagctgaacatccagtcctctggcactggaactctcggccccactgtcaagatccccggtctctacagcgccaacgatgccggtatcaagttcaacaagtggaaacaaccccagtcttaccccatgcccgggcccaagctctacgccggncagtaagcgattcgcattgccagccagtcgtcaagcaaacgagcagg

SEQ ID NO: 108568 - DNA, 1638 bp, Zea mays
  Clone ID: MRT4577_30508C.1
taccctcgaggcctgccgggctctttctcttcctccttccccaagtcggcgcggtagcttcccgtgtaccgtacacagcaggatcctccgccttccttgtgttccgcgcttccacaacagtttaccgcaaggaaggaaccatggacatgaactccaacgccaacaacagcactgccgcagcagcatcggctcccatcaacaaccagcaggaggctgtggtgtcatccccaaccagaaaggagcaagccaggaaccccaagaaggcgcgggcggcgccgcagcaggcgggcggcagcggggagcctaggccgcggcctccgccggacgcggcgcacagctgcccgcgctgctcctccaccaacacaaagttctgctactacaacaactacaacctgacgcagccgcgctacttctgcaagacgtgccgccgctactggacacacggcggcaccctccgcaacgtccccgtctgcggcggctgccgcaggaacaagcgcgcctccagctcctcctccccgtttccgggcccctccagcaccgccgccaccagcgccgcgatggagaagaccgtcagcacgcggctgatgctgatggcgaccagcaccatggcgatgccctccccgacggcaggcctgtttgttcccgatgacatgtccccggcattcacgccgacgacgggcggtagcggcttcgacgacctcgccggcatggacgagcagcaccagcagggcttcctgcccttctcgccgctgtccctgtccgaccaggcgccggagctggctcctggaggaggaggtgacacgacgccgtctttcctggacatgctgacaggagggtatctcgatggcggcggctacggcggcatgagcggtggcagcgatgcgatggacatgccgttctcgctgcctgagatggggcccccgacaactgatccaatgccgtttcagctccagtggacgtcatcagagcttgacaactacatcaacgacgacggtggttatgcagcaggaccagccgccggagtgcagcagcagcagcagcagcagcagcagcagattaatggtggtgatcaccagaagcaggacgagaacaaagaggcggggaacggcaaaggcaacgacgacggcggcggcgggtcgtcgtcggtgtacagcttctggatgaacaccagcggcagcgacggggcagaggggtagtgcgccactgccagtgccagccacaggaggaggcgaaagtgctgctgcaaactccctcgcatcatctggtcggtgcaagtgcagcagacatccttcgtcgacgcaatcaaatcatcaaaaggtggcaacagggagtgaaagggggaagaagttcaccatccagcgtagaggatagggtgcatgttcatgtttgatttatctgcattgtggtcggtcgtggttgcaagtcatcttgcaccaccctttgttttggttcagtttgcatgcgttcgttcgtcagagtttacttgcagcagtctttggatcgccggcagagattagttaggtatctatgctttgttttcgtcagttcgtcgttctagataatgtcttaataattcctcagtttctttctttgttaactagtcgtcgtctaaaccttttcgtgtgtagtatttagttt

SEQ ID NO: 108569 - DNA, 328 bp, Zea mays
  Clone ID: MRT4577_30509C.1
ctcgctttctaacgccactgattgagcacgcactggcacttgtgtgcgactactcatcctacaccaccagacgtggacggcgactacacagcgaatgggcgagtacacgtggtactgcttactcggcgggaagacgctgatgagacaggccgaggcggcccggacgtacatcgacgtgcgcgccgcggcgaaccccaacaggccgatctggtttcacgagagcaccgctccggcgtgattcgacggtagccttcaaggcgactccgggttcgatccgtgacacctactatctgacgcgcacagcctcaagaaccacatgcaggcggag

SEQ ID NO: 108570 - DNA, 435 bp, Zea mays
  Clone ID: MRT4577_3050C.1
ggtggcccacagtacggtgatggttttttcccgcgaagaggtgcgggcccgggaacagcttgccggtgcggaaccaggtgttgagcgcgccgccgacggactcgagcacgccgaggccgaggaggagggagcccgcgttgaagtggcggtcccggaacgaccccttgagcagcgccttccgctcgtcggtgagctcctcgatccgggcctccgccggcgacggcgacttgctggccgcagcgggcggcggggttgtggtggaggaggagtccgagccggcgccgaccgacgcgggagtggccgtggtggcgggcttgagctgctttttgagcgcgttgatcttgtcctggacggtgcgcacccggcgccactgctagccgtggatccccgcccagagcgtgtactcgaagagcccgcccattgatgagctggtgc

SEQ ID NO: 108571 - DNA, 696 bp, Zea mays
  Clone ID: MRT4577_30510C.1
ccggggtatccctttcgcaaagcagcaacaaacgcgacggccagaaatgtcacgggccgtaacgacagcacagcagcgtcacgatactgccttgcacatccagatattctcttgcgactgttgttggattacaacaacaaggggaacaaacagccagccactgtatgctacagctacaagacaaggcaagtcttggtgctgtatgcttttgatggccggcactcaatttcgtgttgcaaaactaaccagaggtacacgtttgaggctccaggtgatcgatgcttctcaagactatttaataatcaccgtggtggattcgtggcttctctcgcctggcaatcatctccaccgtggcctctcttgccgtggcttgttcttagtcagtgatgggccacctttcagattgctcctcgtgcattcagccatgtttaccttgcgcgacgggatcgcctttctgttttcttcattgcagtttgcggagcgctttgtcgataaatttcttcctccaacaagattgcttgatgattttgacttctgcacagcttcagccttggacaccgcattcatcacttttgatatcttaggcgcctttgcagcacgagggagattctcggagctgcttcttgcacttggaggtgcagatctgcgcacatactctctctttgggtatttttcacccaatgcgaccggtgtgtg

SEQ ID NO: 108572 - DNA, 448 bp, Zea mays
  Clone ID: MRT4577_30511C.1
tttcatcctaatgatacagtttactctctacactcaagctaaagtagtgaaggatccacctcatatcttcccaatatacatatacaacctcacttctttccaaaaaatagaagagagcgtcgacaacaaagattacttgatcgatgtcattggaatgctgacacaaattggcgctccacatgtagctggttacaacaattcaagcatcgtcagggatatcttcataaaaaatataagtgatgcctctcttaaaatcacgctttggggagatcaagcatcaggtttctctactgacaatgtctgcaatcaaggcaataacaaacctattgtcataatgtttgttggatgcttagctaagcaattcaaaggccaatcatatctaagcggcactgcagcaactacatggtacttcaatccagacattcctgaagcacaagaatactacatc

SEQ ID NO: 108573 - DNA, 257 bp, Zea mays
  Clone ID: MRT4577_30512C.1
ctcagatatgttggaagtcacatcgaagactatcagaacattaccttgtgttcataggttaacttgtttttgtacacgtcttagttatttcaggcatctctttgcttaaaattgagtttcttgtaaatgtgactgatgagcgaggttagaagtggaagaaattcctgtgcatgttctataatctgacaccctgaaagcaagtttcctttcgtcattcacatgctcttgttctgccgtgactgttcaggtgtatggta

SEQ ID NO: 108574 - DNA, 441 bp, Zea mays
  Clone ID: MRT4577_30513C.1
gtgaccaactcgaagcttgcgttcttgtagtagaggtcggcagcaagcggaagagaagaggtccgaagagaagagcagtactctgatggcgatcctagttctccaggcccttctggtctctacggacgaggccaaaggacctgcagggccgaacaagcactgctggtgctgtgagtgcaccagctgaccgggcgtgtggacctgcgactacctcctcaccaagagcgcctccacctgtaagaactgcgtccccgtcttcactgacaatggcgccaccaagtacatatgccgcgacttcctgcacaaaaactgcagctgcttgatccactagactgatacacaggggggcagcctatggatccttccatgctgctaccttcgtgcgccttgctacaagcaggcagacaccaatgagccagctgttgctgctgctctgcatgt

SEQ ID NO: 108575 - DNA, 369 bp, Zea mays
  Clone ID: MRT4577_30514C.1
ctcatgcgtcccatgttctgctgcacgtctagatgcctgaacgtagcatccatcggggggtgctttgcacacgcctagaatgccatttatggacctacatgtcatgtataatgtatactcgtaacccaaaccaagaatagttgaaacggcaggcgctgtaaactatctaaactcactaactcttgcatgcaacctgatagctatggtatatggtcagctcacattcaaacactggccgtatcacataaacgtcaagactggtaaaaccttaaattgaccccactaaagcgtactggaatacatacacctttagaaaggtttcattaaaacttacaagtatagaccgatcaatctgcacaacagatgctc

SEQ ID NO: 108576 - DNA, 619 bp, Zea mays
  Clone ID: MRT4577_30515C.1
gaccctccgggctggccgggagagtggggtaattcatgaagaagttcctaatcctcctgttgaagctcccaaagaaaatgggactcccgtcgaagtggaaagcagggacacaaacattactggaataacaatgaggttaaaactgaaccaccctctacatcgcattctacctctcccgcggacctcctggcagatcttttgggtcctcttgcgatagagggccctcctgccgtagagcaaaatcctacccaaggattgaatagtaatcaaagtccagttggtgacttggcacttgctacccttgatgatcaatccaactcagttcagccaattgtcaacgtcgaggaaaagttccatatattgtgcacaaaagatagcggagtgctgtacgaggatcctcacattcagattggtatgaaagcagagtggcgtgcccatcatggccgtcttgttcttttcctgggtaacaaaaatacttcagcccttacgtcagtgcgggtgctgattttgcctcctagtcatttgaaaatggaaactttcgtctgttcccgatactattcctccaagggcgcaggtgcaagttccacttgagggtgcaaatctccgtgcaagtagagat

SEQ ID NO: 108577 - DNA, 952 bp, Zea mays
  Clone ID: MRT4577_30516C.1
ccctagttcacatgcctctaatggacaatttggaagttcaaacttatgagatatttgagaaggatgttgttaagtacactcaggtgttgatggttgtgggagcaggacggggacctctagtatgagcatcgttgcaggctgctgaagaaactggtcgaaaattaaaagtatatgatgttgaaaaaaatcctaacgctgttattactcttcatagcttgatcaaattggagggttgggaaagcctggttactgtaatttctactagtgacatgcggtgttgggacgcccctgaaaaggcagatgttttggtcgtgaattgcttgggtcctttggtgacaatgaactatctcctgagtgtcttgatggtgctaagagattcttgaagcctgatgggatttccattccttcatcgcctttgcctctcagtttgtctattgctgcaacaagttggggctggatcgttccaaagtaaatgtaaatggaggcgcgattgcccttggacaccctctgggtgcaacaggtgcccggtgcgtggctactcttctaaatgaaatgaagcgtcggggcagagactgcagatttggtgttgtcaccatgtgtatcggatctggaatgagggcagtagctgtgttcgagctatgttcggcctggctggaggtatcgaccatcactcgtcactgtaacccgatggtgatcggcgaccgtaacccgatggtgatcggcgaccgtgagcttccatgttattgcgttctaatacttgagatttttattatgactatgtatgagatattgtctcttattagtactgcatgatgagatgtgtcttattatgactatggatgagacttttgtgatgtaaatgatgagacaatggatgagaattttgtgatgtaattgatgagactatgaatttaaatattgttatgtgattgtgtgtgagatattttatgtg

SEQ ID NO: 108578 - DNA, 1923 bp, Zea mays
  Clone ID: MRT4577_30517C.1
ggccgggccgggatccagtagcaaaagcgctagagagattagagagagactccaagccaagaccaagagtaatcagaagcagctgccaaatggccaaatcccgaaagcccctgtccccagcccgcctctcaaacccctaatccctagccacaccacgccctcttccctccttccccgttggcttcggcggcgggcggccatcagcaaccagcatcgtacggaggagaagcgctgtttacacccgtctggcagggatgccgctggggcagcgttcgggggacaagagcgactcccgctactgcggggtggaggttctcgacttccccgccggggagggcctccctgccgtcctcaatcactccctcgcctccgccttcgacttcatcctcgcccctctggttgatcccaactaccggccggcgcccggcgccgttctgccagtgtcagcgtcggacctcgtcctcggcccgtcccagtggagcaaccacgtcgtcgggaagatcagcgagtggatcgatttggacgcggaggacgagcggctccggctggactccgagctcacgctgaagcaggagatcgcttgggcatctcacgtctcgctgcaggcatgtgttattcctgcccccaggagatctttttgcggcaattatgccagagttgtgaatcaaattttgcaaggcctgaccaatatgaatttgtggcttaggttgcctctggagaagtccgagcctatggatggtgatcttgataaaataaagaacaacaaccacacgctacagagtgaaatagcagactcatgggaattatggaattcattcagattgctatgtgaccatagtagccaactatgcgtggcacttgatatttcgggcacactgccatcaatgaactcattagggcgctggtttggggagcctgtaagggctgctattctgcagcgatgctttagttacaacatcattgggagatgcttattaaactatcgcgggagtaacctgcatacctgtatcagtagatggatccgcttcctggcaggaacgcggtggggttctttatggggattttctgcagtctcctctcgagcctctaatggataatctgaaacccctccctggcgacacggttcgctacgatgtcgcgttggctactcaggcgccatgagcggtcgctaagcccgccgtggagcgcgggctagctccagtccaccttgcccttggcttcgtgcgggatcgtccattcgccggtagctccatccttggagcgaccaccttggagcaggtgaaagagaacatcgacgcgtttaccagcactccacggcctctaccacaggaagttcttgacggctttgaggatcttttcaagagatacaaagatccagcaatcctctagtttttcattcaccttttttggcgaaaagcagcaatcctcggacaatacaaagcccagaaaacatattacaacctatgatcgtatggtcataccattttgttcatgctgatacaattattgctttgttcttgtattggctctacaggcaataccagcagagcagaattatgttttttttccttcactgtgtaagtagaatgcaggttttcactgtgtaagcgttcttttatactctgctagtaactgtatgatgtcttcgacattgacaggtctcaagtggacaggtttaaccactactctctgcatggtaacagtagtaaaagatcgttaaactaaaaaaaaaaaaaaaaaaaaactcgagagtacttctagaccatcatagtgtgctaactggattctataaacattatgtttaggtgataatatctgcaagatcaaatcacaatggtgttccagtatctgcaggagtgctctcaggtgatgagagctacacagaagattcccatgttcgacatgcgttaactccttaccttg

SEQ ID NO: 108579 - DNA, 143 bp, Zea mays
  Clone ID: MRT4577_30518C.1
cccacgcgtacgcagacgcttgttctgacacttgggctgtgccagacataaaggggtcaggaggacattgtagactaaggaacattttataactatcgttgtatcaaaactgttctgaactgtaatgttattttccaaccccc

SEQ ID NO: 108580 - DNA, 177 bp, Zea mays
  Clone ID: MRT4577_30519C.1
cgcacgctttcgaacagacgtgaccgagcgggtgggccgataggcattagcgtccggttgaagtggtactggccgtggttgacggccttcaataactgccgtgccagatcaagttggatgacatactcgacatccttgtggcgccgagtgtcaagggagaggcagacatatcatatg

SEQ ID NO: 108581 - DNA, 217 bp, Zea mays
  Clone ID: MRT4577_3051C.1
aaaaagggcgcccaaaacttctttgatgaactttccgaacggggaacaaattgtttaaaaagggtgaacaacgacctaaaaatccttggatacataggtaatttgccaaaaaaatttttagggggcccctggaaacagacgggggtgggggccaaaccaaaatagggggggaaaacattacccctatttacccgctcacaaaggattttcagaaaaa

SEQ ID NO: 108582 - DNA, 497 bp, Zea mays
  Clone ID: MRT4577_30520C.1
gcaagctttttttttttttttttttttttttttttttttttttttttttttttttttttttttttttttttttttttttttttttttttttttttttttttttttttttttttttttttttttttgtgggcgttttttggggggggggggggggtcccaattttggtttttttttggtcataggtttttttttttttaaattttttttcctttccattttcacataactttccagcccgaagctttaagtgtaaaacctggggtgccttatgggggaagtaacttaaattaattgggttgggtttatttgccctttttcagtggggaaaccttttttgcccccttttttaatgaattgggcaaaccgcggggagggggggtttgggttttgggggcttttttggtttcttgtttaatgatttggttgccttgggggttttggtttggggggcggttttcttttctttaaagggggtgttttggttttcctcagaatt

SEQ ID NO: 108583 - DNA, 431 bp, Zea mays
  Clone ID: MRT4577_30521C.1
attcggctcgaggccctaccaaatattttgttgtcccatctgcccagcagttattagatgatcattgccaatggttcggtcggtcgaccaaccgggctgtagcagaccgacagataaagatgggcccgtcccgtgcgctcatcaaccatctccatacagggagccggtcctagcatcaccctgatgttccctatgaacggcgtcgtgtgcacgatggatagcccgtacaaggcgaaccacgagcagtggctgaactactgaatcatacactcgttgggcaccactgatggagatgctcgccatgcctctgcttcactgtgaacccctgttgtacaccggcaagtcttgttcgccgtttggttaacgatatcgcacatcacgggcgcagtgtttgtttacgaaaagctcgccagggaacatttcctttacta

SEQ ID NO: 108584 - DNA, 430 bp, Zea mays
  Clone ID: MRT4577_30522C.1
aacaaagcatcagattatttatattctcattttataaacatgaataaacatcgataatgttcatattacatttgtaccttcggctcgacagaagttggaaatacaagagtgacgcaagagtgattacaagtcagcatgaacagtaatgtgttactgttcatctatttataggcacagaacacagcctggacaaaattacatttacgtccctgacatttactaatgaccataaagtcagatgtcgaggactaagcagtcttttctcctttaggtcggttccattttttatcatcgtcctcgtgttaagccgaagctccctccaccacagcttcggagctggttcatacttccttcagactgcaccttcattccatacacaccctgatcacaaagcccaagcatactgtaacaatcattgtcatactgaaaa

SEQ ID NO: 108585 - DNA, 393 bp, Zea mays
  Clone ID: MRT4577_30523C.1
tttcataaaataaattattttgaggtaaattctattatttaaataggttggactccaaaaacaaaaaccaataaatgaaactttcacaaatacctaaaacaaaaaaaaatattaaattatcaaaatgtatattccaaaaacaacttattattattattattaaatgaggtctttctcacaaaatgaatccaataattgtatataaacaccaaatcaagcaaaacatgtgcttcgacatgaatgcgtcaatcacttaatgaaaatttactattcaagaaaaatatttatttatttatattatcatttcattaatatctattatcgcactaaacagcccggatggtatgaccaaactaagtcgacacccaaacaaaaaggaaaaagactgggaag

SEQ ID NO: 108586 - DNA, 421 bp, Zea mays
  Clone ID: MRT4577_30524C.1
aaaaaaaaccaaagcccacttgtccaagtttcaaaaaaaggaattttttttgtgtttacatggcaaacgttaggggttaattgttgaattgcgggttacattccccaaaaaatgcggcatttacatgattccctttgcccaaagaacaaaaactttattcaaaacggggcttgtaaaaaattaaaatccattttcagtcgccttttgtcaagccacctttgcctttttgaacctttacctgccgattttccatttgataaatccggattagggtgggggctgacccaggttctttttcattccacgggacccaaaactttacccttttcttcatgacctttgatcttttttttcccatcttcaaactggaagctgtttttccaataaccacttttaagttttcagaaaatgaaatgtttgc

SEQ ID NO: 108587 - DNA, 1299 bp, Zea mays
  Clone ID: MRT4577_30525C.1
gaaagttggcaatcttcattacatccaaagcttctttcataaccgggtcgggctcagggttgtacggctccagtggtggtgaaagcctattaacccccactctcccagcgacgagcgtgcgagcactccctcgccgcccaccgcgcctcgtggcggcaactgggcggccgtcgctgccgccctacgccaggtgccgaggtgattttccgcccctttgccggcgacgagcactaccagatactctgagcctggctgccgaaacttccttttggtgtccctgttacattcggtttcgtttttgatgacttcatcaagaagcaagagcaggagccacagtcgcagcaggagcaggagcaggagccgcagtcctcagcgaagagataggttgcgcagcgaacgtgcaccccgccgcagtcgcagtcacagcaggagccgcagcccataccgtcgcagagaacggcgtggatacaaggatctcgtatgcaagaactgccggagacctgggcactttgctaaggagtgcccatctgcgcctacgtgcaataactgtaaccttccaggccacttcgcagcagaatgcacctcaaaaactgtttgctggaactgcaaagagcctgggcacattgcgagtgagtgcaagaacgaggccctgtgccacacctgcaacaaaacaggtcacttggcgcgtgattgccctacttcagggggctaacgtcaagctatgcaacaaatgttttaaatcaggccacgtcgccgttgactgcaccaacgaacgggcatgcaacaactgccgtcagccagggcacatagctcgagagtgcaagaacgatcctgtttgcaacctgtgcaatgtctctggccatgtcgcgcgcgtctgctcaaagacgactctggcttcaatacgaggaacacatacagggtggccccgttccgtgggggcgaagcgaggggcggcaggaaaagaagggtcgatcagtgagtaactagactagagcatgtgtccagcgcctaacgcgcttatcctctgttggaatcgatggccctaatggtaacgggacatcatgaggcgtctgcctaaattgacttggtttctgagagagtggagcgggaatagcggatccgctaaaacaagatctttaaaagtgtccagtgcatccaaatctgaacctgcgaaacctttctatctttgttcttcccactttcgcgctttcgaactactggttatgtcatcacttttctttgatgtttactctttttggttaggagatcagctgctaacctattttcatttctaactta

SEQ ID NO: 108588 - DNA, 512 bp, Zea mays
  Clone ID: MRT4577_30526C.1
ggccgcttttttttttttttttttacgtgctcacctcatacatctaagtaataatgtttattgggtttttttttttttttttttttttttttttttttttttttttttttttttttttttttaaccgcacccgggacaaatttaaaaaattggggggtaactatggggcaaagctcagcacaaaacccccccatttttcaaaacccccccccattattaaaaaggggtcccccccaaaccacacaggggactggatcggaaaaccgggggaaaggcaacaaaaaaaagggggctaaaaaaagaggggacccccccataggagggggggagggctatatatggaggcaggacctttagggaaggcccccaggacccaattttgagggttgcttgaaagggttgcttgaccacccaggacctaatttgggggggggcttgaccccaaaagggggggccttgggaggaaacaaatcaccgatggaaaccccacgggtggaaccaaaactatgggc

SEQ ID NO: 108589 - DNA, 202 bp, Zea mays
  Clone ID: MRT4577_30527C.1
ttttgtgtgcgacgccctctccgctgagcaccgagcgtaccccgcactacagatcacgcactgtcaatgcgaccaacacacaatgggcaacggagcaatattcaccaaataaaagctcatccaagaaaagcgaggtgctgccaacacatttgctgtaagcagccgtcaagcgcacatacaaggcccgaaccgcagccagatg

SEQ ID NO: 108590 - DNA, 399 bp, Zea mays
  unsure (1)..(399): unsure at all n locations
  Clone ID: MRT4577_30528C.1
tcgctggaatcagctgctagctatacccttggcacaactgccggcctatgtggaaatttgatcgggtcctttttgggccccacaattcaataccatggggtctccagtgtcgcaaaaagggggtgggaagtaaatggtccagatataaccttaaaatgaactttattgcaaactttaaacctatggtgtgaaaaaggctctaagctgaatgcttactataaggtggtttggaaacaaaggaatttcccgcccaggcgcacccttagcanatgaacagccttttttcccctctagatgactattatgtcagctgtaaatgtangcactattggggtggcacttgtcttgcttcacagggcgcatgtctgaacctgctcggtgtcaggggcccaaaccatg

SEQ ID NO: 108591 - DNA, 341 bp, Zea mays
  Clone ID: MRT4577_30529C.1
gtcacttctccactaacaaaaccgcatcgatctcgctgtcgtcactccgggtgacccaggcacgaacagaggcaccacccagcatggccctgcaggcggcgctcctcccatccaccctctcatccgttcccaagaagtgcaacctcgccgtcgcggcgaaagacacggcattccttagcgtatcccacaaaaaggtgcaggccgcgtccctgtcagcgagaacgcgcatggcgactacagcgcctgtggccactccggggtccatcacggaggccaacgattggaagaagaccgcgcggcatggcgtggcggagatcacagtcgcgtcatccttgttggga

SEQ ID NO: 108592 - DNA, 326 bp, Zea mays
  Clone ID: MRT4577_3052C.1
aaagagaacgttgctggagacagggcaaaggaaaattcacacctatttcgtttttttttcgcaaacgaaccacaagtttttggcccgaccaaaacaaaacttatcccaactggagaaatgacctggagagtagggtccttaaatgggggcccccaaaaacacggctagaacaatccccggtgtcccagggttgcagtttaaggccttacaggggggcggcttcggggggggatttcccgaagggagggggaagggacttacggggggggaattttttgatgttgtcaaggggggggatcctgggctttttttacaagggatgggcc

SEQ ID NO: 108593 - DNA, 662 bp, Zea mays
  Clone ID: MRT4577_30530C.1
attccggccagaggccagcccgtcctagataggaatgacattacaagatgtctgatgacatgttcttagcatgtgcatcgcaactctgctcctgagccgaagacaataccacctcttcctctcctctctccgatcttgaccatcacaaaacactgctcctcggaggcagctcctctcgtcagtggtatcgctggggcaagctcatcaactccgcttcacctccgcacgcttgttactggagaactagtttccgtggaaatactcaacgtattcggcgtacgacatatctcaggtgcatacgactagactgataacaacagtattggacagccagaaaacaacaacagcaacagaacaccatgatataccacaacgacattgccattctcacattataaacaaacctggtgataactaaagaacccttagaaggaaatatcgcacgagcataccattagaggtgaatatgcgaaacattaatacgaagctgatagtatagaagactgtgaagaccaagcgacagaagaagaagcactcacattcatctaattcttaagagagaacataatagaagaccggaaggaagatcctataatatagctgcaatttgagatatgaataacgagtgaaaatatgacaacgatcacccgatgaaactgcga

SEQ ID NO: 108594 - DNA, 417 bp, Zea mays
  Clone ID: MRT4577_30531C.1
acccataaaatcgggaaatggtactttttatttcgggggggccccatacattaaccaaaaaactttattattgaattacaaccaaaaagcaatctaaaagagggcccccccaaggaggggtggttggaaggaggcggcggggtttgccaaagcaggggggacaaagggccacaaatgggtggaattgaaagaggggggggggggaacccccaaacgggtggaaaaaaggcaagaaccggggctgggacaaaaaggaaacacagctggcggcagctagcggggtaaaaggaaggagtatttggtggtgcaaaaaaccggggggggtcagggccaccaattgggtaaaaggaaaaaattgttgttgctgaaaaaagacagcagctaacgggctgaaggggaatagggggggcgagaaaa

SEQ ID NO: 108595 - DNA, 521 bp, Zea mays
  Clone ID: MRT4577_30532C.1
taattcggcacgaggctccaacgctcaccaatccacatgtcccccaacaaggtcagggtcccgcctgccgaccggaacccgcccaacctcggcgccggccagcgaacgaagaagaactggggcacggcaaagctttaggacaatgcaaacaacgctgcgctggtcaaccaggctacctacgacaagttgctctaggaggtgcccaagtacaaacacatcaccccttacatactatgcaagcgtctgaggatcaacgggtaccttgctgcgagggccattattgactggatggcgcgatgcctcattaagataccctcggaccacttataccaatatattttcaccagggccaccaatacatacagatggtgaaaaggtctaaaaagcattggctgccctctattcaggaggagctcctatttacaacaactaccgtctttaacatgatgatcccaagtactctgactgtctaatagctccacttgacaggatcattatagagatagtcagtgttaatatta

SEQ ID NO: 108596 - DNA, 167 bp, Zea mays
  Clone ID: MRT4577_30533C.1
tcgttcatgcgtccgtatagactggtaccaagcttttttcctaaacccgaaaaacagctctatcatcctgatctgcagagcctaatccaactgaagtaactggtagataggattgttggatcctacagtcaagtgcaaatatgttaatgagcttaccagccattaaa

SEQ ID NO: 108597 - DNA, 287 bp, Zea mays
  Clone ID: MRT4577_30534C.1
atgaaattgagaaaggtgatgattgggagcacgaggagatcttcactgatgatgatgaggttgtggatgttgatatagagcaaagacctgagttagctgatcctgaggctgctcctcctgaaattaaacaggatgacaacgaggatgaactaggctgcagtgacaacttgagcaagtccggccaggagctaaagaggctgctccgccgagctgctggggaaaatgagtctgatgttgacgacaaaagcacatatgaagatgacctaccctcgccaatacctgctcca

SEQ ID NO: 108598 - DNA, 401 bp, Zea mays
  Clone ID: MRT4577_30535C.1
tagatcgcgagccgctgacacgcaagaagacaacatttcaatatactttatgaagtacacaagtttctgtatgtatatatggaaaattaagtcacacacttgcatacatcattattacatcgtatatatatgcagctatctcttgatataaggtaattcaaaaacctatcacctgcagtataatatagtggaaaatacgacggtagacattatgtaaaaccctagatatttaccacacgacgtctcacacaaactatacgtcggtgacatcgtcgacgacttccctctcgctgtttgcaccgtctccaagcctccaacgccaacatcacagttacactacggacaaggggacaacttgaccgaccatagcccgagcggcacatattttcttccactatttt

SEQ ID NO: 108599 - DNA, 312 bp, Zea mays
  Clone ID: MRT4577_30536C.1
gaaggaaaaaaaaccccccccctttctttgggggggggaaacgcaacgacacaggggggttaaaaccacacaccacccaaacaagggaaaacaaaggggggggggtatctcttctccacccaaaaaaaaaaaaaaacaccccacccaagggaagcgggacctgcccataagatgcctgcaccgaaaaaaaatttttgaagagaatgggcagggcttctgggcatgccttttttgcaaccacaacaccagggatttaatttaaaatctagacaacctggactagacctttcgcccaacaaaatatctttgagg

SEQ ID NO: 108600 - DNA, 448 bp, Zea mays
  Clone ID: MRT4577_30537C.1
ggacacaaaatgggcccccaaaaaaaagcttcgggggggcaaaaacgggaagaggagcagttggggagtcaaaaagcattaaacaacaaccttagcccacagacccaaaaaaaacgaaaacaaagcaaaaagccccaagggaacgggaaatttgggccttttaagggacaaaaaagtttttgacacagaccccccccgacaaaaacggaaaataaaacacccttaaaaaacgggaacttttgggcccgccactgtatgggttggggcactaaaacaacgggtttttctcgacccattacgggaaaaatggggaaaaagaagggtatttttttggcacgttccccccaagatggggaccaaaaaaattttagtctaaacccccttttgaaaaggaagaccctggcccacgcccaaaaaacctggggaaggtgcttttcgggggcccccg

SEQ ID NO: 108601 - DNA, 170 bp, Zea mays
  Clone ID: MRT4577_30538C.1
ctatattgaaaaaatggccgttttacacaaggggggggtggtattacacgggaaaacaaaaaaggataataaaagagtaaaaactacacaaatacacgaaagattgaaaattggctaaaaacattgcactagcttataagtttttaacacgaatgttgtttcctgctttt

SEQ ID NO: 108602 - DNA, 2411 bp, Zea mays
  Clone ID: MRT4577_30539C.1
gccggccggttcgggtggatgacctgggaaactgaggagagcctcctctccggcccccgccttcccagtcccctcatctctcgtctctcctcctgcctcctcgtcctcgccttcccattcccccgccccaaacccccagctcgattcccagtcgtctcgccccgtgatgtcgccggctgctggtggccccgcgcccgcgccagcgccagcgcaatcagcggccgccgttccgcaggcgatcgcggtaccgccggagtccggccgttcggcgcccgaggcgtcccgcagggatccaccggcccaccccgagggggccgatcccaccaatgcggcggcaaggaagacaacgtggagcgtgctggcgcagacccccgccgccgcggcggaggcgaccccagagggcggcggcatcatcggcggggacgcctcgtggccggcgctcgtggagtcgacgcgcgcgtgccccaagtcgggctcgtccgactccctcaatgccctctccgatgtttccggcccgcctccgcaggaggatacaattgctgcttcatcggttcggctacaaccagttgtggggtctattccgttccccgctgccaaaaactgtaactccagagttcctcgcttgcctgcggcttcctctcagcagaacggtgccataacccaggcttttcccgttcggcgcagtggcagccgtgaaaatggtagcaattgtggccttcgggctgccaatagtagcggaggtgacgggagcagcggcaggggtggtgatggtaactggattgatagaagccttggtactgacggcggttgcaacagcagcaatggcgatggtcccatcaatttggatgataatgtccctggcactcgttgtgcccgtgggaatgacaatgacagcagcagaaatccttctggcaatggccactggaaccacaacatacgaggtggtggtggtggtggtgatgggaacaatagaaatagcagtggtagcagcaaccactggaataataatccccgaaatagtagtagtagcaatggcgttggaggtcgtggtggttaccggggtcgccgtgaccatgagagaggggctaatttctcccctaggaacttcccaagagttccggtaatgccatatcaacagcagcagcagcctggcatctaccagcctgggccctttcaccgaccaccaccaccggctgcccatttcatggtgccacagcatttttattgccggtgtgtatagttgttcgaaaagaagtgtgatcctaccttttcatcatggattattggtcctggtgaacgcatttggtgctacctagggtttattcagcctgcttgggttcctcctcatcaggatcaaccaaatctccaagatagtattaggaatcagatagagttctattttagcacaaataatctatgccatgacccattcttgaggagacatatgaacaatcaaggatgggtacctattgacctaatcttagggttcaaccggatgagggcgtttacaggtttggtggacaccaactacatactagatgctatccgtggttttgagttattggaagtgcagggagataatgtccggaggcgcaatgattggatggaatggctgcttcattaaggccgtccactagtaaatcaggttcagatgccaagatgcagctgcatgccatattgggggaactgaatgaatagaagtcttgatcacggcgagcgggtctattggaatcgggatgatttttgtttgacgtgatggctgcacgtgaaggcacattattcaaagggaaaataattttacttagggctagcaaatgtttttatggcagtctgtatagttgtccgaaaagaagtgaccaccctgccttctcattatggattattattattattaggtgtcctgttgaacgatttggtgaccgtttgctttgcttttcttggatcaaagtcacgtaccgcagcccattcaattatatggaggagccctgcaaattgacgcatttacatgacaatctcgatgcatgctacacgtctctgcgtactaatgtgaaactagatcaaatcttggcacgtttaggagccagtgtccctgcccaggccatcgataggtcgactccatgttgtatattggctagctctgtagcttggctcactggctcttaaacgtgggaaggcttgatctagtttgagattggtgcacaagggcatgtggcatggatcaagatcgtactataaacgcgtcggtttgcaggacatagattttattttcaaagtcttgggtgatttgatcatgggcaccgggtaccggatccgtggactgatgtacagtgggtctattggaagcgggaagattttgtttgtttagatcggacgtgatggctgcacgtaaaggcactattgaggggataaat

SEQ ID NO: 108603 - DNA, 611 bp, Zea mays
  unsure (1)..(611): unsure at all n locations
  Clone ID: MRT4577_3053C.1
tcttaaangggattatgctaatactgccaaaaggcaaaagaatggtattgaggttcaaggaaagaggcttgtggttgagctttcaatggatcaagatacagttttctttggaaatctttgcaaagagtggactttagaagaatttgaagaattgattcacaaggcattcaaagatgttgtttcggttgaccttgcaatggcgtcaaatcttggttcttcaaacaagaagaatatcaatcgaggctttggatttgtgagattttcttctcatgcagtactggccaaatattattgcctcttgttttctttttcagtttaattggataaaacaaccttatacaaatatcaagatatgtgcaaaattaccttaccctactgtcctttctagtaggaaaagaagcacatatgccatttgtctcatgcattatcaagtgacgatatggcaacataatttctccatctcttatgtcataaatgactgactaatgttgcaaagaatggattttaattgttaccgttttcacatgaaaattccctgttgcattgtgggtacttttgaagaagccacagacattgaaaaatcctttgttcaacacagttatagagaaaaa

SEQ ID NO: 108604 - DNA, 471 bp, Zea mays
  Clone ID: MRT4577_30540C.1
tggcttggaacctttgggctgatttatgtgcttgtggatgtgcgggtgagtaagttccaatttggtaagatcttattattggctcccgtcatgatcgtcttgtttatacgtctcgggctggtgagtgtatttggtagtccgacggtgcttacgcggagccttcgagggggactgttaatttttccggtactaaggcgagtgataagacggagtttggtgagtcggcgaagtcgactgatacatcgaatttgatgaataagtttgggaggactattgctactataaggacgggggtagagaatactagggctaagccattctattccacttgtgtggcttgttaggtcggatagagcgctattcggactatcgatttgacgtatgggaatattactaagatcttccgtggatgaaagatctggttacccgatcttacctcggttgaggcatgggttcctcctgatgcgtatg

SEQ ID NO: 108605 - DNA, 257 bp, Zea mays
  Clone ID: MRT4577_30541C.1
cctcatgtcctaggtcagcagtttagataagtatgcggggagccaagcgcactagttggcatgcaccccctacagcatgatgggagggggcatcataagcaacgtgctttagtgcaaagacctgaagatacagatacagtattcaatgttccatacacaccacatgatcgaccaagggctggaggaatcacacatctaacaaatccgagtcattgctgagacacattccaggccaaagttcagaggcagcaatgaat

SEQ ID NO: 108606 - DNA, 1138 bp, Zea mays
  Clone ID: MRT4577_30542C.1
ctccagtctctgggcaccaaatttccggcggcgatggcggcggctgtggcgaggtcagggttccggcgcatgttctccgtctctgccttcgcgccgccgaaggcgcccgccgcgcgccccaaggccgacccatcccccaacctcttcgtctccggcttaagcaagcgtaccacaagtgaaggacttagagaagcctttgcggagtttggtgaagttttgcatgctcgagttgtgaccgatcgtgtcagtgggttttctaagggatttggctttgtaaggtatgctacgaccgaagaggcagccaagggaatagagggaaaggatggaaagggccaacattattaagatgttgggattatcattgtctcctgttccttgatggatgggttatttttgcggaatacgctaaacccagaccaccaccggaggaaacagggatgaattcgcagccccagcagtcatggggagctccatcaggttcctggggtgcacagtagatgaagtgatattgtgagagcccctccctgtcccagccctagggctcgtagcggatcgtgagggatgattttgtgtggtgtgtcgcaggtgtgaaatgcctttgttgtcccaatattcctaccgtgttgggggtggtcgcttgctcgcgtccacgtctttcacatgaattggttactgtggtagttgtagttctggatacggtaccaaaacaaaagtattgctgtcaacaatctgcaacagccgggaaaacagtcgaaaacctttgcaaataatacctgctgccgtggaaaaaaaaaaaaaaaaaaaaaaaaaaaaaaaaaaaaaaaaaaaaaaaaaaaaaaaaaaaaaaaaaaaaaaaaaaaaaaaaaaaaaaaaaaaaaaaaaaaaaaaaaaaaaaaaaaaaaaaaaaaaaaaaaaaaagggggggcccgtttttaaaaaaaccaatttttcctccccgtggcttggaaaaattaaaatttttttttttagggccccccaaaattaaaatcctggggccggtttttttaaaaacgggggggatggggaaaaaccctgggggttccccaaaattataaatgccttggaaaaaaaaacccctttttcccaagggtggggaaaaaaacaaaaaacccccccc

SEQ ID NO: 108607 - DNA, 1167 bp, Zea mays
  Clone ID: MRT4577_30543C.1
cattggcccctcgagccggggggggcacggccgggaaaactcggagccccagaaagatcttaaaccctagaaagctcttaaaaagcccccagggctagcagcggcggcgtatccctaatcccacctccagtctctgggcaccaaatttccggcggcgatggcggcggctgtggcgaggtcagggttccggcgcatgttctccgtctctgccttcgcgccgccgaaggcgcccgccgcgcgccccaaggccgacccatcccccaacctcttcgtctccggcttaagcaagcgtaccacaagtgaaggacttagagaagcctttgcggagtttggtgaagttttgcatgctcgagttgtgaccgatcgtgtcagtgggttttctaagggatttggctttgtaaggtatgctacgaccgaagaggcagccaagggaatagaaggaaaggatggaaagttccttgatggatgggttatttttgcggaatacgctaaacccagaccaccgccggaggaaacagggatgaattcgcagccccagcagtcatggggagctccatcaggttcctggggtgcacagtagatgaagtgatattgtgagagcccctccctgtccccagccctggggctcgtagcggatcgtgagggatgaatttgtgtgtggtgtgtcacaggtgtgaatgcctttgttgtcccaatattcctaccgtgttgggggtggtcgcttgctcgcgtccacgtctttcacatgaattggttactgtggtagttgtagttctggatacggtaccaaaacaaaagtattgctgtcaacaatctgcaacagccgggaaaacagtcgaaaacctttgcaaataaaaaaaaaaaaaaaagaacgacggccaaaaaaaaaaaaaaaaataaaaaaaaggaacaaagaacaccatcgcaggactatataataattaaaggaggagacgactgcattcttttttagaaagaccgatcattgcatgatgccctgtacattgggaagagaaccctggaatcaaatatggctgttgctggtggtggtgcagttgaggctgcgttatcagtttaccttgaaaaccttgcaacgaccctaaattctcgggaacaattggcaattgctgaatttgctgaatctttgttaaccataccaaaggtact

SEQ ID NO: 108608 - DNA, 258 bp, Zea mays
  Clone ID: MRT4577_30544C.1
gggccgacccacgcgagggctctcggtttttgggggctggctgtggggggcggcgatgggtgaagcggacgcggggacgccgtgtttggagatgacgctggagcggtacgacatgcggtggctactgcagccgggaggactcggactcagagctcgagcagtacttcaccggccggaccttgctggctctgaggccgccccggttcggggggggggccaggggttgtaggaggcggcctggggccgcacgctggaacc

SEQ ID NO: 108609 - DNA, 134 bp, Zea mays
  Clone ID: MRT4577_30545C.1
agctcagcctcctgcaccaaccgaacctcgacaagctgccgagctagagcatggactctaatgaacggtttcaggacgactagtatatgcccatcggtacgctggaggaccatctcctgtacgtgcccccaatc

SEQ ID NO: 108610 - DNA, 297 bp, Zea mays
  Clone ID: MRT4577_30546C.1
ctctcagggaaaagaggcctgggaagtagttgctgatgccgcgggcgcgttggttagttctatatgtaggccagtctggacatgaggatgcttattactggaccttatacagtcgctttggcatctgtgctttcttctacccctacaattttctcttgaaacaagcctaaaatcaatacctctgtaacaagggtataaacattactcgaggtgatactctgtactcgattactgctgcactaaggtccatcatcctcatttctgtttggtcatccgatagaaaaacaaatacaaacg

SEQ ID NO: 108611 - DNA, 189 bp, Zea mays
  Clone ID: MRT4577_30547C.1
gtcaaatacttcatctaaagtcgatcggtatgtaaggcatcagctgtaagatatcatcgggggatcaacaaatagcttgaaccacagcaaagaacgcatcattgataggattcaagatagaggtatggacgtatcctttgataaacgtattgacaatactaatagcgctcatacgagtaaagctaaata

SEQ ID NO: 108612 - DNA, 212 bp, Zea mays
  Clone ID: MRT4577_30548C.1
atccggctcgaggccgccccccccatttatattttggaaggcagcacactggctgccagctcctatatgcaccaacaaatagtacagcatcagctgcactgctggatcctgactgctcatgcagtgcgttgccagtgcgcaaacaacagcacgccctattggaggaacaagcaccagtccctgaacccaaatgcctgtgcaccagaaccaga

SEQ ID NO: 108613 - DNA, 500 bp, Zea mays
  unsure (1)..(500): unsure at all n locations
  Clone ID: MRT4577_30549C.1
gggggggggtgggttttttaaaatttttttttttttttttttttttttttttttttttttttttttttttttttttttttttgggttataaaagacccagctcccaacaacggttctgttattgacttgaaggggtaaactgggatcccgggggggggggggcgagctgaacccctgccctttcccaaactcaaaaaccgaaccttaaatcttggggaaagccacaatggcccaactctggacctacccattgatgggctcttgcgtaaggggggccccaattagaggggcgatgggcacaaaaaccgcgacaattggcaacaagaaaggcatttttttgatgccggatccaacaaggacaaactttggtgccccccaagtgaaaccctccatttggacactggggacagcctcctccaagttntttaaatcaagctcattggcccaagggtttacatccctaagggcggggggtttaccactttctttttttttaaaaa

SEQ ID NO: 108614 - DNA, 1357 bp, Zea mays
  Clone ID: MRT4577_3054C.1
gccggccttccgaggctcgagttcggcaggaggcgggaaaataccctaggctctcgccagtctccggtgcggctcaacaccgaccgaacccgtgaaaaattcgttctcctttcgatccgtttggcggggggctcggccggatccgaccggaggggcgccgccgatccatccggtcgcagccgcgtctgatttggtgcggattttggcgagataccccgctcctagctccgctgtttcaaggataacaaagatggcgtcgccgcggggcgggttcgatgagcaagatcgccggacggagaagggcaccgaggtgttcgtcggcgggctgccgcggtcggccacggaaagcacgctccgagagcattaacagatattttcttcatgcggagagattattgacgcgcgcataatgaaagatcagagtggtcactcaaagggatatggttttgtgcggtttgcaaagagggattatgctaatactgccaaaaggcaaaagaatggtattgaggttcaaggaaagaggcttgtggttgagctttcaatggatcaagatacagttttctttggaaatctttgcaaagagtggactttagaagaatttgaagaattgattcacaaggcattcaaagatgttgtttcggttgaccttgcaatggcgtcaaatcttggttcttcaaacaagaagaatatcaatcgaggctttggatttgtgagattttcttctcatgcagctgcagcacgtgtaatccgcatcggttcaagaacagatttcatgcttggtgatattttgcatcctgcgataaattgggctgataaagagtctcatctggatcctgatgaaatggccaagatgaagtctgcttttattggtaacctgccagaagatgttaatgaggagtacttgagaaagctttttggacagttcggtgaggtagtacgggttgctatctcaagaaaaggacaatgtccagttgcttttgttcacttcgccaaacgttcagagcttgagaatgctatagaagaaatggatggtaaaacggtgagaggacctggtcgagggccgtctttcaagatccaggtgtcagttgctcgacctacggcagacaacgacaagaagcgatctcgtgaagaagtgagaactagaagatcaaatgcatcaggagataggcgagattattctcatggaagatatggacacgattcacttgatcgtcaagtgaaagctccaagattatctaattatgtggccgatgctgctgacccctatgaatcagctgttaattcattaccttcagctgtcaaggaagtcttgcttcgaattctacgtctaaaaattggtactcgatatgatattgat

SEQ ID NO: 108615 - DNA, 195 bp, Zea mays
  Clone ID: MRT4577_30550C.1
ttcacacacacacacaaaaaaacaaaaattgacttccgactcctgacatcactttcacctcggtaggtaccctgtgaggtctgaccggctgaggccttggcgctttgagcaagtttttttttttggttcagctttggtctagtctttacactggcctcccactttgatcccgggaaaaggatctccacaaaacaa

SEQ ID NO: 108616 - DNA, 196 bp, Zea mays
  Clone ID: MRT4577_30551C.1
aaaaaaaaaaaaaaaaaaaaaattttttaaaaaaaaaaaaaaaaaaaaaaaaaaagaggggtcatgcaaattataagatacctgcccttacttcacttatatgcggccgccgcgttttcggtttccctggtcccatccccgtcctctcgccgttagtcttctacttctggtgacggggtaccccctttccttgccg

SEQ ID NO: 108617 - DNA, 1392 bp, Zea mays
  Clone ID: MRT4577_30552C.1
ttttcttcagttatttggctcaatgactccataagctccttctctttctcgcttgctgcttccaccacagcttcaagactagctgcttttgtctgataagcttctagatcatcagagagctgcgaagccttgcttttgtactgctcaagttcttcttcaacccccttgagcttttcatatgtgctgttcagctcctgctccagctcctgtgtccgagagtatgcaccttcagcatgagtctttgatgtgtgaagcagatcttccagctccagacttctttgccgaactgaatgagcttgcttgccgaactgaatgcgcttgttcttgatgctctgaacatttatcagtcagctccttaacttcttgttcaagtagctggtttttagacatcgaggaatctagggagcattgtagctcgttaattttttctttgtatccctctgcactggtcattgtttcttcaagctgcattcctctttctgctgatacagcagcttcttgttgaatacgctctttcagcaactctatttcttcacttgatgcaactaatttattctcaatctcactgagctgttgctcgaggtctgagcctttcttctcagcagctttgacacttgcctcagcttcttttagctctaggttgagtgcctcttcagctgcacgcattgcctgtatttgtgcttcaagctcaataatcttctgacttgcattttctccaaaagctttggattcaccatgctgctcattgagagagttcagattcagctccaactcttctttttgtgacaatgcttctgagagtaccaattgtgctttagcaagctcatcttctgcctgatgcaacaaggaatctttctcagaaagttttgaattaagatcagcaagtgacccttggagagtttcattttcgtccttcaagttgtcaagcccagcctgtaagataagtagctgttcattttgcttctctagtgcagcctcacttgtttgtccgtcttttgactgttcatcaagttttgtctccatttcctgcaaactcaaaagctttgattgtaggtcctcaagcgcagtagtaagttcagtctgtagtttaagattattctctttaagggattcttcagacgaacaatggagattcaactcttcagttagtttactgatatcagcatcctgggaggcaagcttctgttccaaatctgccacttgtgactttgacagctccagtgcctcttgtaccaccttgagttctgagattgtgtttctcagcgattcttctatttgctgatggtcagtggccttatcttgatgaccctttacctcctcttgaagactgctaatatgtttttccatttctttcatgtttgactgtgccagttccagcatcttatcaagttc

SEQ ID NO: 108618 - DNA, 273 bp, Zea mays
  Clone ID: MRT4577_30553C.1
ttgccacacgcgcgtgaaaaccttccgcaaagctgaatcagaggggacttttttgattcgttgtgggtttcatccccaacgtccacaactcaaaccttatcgccgtcaccatctctcttttgatcacgccacaaaccgagtcaacatcccctgcttatggctatgccttgctaacccaaaaaaaacacagaaaaacaaagggcgtcaacaggcagcccctagattttctccattggttaccccccaggagtgggcactgaacaaaccttgtta

SEQ ID NO: 108619 - DNA, 500 bp, Zea mays
  unsure (1)..(500): unsure at all n locations
  Clone ID: MRT4577_30554C.1
cacgcgnccggccacgcggacgcccaccccaacgccgggcgcgcggccacgccgaagcccacacggaaggccgacacaccccccaagcccacggccgacccaacggccaaaaggacagccaaaagcgacggcccaaacaccaacaacccanacccaaaaagcaggcccccccgccgaggcgccngaccaccagagggggggacacgacagggaaaaaagcacaaagggccaagaagagcgccgcaaccgcgaacaacgccccngccaggaagaacgagaacgcgaacaaggaggcgacccaggcgcgcaaagcgcccngccacaaggccaagaccaaaaccgcacaaaaggagggccgccacccnggaaaccgganacaccacaggcacggccacacgggcaacacaaggcccgagaccganagcggaggcaagcgccaaacgaggacgaggggagcacgacgaaaaacngagggcagcggggccagaacggacaaagga

SEQ ID NO: 108620 - DNA, 487 bp, Zea mays
  Clone ID: MRT4577_30555C.1
caatgtatatacttaccaccttatcacaaagaactgggaccacttttgcaaggacatgtgttacaaattgactggtaacaaaattccaaaatgggtaaatcgcctcgccagaataggtgccatttgcaactgccttctgccagaatcactcaagatatccccagtcggccatgatccaaacagtcgacctgaagattgtgagaaaaggcggctgaggaacccgttgagctgcttctcttcgatctcgagccagaggcagctgcccccatcttccccgttcccgacatcacctgtgaaagagcctcttgcgtacagttcatcaaggaaatccagcgctccatcactgaggaataggtagcctggcctcccttgtgtaacttttgataccaagttaggctaatttggtcagtggcaacatctggagggcactaccctgcatgctgccgcaactgtcagctaattctttttgctcggtatcagtcaaaat

SEQ ID NO: 108621 - DNA, 194 bp, Zea mays
  Clone ID: MRT4577_30556C.1
attcccggccacgtgaatcgcgtccagccacgcccactccccaatggaatacagcgttcccaatttccatgctgttgtgaccgctgaccgtgcctggtagaacttcgagccaaacgagaccctccttggtcttccagcgctctcatttcgcaacttgcttaccaaagtcattgcccagatttttcccgacgatt

SEQ ID NO: 108622 - DNA, 291 bp, Zea mays
  Clone ID: MRT4577_30557C.1
atacgacagcggtcgcgtgggcccacgcgtccgccgacacctccactcggcttctgcttcgtcaccttctccacagaggactcgatgctcatcgccatcatgggcatgaaccgtaaggagcatcgacggccgcaccatcaccgttcacgaggcccattccctctgcggccgtggaggaggccgtggcggatactgtgacgggcgccgtgatggacgcggatactgcggtggcggtggaagctaccgcggtggtcgtggacgctaccgaggctgtgggggatacagtggtgc

SEQ ID NO: 108623 - DNA, 484 bp, Zea mays
  Clone ID: MRT4577_30558C.1
agcagaaccaaaataccgcttatttacttgacgataacgtacagtaaggccagacgggcgctacacactacatggtaccgacacacatgctgacagcagcatggtatccgttcaaaccgagatgaacacacacacttacatctgaaaccacaagaacttggaacatgcaatcaccagtggacaacaacaaacacaacacaatcaaagataaaccctacgctctaggataaaacctgacacaagcataacaggataacttggacacgcgcgccccaccccttagctgctccatgttccatatgcacacaccgtaacctacagctcggatggcaccggggcttcctgctcagctagacttgagtagcacactgctccgaatccggcggcaccgccagggccgactccgccatgagctccatggccaccttggggtccatggtgtacacggccatcaccggacagatcttggacgcctacacggact

SEQ ID NO: 108624 - DNA, 462 bp, Zea mays
  Clone ID: MRT4577_30559C.1
gaattcccgggtcgacaccacgcgttcgggatgaagtaaaggactcaggcctagtcaacagaggtcctcggcggctgtctagaggggcggtctccctgttactgcgccgctcgccggcgctgatcatgtgcggggaccgtgtggaacgtgcctgctagaggaggctactggtatgctgacggatgatgccaggaggcttgtgaccgatctgctcaagatggacaatgcttgggggtgcatgcctcgcgtcgaggacgagcggcgtcctcagatccttcgacggcaggaggcacggtcaggtctggacggccagcgaggtgattgtggtgctgggcctgaggggccgccccgtcgagaccctggactacaacaggatgccgaggacaggcggagagggcgccaattcttacagtggccggacatcattgcacgacgagggcaggaaggtcatgggcgaggaca

SEQ ID NO: 108625 - DNA, 328 bp, Zea mays
  Clone ID: MRT4577_3055C.1
aaagcatacttaatacgcctattatgcagtggagatgcaggctacacgggcaaccatgtgctgtttgctcacgagcaagagcacgagacggagacataacgtacctattcacactcgagttatacggcaggcctaatgtacatgtacttcttattggaaagatatatatccattctgctgctcttacactacgctattgtgccttaacctgtttcaatacctgatgacgacgagcaaaccaatcggcgctacgattatggaggacggaacccctgatcggacgtggctacacaaggcgaggactgagccgaagaactgatcccgcctg

SEQ ID NO: 108626 - DNA, 261 bp, Zea mays
  Clone ID: MRT4577_30560C.1
aaaaagaactcacataatggttattcggggtgtatcctacttaatcgcaggaataagtaacctgatttacaactcagttcggcaaatttgggctaagaaaattaagcctgggtgcgcctggagattcatgcggcctgcatagcaaaacccatgctactagtaccatgaccagccggccgtgagccgtagttcctgtagccgtgccggagacggccaactccatgaacagacctccagtaaccgctagggtactaatctttt

SEQ ID NO: 108627 - DNA, 307 bp, Zea mays
  Clone ID: MRT4577_30561C.1
ccgcaggaccggccggaacaattctgggcgacgtgctacagccggcggcgcccaaacgggggttcaaaaaacaagccgggaaccacccaacaaaaggaaaaaagccacccataccagacaaaagagagcaccggccaccacagacaagccgagacacacgggagagaccaagacaagaagaggcgacgccaacagagcaacaccacgaagaggccggccgacccgacacacacccggagacaacacccgagccgaaagggggagggacaggcccaacaacaaccggcagaagcagcaaaaaagagga

SEQ ID NO: 108628 - DNA, 677 bp, Zea mays
  Clone ID: MRT4577_30562C.1
tcggtaccgggtgtcgcagtttattgccggacatcgacatcagcaccagtcccgccggtcggatattaccctttatttcccgacccctagagcaacggtttagtcatcgcagtgccacccattccctgttggccagtttcaccctagccctggtcagttatgccctttggtttgccatgccagtcattcccctagtaattgtccatgccctgaatatcggttacttcgccggttggttcttggactgcttcaccaaatccggggtggaaatgttttacccgttgggggtgcgctgtgtttgccccggtaatcgcaacttaagaatctctactggcagtgccgccgaatattggctgatggtcttcgtagtggcgatcgccgtttggactttccaactcaataacaccggcggtttggtgaaaaacttcaatgccctgattgccgctcccagtggggtggtggaattgtacaaccgcaaggggggcaacgaaattatctacgccgaatatgaaggggtgtgggcggggaaccgtgcgccgataaaggaagaggccccggtaattgccaccaatggccaaggctttttggttctgcgggatgaccaggtggtgaaagtgggcaccgaagcggacagcaccatcattgttaatcgcattcggggccgggagggggaaccc

SEQ ID NO: 108629 - DNA, 2792 bp, Zea mays
  Clone ID: MRT4577_30563C.1
tcccggggaatttggctgctgctttctggagatgtatggctagttcagaagctgatgatgaagctgatgattctggtgctttggcagctgttggttgcttacgagcaattagcactattcttgagtccataagcagcctcccacatctttttctgcaaatagaacctacattgttacctataatgcgcaggatgttgacgtctgatggccaagatgtttatgaagaagttcttgaaattgtttcctatatgacatttttctcacctacaatttcactggacatgtggagcttgtggccactgatgatggaagcgcttaatgactgggctatagatttctttgagaatattcttgttccactggacaactacatttctcggggaactgatatctttcttgcaagcaaagatccagattaccagcaaagcctgtgggatgcactacaatctataatgatggacgaaaacatggaagattctgatattgaacctgctcccaagctcattgaagttgtttttcaaaattgcaaaggcaacgtggatcagtgggttgagcactacctcaggattacaattgcacggttacgtagagcacagaaaccatacttgaaatgccttcttgtacaagtgatcgctaatgcgctctactacaagccataatggtgctcttctctctattgggacactttgtgatccatacagatccatataatcagagcttgagcaagctggtccgacatgtctttgaatgcagtcgtgttggacacctgcgagcaaaggcatgggttgctgggctatgcccatatcaacttttcccaataggctatgcacttcaggaatgcatgatcctgttgtttagggtgtagttcttgtgcccaaggatttaaaatttggtacagaaaagctctaggaacttaggtttttgattgctctctttgcttgtttagttacccttggatctaatgtttaattgtagataaatgtggcacataaaactattatgttgcacaactaacttggtgtgatagtggtaagatccttgatctatggcgggtccttgttttctcggttttggctcttggccgtcccatgtactcctgtgacaaccccttaatgtgagggttgattcggtctttgcacttcgttatctttgtctgaagcatgcaaagatttaaatgagattcgacctatacttcctcagctccttgatgaattttttaagctgatgaatgaggttgagaatgaggatcttgtgttcaccctagaaaccattgttcgacaaatttggcgaagagatggcaccttatgcagtaggtttgtgccagaatttggctgctgctttctggagatgtatggctagttcagaagctgatgatgaagctgatgattctggtgctttgtaatccttgtgttgattacgtgcaattagcactattcttgaatgcatacgcatccactcctgccctgtcccttgagtttttaaatcagcttggggtttcagctgacatttttaaccattggtttgctatgctacgaaaagtgaaaaaatttggagcacgtgttaatttcaagagggagcatgataagaaagtttgctgcttgggcttgacctcccttattgggcttccagctgctaagattccagcagatgctttggatcggatcttcaaagcaacacttgagctgcttgttgcttacaaggaccaagttgcagaagctaagaagcaaaatgaagaggctgctgatgatatggatggttttgatgctgatgaagaagatgatgacgaagttgactctgataaggagatgggtcttgatgatgaagacggggatgaagtaagcagtcttcagctgcagaaattagccgcagaggctagaggcttccaaccagccgatgacgatgactcagatgatgatttcagcgacgatgagctacactcaccaatagacgaggtggatcctttcattttctttgtagaaactgtccaaggtttgcaggcatctgatcctgccaggttccagaaccttatgcatacattggatttttcttatcaagcgcttgctagtggcattgcacaacatgccgagcaaagaaaaaatgaaattgagaaggagaaatctgagaaggcaaatgcacagtgacgtcataaagcatttctggttcccttcgattgttttgccattttgccggtatagcattggtggacggttaatttcctgcgatttgcaggccgcaggtaagagtttttgcagccttagccaaagtgtaggacaaattcaatcttgtgagatagcatcttggataacctgtcacctcgaccatgttcgtcgtggccagttgtagacgtcttggttgtgcaagaaagtttctctcgaggacagttgctcgttttgttagggccatcaatttttttgggcggcttgtaagttatttgagaatcccacctcaggttgaggggttgtattctcgagtcgtcaaagtttagtaccggtgcggtgtagattgtatatggtttcagttgtctagaacgttgtggcttcatggacgggctgtggtataagtttttattattttttaatttttttgtcaacaagacattgtaattggggtttgtttgtttggtaagagcaagaaaggtcggcactgttatttcttcggtatcattgtccacttgtttcgatattagcagtttacctaatcctatatccaaactccactcttccatattcaaactccactctgaacaatgtaatctatagtgtttttgagtaaactatgaaaagattgctgcg

SEQ ID NO: 108630 - DNA, 1047 bp, Zea mays
  Clone ID: MRT4577_30564C.1
caatccttgagtcaattagcagcctcccacatctttttacgcaaatagaaccaacattgctgcctataatgcgcaggatgttgacatctgatggccaagatgtttatcgaagaagtccttgaaattgtttcctatatgtcatttttctcacctaacatttcactggacatgtggagcttgtggccactgatgatggaagcgcttaatgactgggctatagatttctttgagaatattcttgttccactggacaactacatttctcggggaactgatatctttcttgcaagcaaagatccagattaccagcaaagcctgtgggatgcactacaatctataatgatggacgaaaacatggaagattctgatattgaacctgctcccaagctcattgaagttgtttttcaaaattgcaaaggcaacgtggatcagtgggttgagcactacctcaggattacaattgcacggttacgtagagcacagaaaccatacttgaaatgcctccttgtacaagtgatcgctaatgcgctctactacaatcctgcgctgacccttgaatctttaaataaacttggggttgcagctgacatttttaaccattggtttgctatgctacaacaagttaaaaaaagtggagcacgggttaatttcaagagggagcatgataagaaagtttgctgcttgggcctgacctctcttatcgcgcttccagctgataagattccagcagaagctttggatcggatcttcaaagcaacacttgagcttcttgttgcttacaaggaccaagttgcagaagctaagaaggaaaatgaagaggctgctgatgatatggatggttttgatgctgatgaagaagatgatgatgaagttgactccgataaggagatgggtgttgatgatgaagacggggatgaaataagcagtcttcagctgcaaaaattagctgcagaggctagaggcttccaccagccgacgaggatgatgactcagatgatgatttcagtgacgatgaggagctacactcaccaatagatgaggtggatc

SEQ ID NO: 108631 - DNA, 500 bp, Zea mays
  Clone ID: MRT4577_30565C.1
agcacgcgtccgcccacgcgtgcagccacgcgtctgagaaaattgcctacttccactgtagtaccagagctcgcgtaagcgccgagatgtaccattccacgtgaggcggtgtgcgcggcggcagacatcaattgaattgcgacgatgagaaggttgacaagcatcgtgagaattaccttggtgatagggataaggcttcggatgctagatgtcagaaaggaaaggatctttactggtatactggagataagaaatgcgacacggaagatgctcttcaggatgaaatcaagagagtgaacgtagaggatgaacacgctatgcgcgaggatgttggcttatctcctaagcgcagctatggtactcagggtaagagatgggataagcatgaatacgctgagctcattaacagaggatcaactgcggtggacttgctagcatggcactctgaagcatgacaagtgcatggtttaggattgtacaaggcccctccttatgagggg

SEQ ID NO: 108632 - DNA, 524 bp, Zea mays
  Clone ID: MRT4577_30566C.1
gctacaaaataaagtgaaagacttagggatttatgatatgtgttctcaactgtaatacacatcaggctatctcagtagctacagaaatctaccaacgcgcaagacctagacagctagactgcacactagcatacgccaaagttcagcatcaaagggaactatggggaaaacatcaaaaacaagtgcaggtgtcatgagtagagatcctgtcttattgatgttcgtcagcaagccagcccacactactcatcggatgatccgaatgcttggcaaatggcaatccatctgctacatgcctatatatccatcaccataaatctgcagaaaaaaaaaaaacaagtgtacaaatcgaaacatacaaactgcagtaatcccatcacccacaaaaggcaatgcttcacacatatccagtaacatgaaaggaaatcaatacaccgcgaacctgctgcccaaaataaacatattacgtacctatttactgcaagtgttaaatgatacataccattccttggagtaaaagatga

SEQ ID NO: 108633 - DNA, 1009 bp, Zea mays
  Clone ID: MRT4577_30567C.1
caattgggaccctcgaagccggccgggaaaaagggagataggagaggtcgcagcaagaggaggggaaaggtcgtggaagagaggaagcagcgagaggagccgaggaagaatatatccatcctaacatacccacccacacaccagacacacataccttattctccgccgtttcttggcctccggaaatctcctcccccaagttgcaagcatgggcgggttcagcctcagcggcgctacaggtctcgcggcgtaccgcgaggaagacgacgaggagctgttcgagacgtcgtcttcgatctccggcgactccgacgatgagggccaccagctctccgatggagaggggggcgcctatgatttgtcatctgtgatggcacagctccctgtcaagaaagggctatccagatactacgacggcaagtcccagtccttcgcgtgcatgtctgaagtgcgatgcctggaagatctgcgcaagaaagagacgccctacaagaagatcaagacatcaaggagtagcgtcgcgttagacgaagagcaggactgtcatacgccgggtcgtacgaacagcagcagagcgcccggaagttgttgcgcaaacctggtggctcggaacaacggcaaaaacatgctgtacagacctcccccagtccctgtaaacaaaagtggataccgtcagtaggctctaggacattactggatgatatctatccagggtttcacctcttgttttttttccatttttgagggattttgttgacaggcgtattggcctgtctcagatgtaatgtaagagggtttccttctctgctcttagcagagttatctcctatgatcttgtccatgagacattggttcgtgtaaataatagtgatgttgtaaccaaaaaaaaaaaaaaaaaaaaattgtctattttgtggtcggatcgaagagacaaagtgggtaaaaaaaaggaaagcttttgcataaaaaaatgagaaaaaaatagtattcggttaaaaaaaaaaaaaaa

SEQ ID NO: 108634 - DNA, 401 bp, Zea mays
  Clone ID: MRT4577_30568C.1
ttttttttttttttttttttttttttttttttttttttttttttttttttttttttttttttttttttttggggggcacacatttaaaaaaaatttgcccaaccaaaaattttcttgcccaaattgtttttttaggggggccaaaaaagaccctttttccttttttttaaaaaggggaaaaggaaagggggttaaccctgccccctaaaaaacccccggtttttgggggtaccaaaatgggtttttggggcaacccaaccccagggggggggggggaaatggtcaaaaaaaaaagaacggggtttaaaagggttgaattttgtttcccacttggggcaaaatttggaaaattgcccctgggagggaaaagccccctttcaccgggaaattggctaaccttt

SEQ ID NO: 108635 - DNA, 270 bp, Zea mays
  Clone ID: MRT4577_30569C.1
aagcaaataccaaaaaaaagggtgatattaatagggggcaaacttttcataacaaattctgagccattccataacaaataaatacacatttacctgatacactttatataacaaacacctaaacatcatgatatttactcacactttactgatatttataaaccttacgatttactagaccaaacaatcgatcctacgtgctttagattatatctaaaaacttaatccatacataaaataccttatttaattacaaataccattaatttg

SEQ ID NO: 108636 - DNA, 1080 bp, Zea mays
  unsure (1)..(1080): unsure at all n locations
  Clone ID: MRT4577_3056C.1
ggaggatngcaggcattaactaaantctggagtccttgtgacttccccttccctataaattcnactaacgtatgcttgaccggccgggagaacatcaagtttagattcttgttcacgcgttcaaagatgcgtggggaaaacaacatagtcctccttctcctcctcctgtttgctgtaatttctccgaaccaagtaattggtagtgcttgtactccggaacagaaggctgccatcctaaatcaatgcgaagagtacatcaagcctggatacccccttatactgccatcgtacgccagtgtgtgttgcgacaaggtgagagatgtgccaaatagggacatgaactgcatcgtcgatctgctcacgcctccagagaaggcgaaacacggtgtcgacaagataaaacgtctgaaagatctctgcgacaactcgcctcatcatcaggtggtggtgtagacagacagcagctgtcattgctaatggagttcggaggcaagatatatggtctagtaaataaagtcgtcgatcaaagcatgacaactgtcaaatgtatctttgattaagtaaagtatcactcaagatttccagtttcaaaaaaaaaaaaaaaaaagcgaaaaaaaaaaaaaaaaaaaaaaaaaaaaaaaaaaaaaaaaaaaaaaaaaaaaaaaaaaaaaaaaaccccacccattttaaacaagcttttaaaaagactttttcagttaaaagggggaaagccaaccggttttttgttgggaagggaccaaaagtggtttataatatagcatcatggaccgcaacggttttggttatcaaccaaaacccgggattgggcaaagcggaaacggagcccttggggacttccggcggggtaaaatccaagttttggggactagtcagggttggcccggaacggggcaaatttccaaactttggggggctggggcctctccgtttttaaaaaccacccgaagatgaaaaaggtggccaaactccggggggggcttaaattgtgaggaaaaaaggctgaaagttcgtggtttgatttaacagcgacttcgcttccgggggaggacaaaaaggggg

SEQ ID NO: 108637 - DNA, 855 bp, Zea mays
  Clone ID: MRT4577_30570C.1
ggaccctcccggccgccggaggaaaggaaaggtcgtggaagagaggaagcagcgagaggagccgaggaagaatatatccatcctaacatccacccactcacccacacacgcaccagacacacataccttattctccgccgtttcttggcctccggaaatctcctcccccaagttgcaagcatgggcgggttcagcctcagcggcgctacaggtctcgcggcgtaccgcgaggaagacgacgaggagctgttcgagacgtcgtcttcgatctccggcgactccgacgatgagggccaccagctctccgatggagagggcgcctatgatttgtcatctgtgatggcacagctccctgtcaagaaagggctatccagatactacgacggcaagtcccagtccttcgcgtgcatgtccgaagtgagatgcctggaagatctgcgcaagaaagagacgccctacaagaagatcaagacatcaaggagtagcgtcgcgttagacgaagagcaggactgtcatacgccgccgggtcgtacgaacagcagagcgcccggaagttgttgcgcaaacctggtggctcggaacaacggcaaaaacatgctgtacagacctcccccagtccctgtaaacaaaagtggataccgtcagtaggctctaggacattactggatgatacctatccagggtttcacctcttgtctttttttctttccatttttgagggattttgttaacaggcgtattggcctgtctcagatgtaagagggtttccttctctgctcttagcagagttatctcctatgatctttgtcatgaaacattggttcgtgtaaataacagtgatggtgtaaccacttg

SEQ ID NO: 108638 - DNA, 840 bp, Zea mays
  Clone ID: MRT4577_30571C.1
gtcgtgtaagagaggaagcagcgagaggagccgaggaagaatatatccatcctaacatccacccactcacccacacacgcaccagacacacataccttattctccgccgtttcttggcctccggaaatctccccccccaagttgcaagcatgggcgggttcagcctcagcggcgctacaggtctcgcggcgtgccgcgaggaagacgacgaggagctgtgtccgacgtcgtcttcgatctccggcgactccgacgacgagggccaccagctctccgatggagaggggggcgcctatgatttgtcatctgtgatggcacagctccctgtcaagtaagtcgtccggcttctctttcttctaacggacatcaaaactgaaaggggggaagttctcaactcttttgttgtcgtcctctccaggaaagggctatccagatactacgacggcaagtcccagtccttcgcgtgcatgtctgaagtgcgatgcctggaagatctgcgcaagaaagagacgccctacaagaagatcaagacatcaaggagtagcgtcgcgttagacgaagagcaggactgtcatacgccgggtcgtacgaacagcagcagagcgcccggaagttgttgcgcaaacctggtggctcggaacaacggcaaaaacatgctgtacagacctcccccagtccctgtaaacaaaagtggataccgtcagtaggctctaggacattactggatgatatctatccagggtttcacctcttgttttttttccatttttgagggattttgttgacaggcgtattggcctgtctcagatgtaatgtaagagggtttccttctctgctctt

SEQ ID NO: 108639 - DNA, 813 bp, Zea mays
  unsure (1)..(813): unsure at all n locations
  Clone ID: MRT4577_30572C.1
ggtccggnnaattcacgggcgtggaagagaggagaggaagcagcgagaggagccgaggaagaatatatccatcctaacatccacacaccagacagacacacataccttattctccgccgtttcttggcctccggaaatctcctcccccaagttgcaagcatgggcgggttcagcctcagcggcgctacaggtctcgcggcgtaccgcgaggaagacgacgaggagctgttcgagacgtcgtcttcgatctccggcgactccgacgacgagggccaccagctctccgatggagaggggggcgcctatgatttgtcatctgtgatggcacagctccctgtcaagtaagtcgtccggcttctctttcttctaacggacatcaaaactgaaaggggggaagttctcaactcttttgttgtcgtcctctccaggaaagggctatccagatactacgacggcaagtcccagtccttcgcgtgcatgtctgaagtgcgatgcctggaagatctgcgcaagaaagagacgccctacaagaagatcaagacatcaaggagtagcgtcgcgttagacgaagagcaggactgtcatacgccgggtcgtacgaacagcagcagagcgcccggaagttgttgcgcaaacctggtggctcggaacaacggcaaaaacatgctgtacagacctcccccagtccctgtaaacaaaagtggataccgtcagtaggctctaggacattactggatgatatctatccagggtttcaccctcttggttttttccattttttgagggattttgttgacaggcgtattggcctgt

SEQ ID NO: 108640 - DNA, 839 bp, Zea mays
  Clone ID: MRT4577_30573C.1
cgagggccgtgcccgggaaaaaataaaaaaatgttatatagcaagtgtgtgtaaaaggccgtggaagagaggagaggaagcagcaagaggagccgaggaagaatatatccatccacccacccacacaccagacacacataccttattctccgccgtttcttggcctccggaaatctcctcccccaagttgcaagcatgggcgggttcagcctcagcggcgctacaggtctcgcggcgtaccgcgaggaagaagacgaggagctgttcgagacgtcgtcttcgatctccggcgactccgacgacgagggccaccagctctccgatggagaggggggcgcctatgatttgtcatctgtgatggcacagctccctgtcaagaaagggctatccagatactacgacggcaagtcccagtccttcgcgtgcatgtctgaagtgcgatgcctggaagatctgcgcaagaaagagacgccctacaagaagatcaagacatcaaggagtagcgtcgcgttagacgaagagcaggactgtcatacgccgggtcgtacgaacagcagcagagcgcccggaagttgttgcgcaaacctggtggctcggaacaacggcaaaaacatgctgtacagacctcccccagtccctgtaaacaaaagtggataccgtcagtaggctctaggacattactggatgatatctatccagggtttcacctcttggttttttttctatgatggattgattttggtgacaggcgtattggcctgtctcagatgtaatgtaagagggtttccttctctgctcttagcagagttatctcctatgattttgtccatgagacattg

SEQ ID NO: 108641 - DNA, 329 bp, Zea mays
  Clone ID: MRT4577_30574C.1
aaaagaaaaagctatgttctgcttcttcggcaataataaccacattacacagaggttcaagttgtccaggctacgggcaggtcaagcaggtgaatatgctcgtaaagcatctgacgccagattggaataaaaacgcatgatgggagcaagcccgttaacagatatatactttggaaacaccatataatatgcatggagagcacacatcacgggaacaaacctgtgagtcgcccttggtccagattagcgggctactaggcggtcccttagtaagctgccatcactggccgaaagtaagcgccgaaggcacatcacagccgggagcggac

SEQ ID NO: 108642 - DNA, 1556 bp, Zea mays
  Clone ID: MRT4577_30575C.1
cgcgtgactaggacatggagatggaggggaggaagagcaaacagtcggcactgtgtgacgaagagactgtccgggagatgtttgacaaggtgctgttgtgtaccgacaagaactgtgagttccactcaccaatgccagccgatgcacagatcagcgggggatatgtgaaaggatctagaaataagcgagggcgaaggagggggagatcaggtcctggtgcagaggaggagccagttgatctcacaaccctactcatacattgtgctcaggccgcggctatcgacgaccacaggaactcaagcgagctgctgaaacagatcaggaagcattcctctgctactggagatgctggccagagattggcacactacttcgccgatgggctggaggctcgcctagctggctctggcagcagcatctaccgttcgcttgctgcaaagagaacttccactggtgatatactgaaggcgttcagtttgtatgtcaaagcatgtccgtttaggatactatcacactatgtcgcaaacacgaccatcttaaacgctacgaagagcgccacaaggctgcacatcatagactacgggataatgtatggtttccagtggccagtcctcatgcagcggctctcaaagagacctggtggccccccgtaccttcggatcactggtatagactttcccctgtcaggattccgccctgcagagcgtgttgaggcgacagggcggcggttgcatgagtatgcccgtatgttcaatgtcccatttgaataccaagccattgctgccaagtgggatactatccaagttaaagatctcaacatgaagagcgatgagttcgtcgtcgttaactgcctctaccggatgaggagcatggtggggcggacggtggcggatgacagcccgagaacgcgggttttgaacacaatcagaaagctgaatccccatctgttcgttcatgggatcgtcaatggtacttacaatgcacccttcttcgtgacgcggtttaaggaggctatgttcttcttctcttcgatctttgatatgctcgaagcgaatgccttacggatggatgagcataggctgctgatagagagagagttctttggccgggaagctgtcaatgtgattgcctgtgagggcacagagaggattgaaaggccagagacctacaaacaatggcagatgagaaacctcagggcaggcttccggcagttagctctggacagggagataatgaagagagcaaggtacaaggtaagcaagagctatcagggggatttcctcgtggacgaagataacaagtggatgctacaaggttggaagggtcgtatcatatatgcactttcagcatggactagctagacttgtaaatattagtgagctactgagctgcttagctgacctcttccattaatttcttgattaatcaccatttcattttgctgtattatgtttacgttgttgaatctagccctcttttagaaaccaaagttttgtatgtttgaattggctgcaataatagaatcttgtccgtgtctgcctgaaaaacttgtgtaa

SEQ ID NO: 108643 - DNA, 593 bp, Zea mays
  Clone ID: MRT4577_30576C.1
gtaagaaaagaacgcccagacgctggtcgctagacaccccataatgctccgcctccgcacctcctctcactcgcccagtcgtgtctatggtggccaccacgtccacggtagcggcggtagaataccttctcactccactgcatccccgaactgccgcggggaccggggcagccacgcggcttacctcctccgtgacgtgtacagcgtcgagcatgcctttcacgatgtatgcatacatgtccggcgacaagacgattgcgcccaggtgatagaagctttcaacaccatctcttcattgaaactgccgcgtgcgaatactttgcccgtgatggttttgatgacctggaggccaatgtcatcgataaggtgaggactggtacctatacacagtacttccatcatgaccacgtcatcagcgacaagtacgatgcattcaaggagttacttcgtggacactacacgattgccaaggagattgttgacctgtggcatgaccgactcgaaaagcttgcagataattgcactgtcctacaggacttcctcagcttcaacgctgttggcgaaagaatgactactgtcgttgcaactctcct

SEQ ID NO: 108644 - DNA, 383 bp, Zea mays
  Clone ID: MRT4577_30577C.1
atgtgagaagaaacgaccattctcaagactcaaatgagacaactggaatgcactagatttgtgacgagagtatgataccttgggaaacacattgttagtactgtgagatcagacaccaggcctgtgatgagacaaaacaaccatgtgttaaacagatcacgaccatgccaccagtgtgcaaatgtaatcaccaccagtacacatgcgactggtaattacatcaaacgacctacccgctactacatctcttgaacaatccatgtggttttagaatgacaacgatgcgggttcagaattggtgaaaccttgaggacaggaggtctatattaactctggcgcaagcttcagagtttgaaagtatccagcgccgtaaaatgaagcta

SEQ ID NO: 108645 - DNA, 1532 bp, Zea mays
  Clone ID: MRT4577_30578C.1
taccctcgaggccggccggggtccttgcacagggctccgaacacgcgtttccatggctctcctccgactccaagagcagtgctcgctcctccgaatctcctagctcccaccacccaaaccccatcgatatcccaagaaatcctcgcaagaaccaacttttagtgcccaatgcggccaagattgccaacgcctccgaaattccggttcctcgcatccccactagcacttccaaggccgcaatcctggcccggaaggccgcgctttggcgggacgcccttgtccccgttgccgccgccttcgcgtcctgtccgctcccttccctcgcggcggagggcgacgggaaagtgagcctcgagtccatcgtggtggcaatcgacgacttcaacaatcgcaaccctttcttcgtggctggggtcgtgttcgtgtggctagtggtgatcccgctcctgcaggagtacgtcttcaaggcgccatcgacgcgttccgcaagcttcgcgacgtgccggaggtgcagctgctggacatcaggcggggcaagagcgtgcggttcatggcgccaccgaagctgaagcttatcgacaagagcaccgtgcaggtcgagttcgacgaggaggacgagaaggggtttgtcaaggaggtgctagcgaggttcccagacccggcgaacaccgtcgtctgcgtccttgacaactttgatggtaattcttcgaaagttgctgagctactagttgagaatggttttaaggaagcctatgcaattaaagggggcttgagaggtccggaagggtggcaggcggttcaagaaaactatcttcccccatctgtccatgttttcccgaagaaaaaaaggggcgcgaaattagctcacacagatgcaagcaatgatggaacatacgttcagcaggagggaagcgaggaatcatcggctcctccaagcagtaccctgacttgaagccttcatcatccccaacaccatcaaaaccgacgaattaagagcaatgcaggacaataacatgtgtggaactcaaaaggtcagaagtagttgtctcctgcacaaacatttttgtatacttccaaccgtggatgtccaggagattgactgggatggcatggaagaggaccagcagtggtgtttggagctcttgctgctgttgaggccatggtgaattcttagttgtgtaatttgcgaagcttgtacccgtatgttgtactattaagtgggggcgaaatgacattttgtacctgacttgatacagtttggggtgccttagcgttcccaatttgacaattgtgcttaactccttagttgtgtaatttgcgaagcttgtacccgtatgttgtactattaagtgggggcgaaatgacattttgtacctgacttgatacagtttggggtgccttagcgttctcaatttgacaattgtacttaacacaagcgctggctcaaaagaaaaatatgaaaatcccaatggaagtacaactgctgcaaaacatgcaactaggagaccgttatcaccatatccaaatgtatg

SEQ ID NO: 108646 - DNA, 1422 bp, Zea mays
  Clone ID: MRT4577_30579C.1
ccggggtccttgcacagggctccgaacacgcgtttccatggctctcctccgactccaagagcagtgctcgctcctccgaatctccagctcccaccacccaaaccccatcgatatcccaagaaatcctcgcaagaaccaacttttagtgcccaatgcggccaagattgccaacgcctccgaaattccggttcctcgcatccccactagcacttccaaggccgcaatcctggcccggaaggccgcgctttggcgggacgcccttgtccccgttgccgccgccttcgcgtcctgtccgctcccttccctcgcggcggagggcgacgggaaagtgagcctcgagtccatcgtggtggcaatcgacgacttcaacaatcgcaaccctttcttcgtggctggggtcgtgttcgtgtggctagtggtgatcccgctcctgcaggagtacgtcttcaagaagtacaagcccgtgagcgccatcgacgcgttccgcaagcttcgcgacgtgccggaggtgcagctgctggacatcaggcggggcaagagcgtgcggttcatggcgccaccgaagctgaagcttatcgacaagagcaccgtgcaggtcgagttcgacgaggaggacgagaaggggtttgtcaaggaggtgctagcgaggttcccagacccggcgaacaccgtcgtctgcgtccttgacaactttgatggtaattcttcgaaagttgctgagctactagttgagaatggttttaaggaagcctatgcaattaaagggggcttgagaggtccggaagggtggcagccggttcaagaaaactatcttcccccatctgtccatgttttcccgaagaaaaaaaggggcgcgaaattggctcacacagatgcaagcaatgatggaacatacgttcagcaggagggaagcgaggaatcatcggctcctccaagcaggtttgtagtcaacacaagcgctgaatccaaagatgtttatccaccaccccaatggaagtacaactgctgcaaaacatgcaactaggagaccgttatcaccatatccaaattaccctgacttgaagcctccatcatccccaacaccatcaaaaccgacgaattaagagcaatgcaggacaataacatgtgtggaactcaaaaggtcagaagtagttgtctcctgcacaaacatttttgtatacttccaaccgtggatgtccaggagattgactgggatggcatggaagaggaccagcagtggtgtttggagctcttgctgctgttgaggccatggtgaattcttagttgtgtaatttgcgaagcttgtacccgtatgttgtactattaagtgggggcgaaatgacattttgtacctgacttgatacagtttggggtgccttagcgttctcaatttgacaattgtgcttaactcagttttattag

SEQ ID NO: 108647 - DNA, 422 bp, Zea mays
  Clone ID: MRT4577_3057C.1
atgcgattgtttggtttacataattgtaatgtgacgggtaatcgataaaaaaaaaaaaaaaaaaaaaaaaaaaaaaaaaaaaaaaaaaaaaaaaaaaaaaaaaaaaaaaaaaaaaaaaaaaaaaaaaaaaaaaaaaaaaaaaaaaaaaaaaaaaaaaaaaaaaaaaaaaaaaaaaaaaaaaataaaaaaaaaaaaaaaaaataaaaaaaaaagaaaaaaaaattaaaaaggggggccccccaaaaaaacaaaacctttacccaacttaaacggcattcaaaaaacccccaaattggctacccaaaaataaaaccaaaggggccccttaaaaaaccccttccaagaaaaaacccaggcttaaaacaaatatgccaccgtcaaaaaaaaccccctttccacaaggggggtataaacgaaaaagc

SEQ ID NO: 108648 - DNA, 356 bp, Zea mays
  Clone ID: MRT4577_30580C.1
ccttcaccccccctcttggccgccaccccctttttctcccccttggttggacgccccctccccctatggcatccatgctccattgctccctcccccaagatctccccctacacatcaaggatccgagaaaaggaagggcacgcagaattgaataggaatagaggatcaaggagatgttctaccccatctccccttgaagatttcttggccgtaaaccctaaccggctacacttcatatcatgactagtacatttccttcttcgaacaatgaccttggtgctcatcaacgtgatcgggaagtttcaccacatccaccttgattctcataatattgcctgcccatacgcagccatcat

SEQ ID NO: 108649 - DNA, 1683 bp, Zea mays
  Clone ID: MRT4577_30581C.1
tcgatcccagggccgctccggcggcggcggcgcgttgagatggctgacactgacagcgcggagaccgagaaagagaagatggtagcggatgatgggggcaagcccgcagagctctcgaagagcgcgaggaagaagctgcagaagcaggagcggcaggcggaacgtaaagcggcccgaaaagcggcggagaaggagcgacggcgcgccgacatagagcggcggaggcgtgagtgggaggacgctcttgccgccgcgccgtcggatgaggcccgggccgagatggtggcggcgcggcgggagacgcggcgcgagcgggtgggccggcgggcggaggagcgcggggcgcgagctgaccggctcaggcgcgcggctgagggcgcgggccagaaggtggtgctggacctcgagtttgcggaccttatgaggcccaacgagattcatagcctcacgcagcagattatgtactgctatgcagtgaatgggagatctgcaaacccagctcacctgtggctgacaggttgcagtggtgaaatggcgacccatcttcagagaattcctgggtatgataagtggatcattgaaagggcggccaggccttatattgaagcatttgaagaccgtaaagaaaacctcgtgtatcttacagcagatgctgagacagtgcttgatgatctagacatgtcgaaaatatacatcatcggcggcctggtggatcgaaacagatggaaaggcataacactgaagaagtcagctgagcagggaattcaatctgcaaagcttcctattggaaactacctaaaaatgtcaagttctcaggttcttacagttaaccaagtgtttgagataatgttgaagtttgtggaaacaagggactggaagacggcattcttccatgtgattccacaaaggaagcgaggagaagctgagaccagagatgacgtggaaaaaggaggcctggatgacaacgatggcgccgccgaaggggctgcagatggagaccattccgaggaagacctgaacaagggcttcggtgaggaggaggacgatgatggggacgaagagctggaagaggaagaagcagatgtctccaacaagaggcagtgtgttagagttgaaaacggggaagctggggatgccaccgtagcagaggtggaaccaaacaacggcggcggcggcgggggcggggaccgctgaacagtgaacagcaccaccacgtttgtcgctaactcgctattttcacaacagcatcggtattggatttttgagcgttgtctctggcatttttcatgtattttagggctagtttggcaaattcatttttccaagtgattccgattttcctaaggtaaaatgaactaatttccttggaaaaatgaaaaaaaaaaatcactagtaaaaatgggattgccaaactgtcctttattagacaatttctgccgtactctactcggaactgaataactgaccagcttagttaaagttaaagcaggccaatgaatcgagcaatggtgacaggaactgatgaacagcgaagctcacgtttgtttctctttcgtatatgacagcattagtttttgttttccttttttcagcgttttctctggtatttatgtattttaaacaatttatgttgtgtatttggaactggcgatcttgttgctgtcattttactatagtgcgtcc

SEQ ID NO: 108650 - DNA, 445 bp, Zea mays
  Clone ID: MRT4577_30582C.1
cattgggtacctcgaggccggccgggagaacctaccacaaacgaatgcgtaccgtatttcctcactccgatagagcttatcgaggtggggacggttagtacagaatctccggaacgcgtcggtgaccatgaaacgtctttctcagtttcctcgcgctgaggaaccacttgatcatgtcgacgtctagagccttccggaacctgacaaccagatcgagcgccgagttttctgaaggctcgtttggcctttccagatctcgttgtcggtgccatggcggatcagtactgagtgcgcggtcgagagcaagggaagggatgccagctcgagatcccgatggagatccgagatgtgccggagcggatcgaggcgccgatcgccgcggtggccgtgactgcggcgttgtacatcatgatgctctgcaagatcgctaccatgtgcatccttc

SEQ ID NO: 108651 - DNA, 531 bp, Zea mays
  Clone ID: MRT4577_30583C.1
aaggagggccttcggctccacccacccttgccgctcctgctcccacgggagtgccggagctcgtgccaggtccaggggttcgacgtgccggcgggcacgatcgtgttcgtgaacgcgtgggcgatcgctagggaccccagccactgggacaggcctgaggagttcgtgcctgagagatttgaaagcagcagcgtcgacttcaaggggacggacttcgactacctaccgttcggggcaggacgaaggatgtgcccgggcatggcgtttgggctcgtgagcatggagcttgcgctcgctagcctcctctaccattttgactgggagctgccgcctgggatgacggccgcggatgtagacatgaccgagaagatgggggtcacggctcgacggctccaccacctcctgcttgtcccctccgcccgagtgcccgtgacctagctaggtctggtccacgagcagaacctggaaacttcgcatacttggataacgctgaatatcaatacttgcttaataaattcagctattttggat

SEQ ID NO: 108652 - DNA, 522 bp, Zea mays
  Clone ID: MRT4577_30584C.1
ttttttttttttttttcttttttttttatcccgtggttcggccaagaccaacgcttgcctactccatgttgtggcgtcccaacggacgagggttggacgagggttgcaatcaacccctctcaagtggtccaaagacctacttgaataccacggtgttttgcttgttttactatatcccgtttgcgaggaatctccacactttggagcctctcgcccttacacttgaagttcacaaagaagcacgaagtaagggagggataaacaacacactcaagacaagaaatcacagcagcaccacgcatacaagtcgcaacaagagctcacaacacaactcaatgagttcacaactcaactagagctctaattgctatcgcaaagaatcaaaggcgcggaatcgatgtcttagtgcttaggaatgcttagaggatgcttggtgttgtcctccatgcgcataggggtcccttttatagccccaaggcagctaggagccgttgagagcattccaggaaggctgatcttgcc

SEQ ID NO: 108653 - DNA, 327 bp, Zea mays
  unsure (1)..(327): unsure at all n locations
  Clone ID: MRT4577_30585C.1
cacgctcacgngagctcnggaattcgtgctcngaggtgacattgtgcaccagctagcatccgtttgatggctcaacgtgatgtcacgatgatacgagacgattcgtttgttcatgtcctgcttgcagttggcccactgacaacgtgtcctgctacatcaggtctatgatacgaatgatgttactgtgggtcttcatgattcctcttaagtccagctcacatgatagtatcgtgccagagaccagatctactatggacataggtgatgagcttcactctagcattcttcatgcatcagacaaaaaggctcggcatcagcttgtttacg

SEQ ID NO: 108654 - DNA, 266 bp, Zea mays
  Clone ID: MRT4577_30586C.1
gtgatttgaaataattgggaataaatagttcttgaatccctgaagcgtgcatatatatattggtgccgcgattaaggtaatggagtcgggacacacgtttcagccgggcgttatcctgcttctcctgctcattgtgcccaccgatatggcacaggcaatggaatgctatacgtacattgagcgattcggtggggcatgcatgatcgcaaataactgctccaatgtttgccgggtagagggctttttgggcggcaagtgctacacct

SEQ ID NO: 108655 - DNA, 358 bp, Zea mays
  Clone ID: MRT4577_30587C.1
aacgaaaccgcatgtttacatattcacgggaagattggcatcgctacataaaaaacaaaaaattggggggtgggtcctcctttgaaagccaacaggggggcccataatggaaatgggcttggacctagcgtttttaaatactagcttataggaggccaaaggggggaaaccaaaaaccatgtcccctggcggggctcggcgggggccaaatccttaaccagatcagtttggcgatcacgtgaattcaaatgacaaaaggggggggctagcaaaccattattggggcggggaggggggggattaaacaccgggaacagggaggcccacccggaggatggggcggaataagaccgacccc

SEQ ID NO: 108656 - DNA, 488 bp, Zea mays
  Clone ID: MRT4577_30588C.1
ggatcctaccaagggactcgcaggagcaccacaccacactacaaggccgacccacgaacgcgcaagacctaccctgaaacgacaaccacccgccgacagaacggcctcatggtcatcaacaaccggacctacaccaccgtggagggagggacctgcactactgcgcaccatcgccaccccaaacgccacttgcacgccctagacatcttcaacgagaaaaagcttgaagacaccgaccattcaacacacatcacggacaccccctatgtgaacccgactgagtatcagacgaccgagatcgcggacgatggaactgtgagccattatacttgagacggcaacactaaccatgatcttagactcccaaccgatgagacttttgtggcccagatcaaggaaggcctccaaagcaacaaggatcttgtcgtgactgtccaatacgggatggggtagcgagcagatctccacgctgaacgatgcagccccca

SEQ ID NO: 108657 - DNA, 246 bp, Zea mays
  unsure (1)..(246): unsure at all n locations
  Clone ID: MRT4577_30589C.1
acatccttaccaaactaccctccacactcnaatttctttacgcagnctcancacgcaagaagaagatttacaatagttttgggaanccnaatcancaactanccacctaatctaatattctaactatccatataaaccccttctgcaagaatattaccaatatcactttccctaacaattccaacaatcatcctaaccaactccccccctaccacttctacctcatctactataaaccccattacc

SEQ ID NO: 108658 - DNA, 326 bp, Zea mays
  unsure (1)..(326): unsure at all n locations
  Clone ID: MRT4577_3058C.1
cttctccagagagggttcgtgcgtctggcgccgccgcagcccagggcgggcctcttcgttggcntcaccccgggtcatgtcgtcaccaagcgcgagctgcctccccgcccgtgcncccgcanggggaaatcancgaagagggtgtctatggtcaggggcctgntctgtggggggggtgggtttgctccttctgcgcngcgtgtcgctgggcttctgctggttggctcggtcccccgtgccctggtgcttgctttcggcntgcctggcactcgcgggggggcgccgcccccgtgcccggggcgtgcggcgcgccccgcggcgccccg

SEQ ID NO: 108659 - DNA, 1488 bp, Zea mays
  unsure (1)..(1488): unsure at all n locations
  Clone ID: MRT4577_30590C.1
taccggacgtacattcccggggtcacccacgcgtccgcagacgcgtgggcggacgcgtgggcggacgcgtgggcgcgcgctctttgcactccgtgtccgtgatcaccaccacaccgctatcctgctagctaggtagctgaattcggagccaggctcgagcgagggggggcggaggcgagatggaccacgcggcggacgcgcaccggacggacctgatgaccatcacgcggcacgtgctgaacgagcagagccggaaccccgagccccgcggcgacttcaccatcctgctctcccacatcgtcctcggctgcaagttcgtcgcctccgccgtcaacaaggccgggctcgcccagctcatcgggctcgccggcgagaccaacgtgcaggcaagtgcgctgtctagtctttttttttcttttcttcggagagattgatcgagatgtgacgatgccgctgccatggttgctcggcgtgctcgacagggagaggagcagaagaagctggacgtcctgtccaacgaggtgttcgtcaaggccctcgtcagcagcggtcgcacctgcgtccttgtgtccgagaggacgaggagcacgttcgtgaccctagctgcgtggaggtgacagactgacntgtgagctcgttctgagcactggaactggtgtcaatggcttcacgctcgacccttcacttggggagttcatactaacccatccagacatcaagatacctaagaaggggaagatctattcagtcaacgaagggaacgccaagaactgggacgcgcctgttgccaagtttgtggagaagtgcaagtaccccaaagatggctcgccaccaagatctttgagatacattggaagtatggttgctgacgtgcaccgtaccttgctatacggcggtgtgtttttgtaccctgctgacgagaagaacccaaacggaaagctccgtatcctgtacgaagttttccccatgtcgttcctaatggagcaggcaggaggccagtccttcacaggcaaagaacgggtccccgatattcctcggaagctacgacgacgtggaggagatcaaagcgttgtacgccgagcaggcgaagtcgagctcggcttcatcctaagtgagggtgtaaatcgacttttcctggcttaatttgttgcttacctgattcagacattcgtttccgtttcccttggtgtcgtcgtaagtgtgacattcagtgcaatatgtatagcaactaagggactccgtaaaagttacatgcatctctagcacctaaagcattgcgttataaccaacctaaaaagaggtgatcaggtgtcatagatgatgaaactactggcgcaggctctgcaaaatatgtattgcgcatagagatccctgcaaaaaaaaaaatatggccgtgtcataaattgttcgatacgtggaagtccatagtcgctcctgaaaaatgaaaggcctgaaaaaaaaaaaaaaacaaaaaaggagggaaaaatt

SEQ ID NO: 108660 - DNA, 601 bp, Zea mays
  Clone ID: MRT4577_30591C.1
gttgccgcagcacaacaacgcatacctcgaaccttaccaaagctattaccatggaacttgcatcaaacaaggacacaggctccattttaccactactggcaagagttcatgtccttgcttggaggagaactggaagcgcatctggagtatgactttatggctctcaatctgcataggcctctctatttggaagctcattcaataccgtgattgagcagtattacacatcatgggttattgtgtgaccactgcaaaaggtgctgctgataccctcaaattcaatatggcgcctggcattttttcctgtatgccgaaatacaatcacatggattcgatcaaagacaaagatcggagctgctgtgcccttcaatgacaacatatacttccataaggtaatatcatcaggtgctgtaggtggtgttgttttgcatgcaagtgctcacctgacatgtgattttgctatgctgctgcatgcaattgatgctgtctatgaaccaatgaagcctttgcttggagacaaaacgccaccagattactggaggatcgtaaagggaactgaaaggtggacaggtcgaggtcatggtctgtacttatgactata

SEQ ID NO: 108661 - DNA, 264 bp, Zea mays
  Clone ID: MRT4577_30593C.1
gtacgctggagtcttgtgttttatttcatcggtcttgtaccaaaatagcttgccattttatctacttgacccctggcgcatgctctctctctctatctctctctctctcccttttcaatttaaggggctctatttctctcctcccacaccttgcatctactagatgcattagcgtccctagtcgagacaaacatcggacgcgcgccactgacttagctcgccatttctacatccgcaaccctgcgctgctcaactccgatcctt

SEQ ID NO: 108662 - DNA, 366 bp, Zea mays
  Clone ID: MRT4577_30594C.1
cgctcctggaggtctcgctgctcagcagcagtccactcgcgcagcggagggcggccaggatcttgcgctggttcaaggaggaagggccgcagagcaggacgaccagggcgcgttcggggcctcgcgtggagggagtggcagaggccacgtcgtgccacgacgacgacgtatcctgcgaggcgaagggttgccgggataccaccgtggacgagattgtgaggcgtagcctggataggaacatgaagtctatactgaggagggccacggcgtccgtggacctgaccaatgttaagctgctcgttacgagccccagctccaagagcttgccttgctgaactcacaatgacacaagtgctcagttttccc

SEQ ID NO: 108663 - DNA, 163 bp, Zea mays
  Clone ID: MRT4577_30595C.1
aattcctgggtcgactttgcatactagccggcggccgcccttttattggggtggttttatttcaacagccttacgtgttaacccaccccagaaagcgacggcaatgagaccatggttctaaatcatctaatagacatacacgtgtgtcacagctaatcaataa

SEQ ID NO: 108664 - DNA, 264 bp, Zea mays
  Clone ID: MRT4577_30596C.1
gcaaacagagcacataatctttttatttattacctaacaacttccccccgcgcgggctatatcattctttctcaaaaacaaaacctacttaccaacacccacctgcttaccatccatccatcacgatttcaacaaatgcacaacaccaacaaaaacactaacatattcacactcacctcaaactactcccaaatcttcacctacctactaattacaacctcaacagcaaaatacatacaactcctatctcataaaaactcttaa

SEQ ID NO: 108665 - DNA, 347 bp, Zea mays
  Clone ID: MRT4577_30597C.1
caacacccaggggggcaaaatggaacaaaccccggtacacaccaaccagaccgaccgagacaaaagccgggggaccaaaaaaaagacgaacggcccacccccaaaaaaagcagcaacactgactgccagacacccgaaccaaccaaaaagcgcacagaccgggaccaggcgaaccgccaccaaacaaaatttggggaaaagcaagccagaacccaacacacatgccaacgaaagccccccccaaacccccaaggcccggccacgggcaggacacgccgcgactgcaaccttaattagaggagccgccccagcgcacgccggcagcaaacgccttgtggactgcaccc

SEQ ID NO: 108666 - DNA, 290 bp, Zea mays
  Clone ID: MRT4577_30598C.1
acaaaaacattatttttatatttgccggatcaatgcccaacaaccatcatgtatgacgccgaggggcccgtgtcttgaacaacgacagcgagaatgcccgaccaaacgtaacgagccactacgactaccggtggactggtgcagtatccatcaagaccccgattaggggaggctccatgacgttggcaatcgggcttccctgaaggaaatgcaaacggctcatgacgtacaaacgatggtacgcaagggactcctctatggaacaaacaaatggaatcagatgtggatac

SEQ ID NO: 108667 - DNA, 641 bp, Zea mays
  Clone ID: MRT4577_30599C.1
ttttttttttttttttttttttttttttttttttttttttttttttttttttttttttttttttttttttttttttttttttaaaactaaggggccaaaatatgtaaaaaaatccccgggaaggcccccaaacccccggggggcccaaaaaaacggcccaaaatttttccccccggcggggggtccttaggggggcccggggactttacccggaacaaggaaaaaaggacccaaatttttcccggggaaaaattatccccctaaagggggggaaaaaggctaaaaattaacgggggttgttttgttcaaaacaactgtataatagggggggggttttatatacttccccaaggttttttgccgacctttactttggattttggggatttttttttgggttgggggctcccccccttctttgtaatgctgccgaatgctaccctccttttaaaaaaaaccctgccaaaaaacctttccagtttggggccaaacccccctctggggggggggaaccaagaaaaattttttgggaggctcctggcccttgcttttaaaagggggggagaaaaaaaactgcccaaaattttgccctctcctgcacctgaaagggggcggctccggcttttccccaggggggggat

SEQ ID NO: 108668 - DNA, 483 bp, Zea mays
  unsure (1)..(483): unsure at all n locations
  Clone ID: MRT4577_3059C.1
ggcctaacatcccattattacttcggtgggccttccaagggggggcgagggggattttccagaaccccaaaaggggggggcgacaaatccccctcttgtttttccacccggcaaatatttttctaataaaaacaggggggcccagggggccccccaaaaaaaaccttggtgtttctcagggggttccttaacaggaccctatttagaaaaaaaaatctgcctttttaaacagggggcntcccaaagagcaaccaacttttaaactaccccgggctttcaaactcttttgaaaaaaaaaacatatgcttgggcatgcaaaaaattcttttccccaacgggcacaaaggggttgncggcgaaacaaaacccttgcccgttgccctgctttgggggagcggggtggggccccccggggggggcccccccctggagaggggggggtgcaaaaagccccgttttttcacccctttggggggggggggc

SEQ ID NO: 108669 - DNA, 350 bp, Zea mays
  unsure (1)..(350): unsure at all n locations
  Clone ID: MRT4577_305C.1
cgttcctatttncagcaaaggcaaggtgagtagcactcgtagcagtactgatgagtgagtgatggtgcggtggagcactgcagcggcaggtttatctttctcctctcttgctcactcgcacatgcatatcccactcaccagcagcagcgagctgaggctaggctagccatcctcatcctcaactcctacgcgcttagcttgcttgcacaaacctctctctatgtctaggagcttctcgctgcagatctaccgccgatccatccgctaccgagctatgccaatctatatatgcagctcatgcatctaacctactgcatgtcacacagccccagccccatgcccgctgtacc

SEQ ID NO: 108670 - DNA, 853 bp, Zea mays
  unsure (1)..(853): unsure at all n locations
  Clone ID: MRT4577_30600C.1
agcagtggtaacaacgcagagtacgcgggaacattatccaaatacttactaacaattgttatgccatcctgaacaaccagattgataatgtggcacacactcctttggtggacaacataaccatctatgtatgactgcagatgaggggtaagagattctatcgcatttgtatttgaggaagcattatcaagagtaatatacagaatcttattccttatgttaaaatcattaaccacctcaagaatatgattagcaattgcagtaccagtatgtgaatcatacatcactctaaaacccataacacgcttatgaagacaatataaattatccaaatagtgtgcaacaacagaaatgtaactagtcttttgatgtgatgaagtccaaatatctgaagttaaagcaaatgaaaactgatttttttaaaaaattttctttaagaacagcaagttgtttgtgatactgagacctgattttatagtagttctactaacaggttggtattgtgggcagaaagcacactgaatcagattcttaaaattagggctttctcccatcataataggcaagtctttagaaacaatgtatttaataatttcttcactagctaattgtggattgtaaacccaagtacttacagtgccgtncgcagcanagtttagttgagtttgcatatctgcaccaaaactttgccttgccttttttaaacaagctttgaagtgtcgattcaaatgcccagtgccaccagcagaatctacactcaactcagttttaccatagtgacatatagcaatataactttttataccattcttgataatctcccgcttatccatatgcttccagcactctgccc

SEQ ID NO: 108671 - DNA, 533 bp, Zea mays
  Clone ID: MRT4577_30601C.1
aatcaagagatacgaaatacctatttggcagctaatctggccaacatatcaaaattcacgtccagaattatctgaccacaaaccaagtagtcagctacagcaacgccttttcataggttatcagcaagcatcagcacctccttaaatgttgctcacctcttcagcctaattgttgtttgacacctgcatcgaaactagcacaacaatccatatccagaaactgataatactgcctcggtccagtccttaactccgcacaagtgacacgacctgcttttaaatagtgaaacttgcaaacagaaactccttgatgttcagaatttttcctgtcatgaagagtaacttccaggcgaacagttaggtatggtatattatttggtttctctgctctggtagttgcccttgcccaatgctgacctcaagtttggcgccatcatgctgttgtcttgatgcatccacaggagagcctcaaagctgctggaagcaaaaagggttcactatctcacattttgtttggccccataaatttgttt

SEQ ID NO: 108672 - DNA, 1993 bp, Zea mays
  Clone ID: MRT4577_30602C.1
ggtgcttagagaaggtctgcgatattttgaattttcatatgattgaaattatcatgcaacaacattcctacgtttgtgctattcctgcattttatcaatcctatattccaaacggtgctaggaaaccattaccatttttgccttgatcagattgttgtgcgcaaaacgcattaccaagcgaagtcaaacgattgccttcatgctttgcacgcccatgtcccaccatcactttttttattttttggcaaccaagaatcagttaatgtgaatcccataaatcaagagatacgaaatacctatttggcagctaatctggccaacatatcaaaattcacgtccagaattatctgaccacaaaccaagtagtcagctacagcaacgccttttcataggttatcagcaagcatcagcacctccttaaatgttgctcacctcttcagcctaattgttgtttgacacctgcatcgaaactagcacaacaatccatatccagaaactgataatactgcctcggtccagtccttaactccgcacaagtgacacgacctgcttttaaatagtgaaacttgcaaacagaaactccttgatgttcagaatttttcctgtctggagaaggaaatcgccacgggtcaatttggcaacttcatccttccacaatcactatatctacagctacatgattgttcgacacgcagtaacaagagaaaattcaaacacttgccatgaagagtaacttccaggcgaacagttaggtatggtatattatttggtttctctgctctggtagttgcccttgcccaatgctgacctcaagtttggcgccatcatgctgttgtcttgatgcatccacaggagagcctcagagctgctggaagcaaaatgggttcactatctcacattttgtttggccccataaatttgttttctctcagcaggtttcagaatttggaaggaacacatcaaagtttcgtcaacgctcatcattgcgccagcattatcaaattcaccacaataattgggagccgagaatatggtgacaagctgtctgtcagcaaagaattcatacccatcctcgacaacctgatgagcacgacaaataagatcaagatcatgcctttgcaggaattctgaaaccttgtcagcaccaaaggtatatgagacccctctatcattcatgccccacccttgaacatcttttcctggatctgaccaaagtaagtcacacagtagaccttgatctggtacatcggttggacgttgcaagttctttatctcatccaagtgtgctagatcgggagaaagtccaccgtgcatacataatattttatcatcgataagagcagccacaggtagagtgttaaaacattctgtgaagaccttccatagccgcacattaaatcgacgcttgcattcatcataaaatccatatattctgtttattgaggcacattcatgattgcccctcagaagaaaaaagttctcagggtacttgattttgtaagcaagaagaaggcatatagtctccaaactttgtttgcctcgatcaacataatcacctaagaatagataattggcttcaggaggaaaacctccatattcaaaaagccttagaagatcactgtattgaccatggatgtcaccgcagatcttgatgggcgcctcgagctcgaggaggttgggctggctgaggaagatggcgcgggagacggtgcacagctggcggatctccgactcagagagctgcacctgcttccctgggcgcgcggtccgcacctcgagcaggcggcggatgatgtcgtcgaggagcgcggcgtcaatgcccccgccaccctgccctcccgccgctggcgccgccgacatcccctccccttggctgggctgggctggagagaatcagtggggctagggtttcgggcggcgcgtcggaaagggcgaaggggggtggagggaccgaggaaagaaattaaagcggacaccagataggtagataaac

SEQ ID NO: 108673 - DNA, 1892 bp, Zea mays
  Clone ID: MRT4577_30603C.1
gagtttatccacgtgtccggtccgctttaatttctttcctcggtccctccaccccccttcgccctttccgacgcgccgcccgaaaccctagccccactgattctctccagcccagcccagccaaggggaggggatgtcggcggcgccagcggcgggagggcagggtggcgggggcattgacgccgcgctcctcgacgacatcatccgccgcctgctcgaggtgcggaccgcgcgcccagggaagcaggtgcagctctctgagtcggagatccgccagctgtgcaccgtctcccgcgccatcttcctcagccagcccaacctcctcgagctcgaggcgcccatcaagatctgcggtgacatccatggtcaatacagtgatcttctaaggctttttgaatatggaggttttcctcctgaagccaattatctattcttaggtgattatgttgatcgaggcaaacaaagtttggagactatatgccttcttcttgcttacaaaatcaagtaccctgagaacttttttcttctgaggggcaatcatgaatgcgcctcaataaacagaatatatggattctatgatgaatgcaagcgtcgatttaatgtgcggctatggaaggtcttcacagaatgttttaacactctacctgtggctgctcttatcgatgataaaatattatgtatgcacggtggactctctcctgatctagcacacttggatgagataaagaacttgcagcgtccaactgatgtaccagatcaaggtctactgtgtgacttgctttggtcagatccaggaaaagatgctcaagggtggggcatgaatgatagaggggtctcatatacctttggtgctgacaaggtttcagaattcttgcaaaagcatgatcttgatcttatctgtcgtgctcaccaggttgtcgaggatgggtatgaattttttgctgacagacagcttgtcaccatattctcggcccccaattattgtggtgaatttgataatgctggtgcaatgatgagtgtcgatgaaactttgatgtgctcattccaaattctgaaacctgctgagagaaaaaacaaatttatggggtccaacaaaatgtgatagtgaaagccattttgcttccagcagctctagcctcttaaggttctcctgtggatgcatcgagacaacagcatgctggcgccaagtttgagggcagcattgggctactatcagagaaaccaaataatcccatacctaactgttcatctggaagttactcatcatgacaagtgcctgaaatttttcctctttcctgttaccttgtgtcagaacattatgtagctgtagatatattgattatggaaggatgaagttgccaaattgacctgaggagattcctttctccagccaggaaaaattctgaacatcaaggagtttctgtttgcaagtttcactatttaaaagcagttatgttgcttgtgcggaggtaagtactggaccgaggcagtattatcagtttcatggatatggactgttgtgatagtttcgatagaggtgtcaaacatcaattagggtgaagtggtgagcaacatttcaaggaggtgctgatgcttgctgacaacctatgaaaaggcgtttctgtagctgactacttggtttgtccgtcagacaattctagacgtgaattttgatctgttggctagattagctgccaagtaggtatttcgtatctctagatttatgggattcacattcactcattcttgttgctattcacttgcctttgttatgttgctacatgggtgccaaatgcggtctgcaaagcagtcgtttcggtttgtttggtaatgcattttgcgcacaaaaaaaaaaaaaaaaaaaaaaaaaaaaaaaaaaaactcgctcgtgc

SEQ ID NO: 108674 - DNA, 396 bp, Zea mays
  Clone ID: MRT4577_30604C.1
gtctcgattcccgatcgaccacgcgtccgggacgcgtggctcgacatgattaaccgtttattcttccaactgacggatcagaaatgggtcgacacgtacgccaacatcatcgatctcaatcaggatgttaactgaatacggcaccagatcgagagcgagctgtagctacaagatctccagagaatagaggacatgccatcgacacatgttaaccgtatgatagcaatggaccctgatggtggtacccgacatcgacacaagatactgcaggtacatacacttcaacaagaagcatgcaggctagaaccacgtacacagcgcgcatggtgaatacatgttcatggactgatgatgtcatgttgatttcaattgcgctgaaaacgttacctactacga

SEQ ID NO: 108675 - DNA, 3300 bp, Zea mays
  Clone ID: MRT4577_30605C.1
aaaggtataaaaaatgcatatcacagacttgtagtcacaataaacagggcacccccaaggtacaaagcaaatcctgtagacatttatcgaacgctgcttttcttttgttgatgcgaaataaatatcaacaaaagatacaacaccataacggcaaggcaaggttatttcctcactcgcagcacttcactaccggtattcgaacaacagttacaactatactcgtacaaaagaaaatggcaaacgttgacaaacccatgacatcgatagaaaatacactcaagcacccttttcagtaaaagaaaaattagtaaactggttcataaaacctcaaaatcaataatgaatgcgcacttcatcagcccacatttccatctcccatcctttcacccttagatccctaaaaggcgatgttggaggccatgatccgaggctgtcgcaatcgatggcagtttccagtatccgaggcttctcgcgatcaacgacaaaccgaaaggtttccattttgggcggtttaaactatctcaatggtttttgacggctaagaatctcctgttccttgaggcgctgctgaaaccgtgccaagcgtgcctgaaggcttaccaaaccagaagccttccgcgacaacagaaagcttagctgtgccacgtagttgtcaataagactacctggctgatcgacctctgctaatagattcatctcttctcgtactatctccattgtactttcaatttcctttctgtgagctgctatcagcgcctcttcctcaagtattgtgtttatttccatatcttccttctcagattgcttggataaaacctgcgacgatgaggttgatgatggcctttgcagctgtttaagttgctgttgctgcttaacaccagtccgactaatttcaggcccactttcttttttcatgtagttgacctgcctttctgatttctcatccctgttagcttttctccggggtggtgagacttttgtcactttcacctcttcttgtgaatttattgattcctgaagtgaatgtgttttactattaaaaccagcctggttatatttcaagtcccctctctccctatcattcaaaccagatctagtactagtttcttcttttcctttatgtggatagcttggaatcatacaataggagtttttctcaggctcaatggaagaattggaagtgaaactgtcaacacctttcctagaagaatcaacaggcctaatttcttgagtctgctccatagtctcttcagcttcacatgataaagggtacgatgtgtaggtagattccttgccagatgatacagactgcacagcaaactgctccttttttgtgttaccaccttttgaaagacttttaaccctgtcagcatatcttaacgtattcagtgtgtgttcacatgaacctgaacttggtgaaacgcaagaaatcatcactgtacgggagtttccaacaaaggagtcccgaagcacctctgttagcttgcttcctctgaaaggaatgtgtatttgatcgttatccagtgcccgaatacattccttgagagccaaaaggctcttgttgatctctgcaccttcaattcttgtttgtttgtcattatctgttgtatcagcaccacgctcacttccagcaagatcaataaatgacattttccccacatgctttgtattctttgcttcaatagcatctcggtctctctgtctccgggtttcagtaactgggatatgctttttcacagacaattgcagaatagcatgagatcgtgaggactcttcattggctccagttgtgcctgtgcttcttgcagcatttcctttctcaatgtattctttgacaatctggacatcagaaacctcgaactcctgtaaaccaacaatacagacctgtttctttccgtcttctctcattaagagttgcctcctttcgctaagaagatcaaagagtttgccaccataaatttcaaagtagctaagccataacttgaaatgttgattccgatacataggttgatgtaaaagacaaaccatatcatgtgcagctctaagaggtaggggttgcattgtataggtcttgccactgcctgtttggccatatgcaaagcatgtcgcttttgtcctttggaaaattaatggtataataggctccacagtctcacggtacacctcatcattagttacattctcgcccaagacagtgtcaaagcagaaatcatgcttttccacataagctgtcaaatccacctttagtttaggctcatggacagttaagaattgagaattgtgtacatctatgatgtcttcctcttttcgagatacctcctttttgttcagaggtcttttccttaccacgactttaatctttgctacattactttctcttgcactgaccacagtgttttctttttcgttggtgaaggcactctggttgtctactagaccttgttggttttctgctattacatcgtagtcgtcatcatccatttcttttggcataaaaggcgaaggctcaaatggttctgatgcagcattctcagaaagaagctcgctgtcatccattgcatgaagatccaaaaggccagccccaaattcacctctaagttcaggtgaataaaatccatctacaggagcaccaccagcaaagctctgtcctgttgaagtatagggctcggatatagatgcagatgctaatccaccattaacatttaggctcctcaataatgtataaagcttctgtttctcctcgattgtttgttttttttttttttttcggtggtgaaggcactctggttgtctactagaccttgttggttttctgctaatacatcgtagtcgtcatcatccatttcttttggcataaaaggcgaaggctcaaatggttctgatgcagcattctcagaaagaagctcgctgtcatccattgcatgaagatccaaaaggccagccccaaattcacctctaagttcaggtgaataaaatccatctacaggagcaccaccagcaaagctctgtcctgttgaagtatagggctcggatatagatgcagatgctaatccaccattaacatttaggctcctcaataatgtataaagcttctgttgcgctcgagacggcgctcagatctgtacgacgaggccggcaggcaatgccgatccggctagcgccgaattgggtgggactcgaggcggataggggacggggtggatcgaattgggggttggtgcgagggcgagaggctgcagggattggtttggcagccaccgcgccataacggcgtcgccggagtcccccgcggcggctgac

SEQ ID NO: 108676 - DNA, 276 bp, Zea mays
  Clone ID: MRT4577_30606C.1
acgaaataacaaatgtttattgcttcaatttttataacatacaagtttacattttctttttattttcctctattggattggtatgaattccctgctttctttccacttccattgtaacttgcatataaaaatagcccaaagaaattaataataaaaatggccatcgtacaaacacagtttctttccaaaaaattctttgcacaaataaccagccaacctcactttcaccaaggaaattaaaatttggatattaacccaaagccaattggattattt

SEQ ID NO: 108677 - DNA, 294 bp, Zea mays
  unsure (1)..(294): unsure at all n locations
  Clone ID: MRT4577_30607C.1
cacagcacaacagcaatccaatccaatctcacttacaatcttctgctttttacgcaaaagcagaatcagctatcaaatcagatcttctcgatcaaccacataacaacaactcaacatgacagaacctctttccaaggtcgattcagccgtccagggcctctcaagctcacctcccgccaaggatgacaagaagacgcggcgacaaagctcagcagcagcacctggcgtttacaacatcaatgaccttgaagccgaaggcactgaactcgagctcngcaccgagactcagaagac

SEQ ID NO: 108678 - DNA, 651 bp, Zea mays
  Clone ID: MRT4577_30608C.1
gctctctcacttctctagccacggactccatggagcagcagtaggcgcccagctccttgcatcaagtgagcccggtggccagttccctctcccagccgagctcctccccttccagtagatgagcacgccgtccctccctatttcagctcgcctctatccgccatggtccggccagggacacccacgtcgagcttcctcacacgcacgctcagctccagctcgccggctgtgctgctcgctcgtcgtcgttgcagccgagctccactttggctgctgcccggccgagcttctccccgagctccctgccctggtgccgcgccccttcctgttcggccgctatttcctctctgctactcgcagattccttttctcccatgctgcagcacatctccatggctgccgtcgaccatctccccaagttgagcaccgcagtccactcctatggcgagatcgccttccctgccccaagcttgcctccatcgtgtccctgaccctctgctcgagctcgcccttgcgcgcaagttctcctgtgtcccactgtaacaccccaatataaaatttctttcctcatattcacaaattcaggtgttacttcccttttctcatactttcccaattttctctttctcatttttataggagaaaaatggt

SEQ ID NO: 108679 - DNA, 841 bp, Zea mays
  Clone ID: MRT4577_30609C.1
ggctttcctatctcacttcatgttacaaactctttactctatagacagcagtctatagagatggcttagagggcaaaatcgaagctgtggtttgacccatatgccatcacagcctcacaggcaatacgctcagtgttcagatgctcgaaccacacagtacgatcatataacgcggtgttggtcatgtcatgtctccatatcacgcacactaccacaacagacaccatgttttagcaacatctattgaatatctcgctgaagcctattcacgagctggaggcctcaaaagtatctggcttatgcttctccatcagggccgtcagggctgcgtcgtgatccctctccagctccagctccttcttcatgtattgtttcttgagcttcatcttcttctcctcgtggcctttgatcagctcatcccgctcagcttcaaactctgccacattcttgacctggcaatcaatgaacttctgtacatgttccttccttagcttacgatcttcttcggtagttccagaatcaacatcaaagcgtctagcctttgagcgctcctcctgcagcaacttctcaaatcgtttttctttatcctctgtggctttgtgaataccctcaatttgactatgaaaaaattcctcctggtgcttcatctcttcctcatactccaagtgcttctcttttgctttcctcttgacaaatacgttctcttccatagtctcacgtagcttctgggtaataacacccaatgtttcttctactgcttttagatctctgctctgtcttaaccatcttgttctttaggtaattcagttgttggttatcttcactcatctgtttcatctga

SEQ ID NO: 108680 - DNA, 207 bp, Zea mays
  Clone ID: MRT4577_3060C.1
ctgaattcggctcgagctcatgccccctgactttttgcacacgccagccacgaccaacagggggggctgttttaacccgactgggcaacctttacccaagaggacaaacctcagaccacatgggtaatgaccacacaccttcatggaccaccactcatcccaactcctgatcacgcacaaaaaaaccgtgcccatgcacccgatcca

SEQ ID NO: 108681 - DNA, 442 bp, Zea mays
  unsure (1)..(442): unsure at all n locations
  Clone ID: MRT4577_30610C.1
cccacgcgtccgcggacgcgtgggtgtcgggctgtccacgcgccggaaggtgccgctattcgccgtggctgagcccaggctgccggtgcacctgtacagcgcgaccgactgatccaatttacgacatttttatccttagtcgtgttttgtgctcagttttaaactttcagtgctatagaacagaaagacaaaactgagaaaaaacacaactaaagttaaaaatgaacacaccagcaaaaccaaggacaccaccttaaaaaacccattgtatattaatgaaagccagagcctctatatacaaaactacttgtattatatatttgaaagtctatgttttgtatctcataatgttggatttctatatatcagatgagtaaactctattttaatttanaaataaatanntttttttanaatttattttttattttaaatatttttt

SEQ ID NO: 108682 - DNA, 336 bp, Zea mays
  Clone ID: MRT4577_30611C.1
cgacggagggggttttttttttttttttagaggcggatagaaaatagaggggtcttccacttacttggtttgtgagtaaaaaaggttggtggtttttaaaaaaagaggggtataaagggacaaaattttggtttttttaaaaaggacggatttttgggaaaacgcaggatagaacatgaaaaaaattggttttttttaaaaaaaaaaaggggaaaaaaccacgttggtggggtttgtggataaaatttgttttggtgaaaaacaagaaagagttttactttcactttttaggtggggaaaaaaaaagggggggtgaaggaaaaatttgtttttttt

SEQ ID NO: 108683 - DNA, 413 bp, Zea mays
  Clone ID: MRT4577_30612C.1
ctaaaaaaagcaaaaaaacaaaaaaaagggggaataaagaaaccaatgaaaaaaaatggggcggtggctctcgacgtagtaacttacttctgttgtggccacaccggataatctgctgatcattcttgtggcgcattcgctgcttgcctattgggtgctcacaagtttctaccaggacaccccttgcttgctgacaccaccgggttttaccttgtgctgcaggaagaatcacactgggctccctggttggtgtagctcttggtgtctgtggaggaacccaaacgctgctgctctgcttgcattgtatatctccgtggcggggagttttctgcgtccaactttttgttctcctggagctgctataaccaccatgttacaacacccaaaaaaaaaaaaaaaagggcggcccgatg

SEQ ID NO: 108684 - DNA, 290 bp, Zea mays
  Clone ID: MRT4577_30613C.1
ataaaattagcagctgccgttggatcccttttatggcagctgtcttcttgtgctgagtgttgtaattgtagacccacctgtcataagctcaaattttagccaaaccttgcctaatacaaatgctgccaccttaagcaagatctggcaagggtgtggatgcatctccagtaaccaaactccagtaaccccccttttttttgtctttccacaggaaccattccttgtggaatcaaatgtccgttcaagccttgaaaggtccattatttttgagttgggaaacaaaacctccc

SEQ ID NO: 108685 - DNA, 296 bp, Zea mays
  Clone ID: MRT4577_30614C.1
gcgagtgctgcggattcacggaggagtgcacggagccgtaacatagagggcgtgcgcgcgcggttcggaggaagaggatctgaaaatctgtgcggagacgcaatgggcgaggagctgggacgcgcggtgacacccggcatctctcaaggcgaggcgctgtaacgacatgtccacacttatattagtgtgttccagacaacgataccagagggccttgagtaagctgacaagaaggctactaatgaccaactttggcctgatcgcggagagcgtggtgcacgcgtaagtgctgttag

SEQ ID NO: 108686 - DNA, 488 bp, Zea mays
  unsure (1)..(488): unsure at all n locations
  Clone ID: MRT4577_30615C.1
cggacgcgtgggcggacgcgtgggctcacaaccttctccacctcttctactacccacttcttgatatcatgtctgacctcggccgtgagagcttgaccgacaaggccaccgccgcccttaagcccgactctgagaagtcgaccaccgagcacctcggtgacaagttcaagggcaacgccgactctgctgcctcgactcttcagccccagagcgagaagtcgaccacccagaaggtcggtgacaccttctcgagcaactcgaaccacaacgaccagtcgctccttgacaaggccaagaacgctgtcggcctcggcacctcgaaccccacccactgatcaattgtcggcccaatgcaatcatcatgtgtacaactagcattcaaccaataatatactatcagttgtctacgatttanaaaaaaaaaaacactaaaacaataaagaaaaaaaatggaaggattaaaaaaaaaagaaaactataaaaaatat

SEQ ID NO: 108687 - DNA, 426 bp, Zea mays
  unsure (1)..(426): unsure at all n locations
  Clone ID: MRT4577_30616C.1
ccgcggcagcacctccaanagcgggactaccagaaagtgcaagactcggggagtctgacatgaagcctgacctgttcgagcctctcaaggtcggtcaggccctcaagtacatggagtgcgactgcttcgaccactgcgtgagcacgacggtgaccctgggtctgcatccctgcgaggcactacaccgtgcgcaacatcatcggcatggtcccgggctacaggaagaccaagtacagcgacattgggatctgcatccagtacgccgtgtgcaccgttaacgaggacgacctcgaggtcatgggccacatgtgatgaacgtggggtatcatgcgctgatataactacagaacagagcgctcaacatcttccactttataaagaactgggtgaagatcagatgccctgccaaggacagggtgaagaaag

SEQ ID NO: 108688 - DNA, 256 bp, Zea mays
  Clone ID: MRT4577_30617C.1
tggaaaacgctgcctctgcaattccaaacccgtcattgtctaagaatccctcgcattctttccgcgtccggaacggcagcctcaattcaatgcgcctgcgccgcgtgttcgacatcttcgactgcattggctacggcgagatcaccctcgacgatatggcctccgcgctctacgcgctctgcctcggcgccgtatgctccggtctggaggcctctgttggcgggtacatcccggccggctccgccgggctccactt

SEQ ID NO: 108689 - DNA, 502 bp, Zea mays
  Clone ID: MRT4577_30618C.1
cgcctcagttctcccaactgcctcgctcagctgccgtggagatggcaaaaaagcctgatagatggtatcgatcagatcgaagaacaagacatacgcctacgtacagatactgccgagccgtcactgaccgcaagatatcgatataccatgccgcgatgaagaggaagagagctgatgatctcccctactgtgagcaccttgtctcaagtgaaactgagaatgactccagaaaggctctcgaggcagaccgatttgcctgcaaagagaacatgaccaagtctgaagaaaaggatgccttccaccctaagatttttttttaccccctccacgccctccgcataaacaaaacgatttcgcgtgctggagacgatacgatgaaaatggaatgatggtcgcccacggcaaccctcaaggcaccagggttatggaggacattgtccacgctctcctactcgggacatgcaaggacaacaataggtgtccatggcagcaaagatctgca

SEQ ID NO: 108690 - DNA, 151 bp, Zea mays
  Clone ID: MRT4577_30619C.1
cagatctcatagggttggtgtcaggtggcgtctccttccggccgtcgtggaacagggaaccgggtgtggagtgacttggattccctctgtagcactgcactgcactgcactgcaagttgttgtacacaagtgcatgtgtatgtgtagaact

SEQ ID NO: 108691 - DNA, 699 bp, Zea mays
  unsure (1)..(699): unsure at all n locations
  Clone ID: MRT4577_3061C.1
tttttagaaaaaatggatttcgcgtgtagatgacaagatctaaaatggatttagtacactgccccttaataacaaaaaataaatcgtgtgtcgctagcgtggtacaatttctggggacaccaaatccttgggaagtcaggaaggcacgtaggaggaccgtgtacgaacgtgaaagaggtactacatgtacgggtcttatttaccaaaactgtatcatgggaacagtcggacggacagtgcccccaaaatcattagtagcatgcttcattaatcacggtacggcgcggcggcagcaggcggtgaaggtcagcacgccacggtgcgtctccaacgaggcatcgcgtcgcatctccactcgtcctccagctgctggggttgccgtcaccgtcaggcgaggtcgtcgcctcgtgaggaacaggaactcgatattgcttgtacttcccggtggctcncgcggtnccggtgtcccgtcccgttctccaacctgatgagcgatcaggcactgttctccaataaacgggcaccgcacgacaaaccccgagcggcagtggggaggaagaagtatcctgatgaagagcacaagtgcaagcacctgtgggatgagaaacacagcagctgcctcaaggtagtttaacaccctgaaattggcagaaaaagaccacctgcggtcatgccacctctgattccacattcgaacat

SEQ ID NO: 108692 - DNA, 787 bp, Zea mays
  Clone ID: MRT4577_30620C.1
cctcgaggccggccgggccgggaaaaacttacgctgtgcttttgggtgagttgagctcatggagcaggacaagagagccaaggtgctgtgcctgcacggcttccgcacaagcgggagttttttgaagaaacagatcagcaaatggcacccttccatatttcagcagtttgagatggtcttccctgatggcctcttcccagctggtgggaagtcagagatagagggcatatttccaccaccatatttcgagtggttccagttcaataaggaattcactgaatacacaaatctggacgagtgcatttcatatctatgtgattacatggtgaaaaatgggccttttgatggcctgctcggattctcccagggcgcaacactttcggcccttttgataggctaccgagcacagacgacgtgtctgtgaaacagctttctgaatggagctcacgcgtcctggaagacctcaagagtgcagatgttcctgaggccttagattcaggcaaaccatctgataaggaggctgctggtgcggaattcacagaaaacctggtgaaagcttgaggcatgctcactagtcacttcagccttgttcgattattcctatctcacatggattgacatcgaaacgaacaatcccttccatggcatggctgcatctgggacttgtaccgtttttactatgatctgagtagtgcgtggaacttgtttgatcgcgaaaatattgcatttggcaaagcaataaatcgttatttagagctacaacgaaaaaaaaaaaaaaaaagcggcc

SEQ ID NO: 108693 - DNA, 1181 bp, Zea mays
  Clone ID: MRT4577_30621C.1
ggtacctccgagccggccgggaaacttacgctggccggggagagcagacgctgtgcttttgggggggttcaggtaaaaaaaaaaaaaaaaaacttgacgcggccgggaaacttacgctgtgcttttgggagagttgagctcatggagcaggacaagagagccaaggtgctgtgcctgcacggcttccgcacaagcgggagttttttgaagaaacagatcagcaaatggcacccttccatatttcagcagtttgagatggtcttccctgatggcctcttcccagctggtggaaagtcagagatagagggcatatttccaccaccatacttcgagtggttccagttcaataaggaattcactgaatacacaaatctggacgagtgcatttcatatctatgtgattacatggtgaaaaatgggccttttgatggcctgctcggattctcccagggcgcaacactttcggcccttttgataggctaccaagcacagggcaagttgctgagcaatcatccaccaattaagttcatggtctcaatatctgggagcaagttcagagacccaatcatctgtgatgtcgcttacaaagacccgatcaaggtgaaatcagtgcacttcattggagaaaaggactggctcaaggtaccttccgaggagctggcttctgcctttgatgagcctctcatcataaggcatcctcagggtcacactgtccctaggcttgacgacgtgtctgtgaaacagctttctgaatggagctcacacgtcctggaagacctcaagagtgcagatgttcctgaggccttagattcaggcaaaccatctgataaggaggctgctggtgcggaattcacagaaaacctggtgaaagcttgaggcatgctcactagtcacttcagccttgttcgattatttctatctcacatggattgacatcgaaacgaacaatcccttccatggcatggctgcatctgggacttgtaccgtttttactatgatctgagtagtgcgtggaacttgtttgatcgcgtgtgtattgcatttggcaaagcaataaatcgttatttagagctacgaactaaaaaaaaaaaaatcaaaacaactttttttttttaaaaaaaaaaaaaaaaaaaaaaaaaaaaaaaaaaaaaaaaaaaaaaaaaaaaaaacggatcctcgaa

SEQ ID NO: 108694 - DNA, 543 bp, Zea mays
  Clone ID: MRT4577_30622C.1
aaaacattagggtcctggattttacacaaaaaaacaaaggggggccaaagtacatacaagccaaccccaacattagagggggaaatataatttaacagctttttccaaatataaaaaacccacgagagccttaaaaaagcatccaacggggggggctaaaacccagggccatccatgaaacccggaagcccaccccccctttttttttatgaaataatccccccaagccacgcagggcccccacacacatacatataggggggaaaaaatataggtaaagcccaggggcaatctcacggatagacttcgaaggcaacacgagctccaaattccttaaggattttgtattcgctaaaccctgttttgggaaaaagccccccccattttttttaatctttcggccgccctttgggcaggggcataaggccgaggcccataaggaggggagtttccaacataggcccaaaggggccaatcataaaatcaccgattataactttcccgccctccttccgggaaggaatcgccttccggctttgaccc

SEQ ID NO: 108695 - DNA, 1105 bp, Zea mays
  Clone ID: MRT4577_30623C.1
ggggcggggcgcgcacgcgcttttttttttttggccctatttttttttttttcatttacttcgatgaagccactgaagaagtgcgtcatcttgtccaagatgaacaagatcgaaggccccaacacagggagcttcgacaagaaggcctattcaacgaggatgcatggatgatgattccaattctgacacctttacttttgatgatgcttcttatggttctacacaactctcaaaactcgatcccccctccatccatccctcgccatactgatggacaaccatgtacctcaagtgggctatgggggcaaaccccggtcggggtgtggtgggagttcggcaaggacggcgacacccacctcctcggcgacaacccttgttgccgatgaggtcctgggcaacatataaagcacaatagtgtaccaacaatggcagccaaaatattttgcttccttatgctccttggtctttctgcaagtgctgctaccgcataccattttcccacaatgctcacaagctcctatagcttcctttcttcccccatacctctcaccagcggtgtcttcagtatgtgaaaaccctgttgttcaaccctacatgatccaaagcgcaatcgaagaatgcatcttacaagctagtgatcattgtatgcgaggggctgcggttcttcaccgtgtcccgcaaggtagacgaggggttcaagaagccgcaagcggtgaccatatcggcgctggaggggaagcaggtgcagaaatgggacaggatctcgaaagccgtcttcaggtgggccgtcgacccgaccgctgagatccccgacatgaaggatcttggcatcaaagataaaaacgcagcagcgcagatcgttgcgctcgttaaggaccaaaactagtactgctgctactactacgtatgagaacaaggagttctctgatgatgatacacacatcaagacttgtttgttgctctacttccacgtggtacagtagcagtatactcctagtgctagtatataggagtatgttactgtgcaaataaatacacccggcgtacgtggtgttcctcgtatccctctacttgcttgcaaaaaaaaaaaaaaaaaaaagcggcc

SEQ ID NO: 108696 - DNA, 691 bp, Zea mays
  unsure (1)..(691): unsure at all n locations
  Clone ID: MRT4577_30624C.1
tgcatccatcatcctcagctcctaccatnagtacacggatacacccttcgtcttcggacgctgccggccgtgcccatcgtcgtcgtcgggctgctgctgctgaacgggaacgccggccgccggcggtgtacacggtgtggaagaggtccagcatgggcttccagggcaccgacggcttctgcgtctacgacgacgccggcaggctcgcgttccgcgtcgacaactactcccgccgccgcaagctctgcgccggcgacctgctgctcatggacggccaaggcacgcctcttctctccctcaggccacaggtaataatacgtaaatactacgctcatttactacgttccattactgagacgacgagatcacgctactaccccaacttttcactttctcagaaaatgaatgcctgtcactttaagccccctaaaatgacagctatattatttgtcgaacgaatgaactagttttaatttcctgagtcgtgcgtgagaagatttaacttgcaccaagtgctgaaataaagagatagagagagaagagattgactaaaaaaacaaattaactcaaccttttgcagctagctaacgagtgtgaaaaaaaatggtgtgtactgtgtactgtgtaataacagcttctcagcctgcacgaccgttggaactgctacacagcaacggaaaacgccgtggta

SEQ ID NO: 108697 - DNA, 409 bp, Zea mays
  Clone ID: MRT4577_30625C.1
gagcggaggggcccgacgccgcgtcctctgctcctcgccacttgactgtctcgctttctacagcaacattattgccaagaacatttttgatgatgtactgcattccatagcagcattattgtccgtagcagatgatggcaattcgctgctagcactagctgaagcttccttaacttgagcgggaatatcaatcttaactgaaggtctgattgctcgaattggagctgccagtgattcctttgggccttgggtttgcgcatccttcatctaaaatggtatggcaactgctagtgatccacaagaggctagcgctatgtatcatcatttactaggacagaaatcacacgagaagttgagctcttccttgggtgatattgtacatcctttacctgaaaagggatcacagata

SEQ ID NO: 108698 - DNA, 363 bp, Zea mays
  unsure (1)..(363): unsure at all n locations
  Clone ID: MRT4577_30626C.1
cccactccttcgctttgtcatcacaagattggccgaaggtttcatcatacgaggggcccccactttgtctgtcattttgnttgccggcaacaaagaaccattacctgtcataccaccctgcctggcctaccctaaccgaaccaacacctgtctcaacaaaagccattaagaagccagtaaggcattaccctctttctgcattgaaatacacataccagaatgattagaaggattcacaacttaagcccaccaaaggatattcctttcaagccaactcttaaagtggggggcctatgaaataccaaaagaattgaaaatttcccggcagaagtccaatgtacgtggtcctgtccctttggaatt

SEQ ID NO: 108699 - DNA, 151 bp, Zea mays
  Clone ID: MRT4577_30627C.1
tcccacgcgtccgtccatccttgtccatactccttacctgacaatgtcttcctcccatatgggccgttccatttttaatcttggaatcactattacattcaatactcatttcttttcacattcaatacataatattacgttataaactatt

SEQ ID NO: 108700 - DNA, 242 bp, Zea mays
  Clone ID: MRT4577_30628C.1
cgcgctctcttgcatggggaatatgccatgggaggcgagggtctttgaacctgcaactcggtccgctaggccacatccgacggggcgctggattatctctcacacgtctacagcgtgactggtagcgacctcatctgacaggaccctgtgcgtctaaaagctggctgctcaagctagctaaagatcgactaacacggcgccgatccacacgtccacaatgacaagccacatttacaggtact

SEQ ID NO: 108701 - DNA, 142 bp, Zea mays
  Clone ID: MRT4577_30629C.1
ggggttcgtgatccgtggcttggacaacgtgcaattttttcctacaaaccaacacatttgaaacggtccctttgcaccggttggactcacttggcgtgttcatggtaagcgaccgacagcctaccttaccccatcatactgg

SEQ ID NO: 108702 - DNA, 390 bp, Zea mays
  unsure (1)..(390): unsure at all n locations
  Clone ID: MRT4577_3062C.1
atataatatgtaaatttttataattctatcncttntacancttctgggctcattgaggattttctaaggttactgatcatctantcccatgtccacctccgtctttctcccttctccttcttctaccatacacccttccgtcttattctcccttacttcttacctctcattctctctactgtctgtcttctcttccttaatcctctccttctacatccactccgcttttgtgctctccatcttataccattacaaatcattttccttccatcttcatctctcatactcttcttccgtcctcctttacctatcctttactctccttcttctcacgccctaccctaccatcttcttctacactttcttcattcactctcacttctttccttt

SEQ ID NO: 108703 - DNA, 290 bp, Zea mays
  unsure (1)..(290): unsure at all n locations
  Clone ID: MRT4577_30630C.1
gtttttgttttttttttttttttaatgggggtggttctaatcgtgttgggtggtgtgggagcttatatgtgggggaatgatgcttgtgtggcttagtggtgaaaaaaagtctgtggtttggaagcttacctttcaaaggggggataganggggcaagatgagtntnctcccgaagagtaaaaaggtgttgctctaatgggcttcactttgaaagattgtacagagagtaggggtggtgcttctggcgatggacgtagggtgtttgacttgtgctttttgtttttgtttta

SEQ ID NO: 108704 - DNA, 397 bp, Zea mays
  Clone ID: MRT4577_30631C.1
cgcgaacgagctgaactctaatacacactgttttattttttaataacatgccactccatttcgggaggctcataaatataatacattgctcaattttattgcatattcttagtgatcctttttgtgcaacgacatttaccatacagatcgttatctgattatacgtttaccaaatttcttctaactcaaccatgttgcatctcttctctttaatcgaaatccacacctcattaaaatgttttacttccatatatacctttttaatcatgaattgaaataatacccatcctttacaagcaccaatgtattttttctttatttaattatacaatacaatataacttttctaatttttatataataataataaaatattttttcttttccatattttata

SEQ ID NO: 108705 - DNA, 144 bp, Zea mays
  unsure (1)..(144): unsure at all n locations
  Clone ID: MRT4577_30633C.1
gctgcgnattttagggctgcnngctcccagggagggaaccaggcgangcannaggcngcnggccaaggangganggcanggccanaccgaaagganncgngggagcagnccnggagccagacggcgacgcggagaccangaggg

SEQ ID NO: 108706 - DNA, 354 bp, Zea mays
  Clone ID: MRT4577_30634C.1
tgccttcaagcttgttgttcatttttagcatgtttggcagctcaatgcccttcatcaactccataccatcggctgcgaaccaagaatggtccatggcgtcaccaccggcacaggaggagtcggtcatggaagagctgaataatgtcatgaagtgcgcatatgaagagggcactgagttcggaaaggaaatcggctgggtgtacaacattgctacggaggacgtggtgaccggcttccgagtacaccggacagggtgggcgatctatgtactgccgcatggagccagatgccttccgtggcactgcaccaatcaacctcaccgagcgcctttgccagatcctgcgctggtcgggc

SEQ ID NO: 108707 - DNA, 325 bp, Zea mays
  Clone ID: MRT4577_30635C.1
acctatgcgtccggaaaggagaagcccgccgccgccccggcccccagcaaccagcagatcgggacctgagaacagcaccatccatccatgtttggaagaatgaggccgctccttgccaaacattggtgaatgggatgccaacgttccggatacccccaaccgggaacctggaatattcaacggagcccttacagagaataatggtgggaatggtcaaaaaactaaatgggctttctttgaccccaatactgaaagggtccagacgaatgctgcaggaccgatcaccaacaaaaaaaccctttgtgtgacagcgagtcctacgcaa

SEQ ID NO: 108708 - DNA, 1270 bp, Zea mays
  Clone ID: MRT4577_30636C.1
ccacgcgtccggcatgcgctatgtatagaggatgtacggcggtgctctatgcgctgtgctgatttctgtgcacgtgctgacgagcggtaaaaaataatatagaatgtcaaatctgagtagcactgttgatatagaggatgaaatttaggggatattgctggagatgaagaagatatagagtacagaatcttttagagagtgctgtaaaggacagagaatattcttttaggggatgaaatttaggggacgttgctggagacagcctaaccacccatgaaactcacacacacagagagaattcctgcacagcacagcagtagtacaaaatatatattcagcattcgtgcatccaaagtcaaagtgtgtgtgtgtggctaggtgaaatttagcagtcactttagctaggctagggcagcactgcatccccctctttcgtgcgtgaggatctgggacagtgggcgaggtgacaaaacgcgatgccttttgcacggcctggcgccggtcgagtcgtgtcaaaagaagaaaaaaaatcgatgccgtggcccactaactaacggtgtttggtgtgtggccattacatttttgcttattatacttgacttgacccactacggttgattttttttgggtttgtttgcaggttctggctcccctccccatcggcttcgccgtgttcatggtgcacctggccaccatccccgtcaccggcaccggcatcaacccggccaggagcctgggcgccgccgtcatctacaacaaggacaagccctgggacgaccactggatcttctgggtgggccccctcgtgggcgctgccatcgcggccttctaccaccagtacatcctccgggctggcgccatcaaggccctcggctccttcaggagcaacgcgtgatgagcggggcttggctgtggagcaatggcgggcgacctacgggcggggggccgtgagcgaggagaatgccatcattcatcgatcgacttgggtgccggtggttggttcgggtcgccttattttgtttcagcagctgctgcgttgcgcgcgtgcgtgagatttggtttggtttcgttcccctgcaatgtaatcatgtcgtgactctctcaagggattattccgctctgctcttatggcctctgttttctattttaatgattgttattaccatgtagcagtaaccatcgtcatcagtgagaatcttgtagcttctgtttaaatcaaaaaaaaaaaaaaaaaaaaaaaaaaaaaaaaaaaaaaaaaaaaaaaaaaaaa

SEQ ID NO: 108709 - DNA, 359 bp, Zea mays
  Clone ID: MRT4577_30637C.1
ttttaaattccaccaacccttccgctacattgttgttcaaccccaaggcgttcggtgacaccatcaacctcttcgttgaacgctacattgaccaagggatcaccctagttgctggcgtggaaactttagacttcatttttggtcctactatcactctaaccatcggggctaaatttgtacctttgacgaaaccgaaaaaatttccaccctatatgatctcccaagaatattcttttgaataccgaactgacaagatatagatgcatgtttgaattgtacacgccaaccatctggctcttttattccacaatcttatttccaccggagtaacactcttttcatatgttaaacttattgaa

SEQ ID NO: 108710 - DNA, 266 bp, Zea mays
  Clone ID: MRT4577_30638C.1
catcgttgaaaatgtggagcgcataggcaccattccattcatctctctttctagtttctacagagacaatgtcaatacgctccggtgctgagacgaggtaccggacaaatccggcgtttgccgacacacaattggtcattttatatcgtacgctgctgaagaagctgaacctggcgtacaagcgtctctgactaagcgacaaagctaaggctctctgcttggcacaacagacaaacgacgcaactccagagtctgagcttcgcttt

SEQ ID NO: 108711 - DNA, 430 bp, Zea mays
  Clone ID: MRT4577_30639C.1
gtccagaattcccgggccgacccacgcgtccagccaattcgcctatcacaaattaaaccatatcacacaaagcagacgtaaatgtccgccgaccccaacaatgcgcgcaacaccgacatctggatagcaggcgccttcgcggccttcaggtcgacttgctggtatacccgctagacacagtcaaaacgcgcatgcaaagccccgactacaagaaactatacacaaatggcgccgacgcaaaagtcagccggtcgatgtttcgcggggtataccaaggaattggaagtgtaattctggcgacattgccttcttcaggagcattcttcacgacgtacgaaggagtgaaatctatcctgaaagacacaatcctaaatctggcaatggacacttgcttcgtcaacagtcatccactcagttgcctctgcaaccg

SEQ ID NO: 108712 - DNA, 159 bp, Zea mays
  unsure (1)..(159): unsure at all n locations
  Clone ID: MRT4577_3063C.1
aactcaaacattaaangaaacttaccttncagcccaattaggntctgctatanatcanggatacttcatacaaggccaagtgtagcgaagatctgattagtttaaancaacacttaaaattcaagggtccgatacangagaaatagtaatatattcaca

SEQ ID NO: 108713 - DNA, 382 bp, Zea mays
  Clone ID: MRT4577_30640C.1
atccaagaaacacatacggtgctatatgatgacggtgatgttgaagtgcttatattggctaaagagaagtggatattgattgaaagtaatgattcatcagtgaagaagcaaaagaaggatcttgggactccaaaggcatggaaatgaaagagaagggagggaaggactccaaagacgtgaaaataaaagagaaggctgggaaggagtccaaagacgtggaaatgaaagagaagatagggaaggagtccaaagatgtaaaaatcaaagaaaaggcagggaaagaatccaaagatgcggaagtgaaagagaagacagggaaggactccaaagacgtggaaacgaaagacaaggcagagaaagactccgaggacgtggaaatgga

SEQ ID NO: 108714 - DNA, 528 bp, Zea mays
  Clone ID: MRT4577_30641C.1
ggcggcgagaactacaagactgccccttgtttattgccgggccaccttttaagggcccggcacaagtagggcggggcccccttctctgcactcgggggggaacaccgatgccctcctaatgaacggggggggggaaaaaggtgatacctggtctctgtctacccgggcgggactgaaaatcgctccggcaaccatgatggtcttacacaacttgccctccaagtacccgcgcctcttgttgaaggaggcggtgcccacccccagggtgggggtgcacattattaacatagccgtccagatctgctccgcgttctgctggatcctctttttctctgggagactgggtgttttatacaccgcggccgacgctgttttttgactttgcaccctatctgatggccaaagcaccttctgcccgttcgaatgtttgttttggcgtgcgcgttcgtgtacttggcggcggccgagccaaacagttttgtgaagtgggcggatcttatcttatggcgggaatgcgtggtgttcttt

SEQ ID NO: 108715 - DNA, 2102 bp, Zea mays
  Clone ID: MRT4577_30642C.1
taccctcgggcctgccggtccagcactagacccctgttctaaacaaaataagggtgctaagaaatccaatattaatattttgagcagcgttccaaagaagtctgctgatgcagacagtactaagagaactgttgaaccgagaagtctaaatgggtcactcaaaaggcaaaagtcaaaaccaatttctggtttactaaagtgctcaacacaagactcaagcagtacagacttggtaggacaccgaataaaagtttggtggcctttggataagagattttatgaaggtgccgtgcaatcatacgattcatccaagaaaaaacatagggtgctatacggtgacggagatgttgaagtgcttaacttggctaaagagaagtggatactgattgaaagtagtgactcatcagtgaagaagcaaaagaaggatcttgggacaaaccaaggaagagcatgggagggaactagcagcaacaagtctccgcctagccaaccaaagtcaaaaaagaggtccttgcctccaaagaagaaagggcaacccaatgataagcgaagaaagactgcagaaagaaacaattctgtagaagaggagggtattggagctggtgacaatgattcagattcatccagtcctcttgcgcactcagatgttgacaaagatgtaaactctgttggccacatggaggaagtaatagttagcttagctgagaaagagaagaccaggaaggactccaaaggcatggaaatgaaagagaagggagggaaggactccaaagacgtgaaaataaaagagaaggctgggaaggagtccaaagacgtggaaatgaaagagaagatagggaaggagtccaaagatgtaaaaatcaaagaaaaggcagggaaagaatccaaagatgcggaagtgaaagagaagacagggaaggactccaaagacgtggaaacgaaagacaaggcagagaaagactccaaggacgtggaaatggaagaggaggcagggaagcactccaaagacgtgaatatgaaagagaaggcagggaaggagtccaaagatgtggaaatgaaagagaagatagggaaggaatccaaatatgcaaaaatgaaagagaaggcagggaaagaatccaaagatctggaagtgaaagagaaggcagggaaggactccaaagacgtggaattgaaacatgaggcagggaaggactccaaagacgtgaaaatgaaagagaaggcagggaaggagtccaaagactcggaaatgaaagagaagatagggaaggagtccaaagatgtaaaaatgaaagataagtcagtgaaagaatccaaagatgtggaaatgaaagagaagcccgggaaggactcaaaagatgtaaaaacgaaagagaaggcagggaaagagtccaaagacctggaagtgaaaggggaggcagggaaagaatccaaacatggcgaagcgaagaagccagggaaggactcaaaagatgtaaaaacgaaagagaatgcggcaggcaaagagtcgaaagacgcggaagtgaaagaaaaggcagtcaaggacccaaaagatgtggaaatggaagggatggcaggaaaggagcccaaagatgtggaaaagctggatggccatactttgagcaacgaggaatcagacaacgatactcttagcgtgtggaaaaaacgtacagcaaaagcaacatagtcttgctttctcagctgaccattcatagtaggatttgcagatttcacaggcaggcaaacgttcggagatgtggatatcgcattgattgaccctttgcaatttgacagttgtactgtagaaaatgtttgtttggatagcaacacgttagtatacaacagtggaataggatttgtttgtaatgttattagatgcgggcacctgttgcccattaagctatggcatggtatccctggtttcttgtatatcttggagagcgtcagctcttatgcaggacatagtgctatgccgtcaaactcttgtagaaatgttgtaggcaataaaccagtgacacttgtcgaacaacctgtgggcatccatttttcgtttgccatattactttggatctagaatctgacgctggaggtttagtatttgt

SEQ ID NO: 108716 - DNA, 354 bp, Zea mays
  unsure (1)..(354): unsure at all n locations
  Clone ID: MRT4577_30643C.1
caaggaactattctaatattcgtggactccttacataggggacatatcaacaattaatcaaacatctttatatcttatttatcaaatgcaattgacaattactaaattcatcaagtcttagtttaaaacactaaattaatcctttacatccatacttcccccaaatattacctaaattaatacacctttcacattaataaaccctactaaccttacttatttttaaaactaccacaataccccctctctanatactacaattattactattaataatactagtaaaaccaattcttaatttaactaacaaaaatcaatatatccattcacaaatctctatctccaacccattat

SEQ ID NO: 108717 - DNA, 420 bp, Zea mays
  Clone ID: MRT4577_30644C.1
gttagattatctttaggaatcgactcccaggaagactggcgagtcggactgcctgggagtcagacaaacacaggggggggggcccccccacggaggggggtggaaaaccaaggggaccctccccgcaggggaacggattgggcctggggggttaaacccaaccaagaaggtggctgtctaaccagggggggcccccttcaggggaagccggggcgggctcaaacagggcccccccaaaaaaggattgggggccggtccaggggcatgcccccggaaaaaaagccgggaggaaccgtcccccaacctgccaaaacttccagacggggccccccccaaaaactttccgcggaaaatgactgaagaatgggcggccccccggtcccctgccctgtccggcgacaaccccttggggctttagtg

SEQ ID NO: 108718 - DNA, 449 bp, Zea mays
  Clone ID: MRT4577_30645C.1
tgataggtctgcgcataccgggaccgcatcggggtggtttttactggcgcgtccccgtgtacagcttacaaccgacggcgttggatgcctacgcaggacatccatagaccctgatctccttgaggagattgccctagtactcagaggtatcctggggcagcaatatccactggagacgcaaccgccacaggcggtacttgccctccgtcaccggcattacgacagataggaggaagctctcggcgaggtaacagttcgggggaaagacatggtgttgatcgagctggagccacaggaggcgacgcgcccctttttgccagtggccgaagagcaagcggtagccggggacgcggcgcgtccatcgtattagctgcgcccgatgaggaagaggcagaccatggagggaaggcgttcagggcgcctgaagaagaagaggatgcctttgagga

SEQ ID NO: 108719 - DNA, 637 bp, Zea mays
  Clone ID: MRT4577_30646C.1
cattgggtacctcgaggccggccgggatatgtttatagccaccacatcccggacaggcgcagcaagtgtccagatctgcaccaaccacgaaccaagcagccgtgcaacctcatatcatcccctgccactcactctctcgtccgcctcgccatgcaatcaaataggaggaccgagcccaccgtgacggtcgttgtcctgcctacgctgctgatgacgatgatgatgtcctcccatgtgcacatcgacttcgcgccggaccgggcggagtgctctcagcatctggaggggttggcgacgtgtctgacgtacgtgcatgatcatgcgactccgactgcgccgacgcccgactgatgctcgcgcctgaaggcggtgctgcacagcactcgcaagtgcctgtgcgtgctgtctaaggaccgtcaccaccccaactctacgtctcaagctctacttcgactaggtgctcggactccccgtcgtctgccacgcgcccgccaacatctccgactgccccattgtgatgtacctgccgatcggctcacaggacgacactggtgctctagctaactcaaagctctatactgagatggaactcacaggaatctgcacctattggtgaaatcaccaatccgagggttag

SEQ ID NO: 108720 - DNA, 436 bp, Zea mays
  Clone ID: MRT4577_30647C.1
tttttcttgagttcatgctgtcctcgcggagcgcgctcatgcggttgagctcggggagcacgacggtggcgaggtcggggcggtccttgcgcctgagctcgcagacacggagggagaccttggtgaacagaagcgcctcgcacagtgtccagtcgcaggcatgctggtcgaggatgcaggacaaggtgccgcgcatcacggatcaccggagccacggtgaggtggcccagtcggctacgcgaccggaccccagtgtgcggggtccttcgcagcgggggcacgtccgacttcacccccagcctgaacgcatgctggtactgcgactcgatgtaccagaaggtgcccgccgccgacgtcatgtggcactgcgtcacgttaaaggagccgacgccgagccaggcgcgccacccgacgcgctgatcttgctacgtagttg

SEQ ID NO: 108721 - DNA, 283 bp, Zea mays
  Clone ID: MRT4577_30648C.1
cgtcgacacaagcgggcgaggggacccggggcggaagatgagagagaagaccgtctctctcttctcggcgtccccgatccccaacctctcgtctgttgcctgctgccctgctgcctgcaaaaaggagtttgtcatggcgttaagcgcatcttcaagagctgaaggacttccagaagaaccccccacatcatgcatgcaagtcctgctgtgaggacagtttcatggcagcaacattatgggacactgacattcctatgctgtggtgtttttagtgacatcattt

SEQ ID NO: 108722 - DNA, 333 bp, Zea mays
  Clone ID: MRT4577_30649C.1
gggagccacacattctctccgacctcaggaggcgtggaatgaacctaatccccttcccccgcctccactgggtgggggttggcttggggggggtgacctcctggggctcccaacagaaccgagcactcaccggcccggagctcactcatgagatgggggacgccaagaacatgatgtgcgccggtgacccttgccacgggcggtacctcaccggctcgggcatgttccgggggaagatgagcaccaaggaggtgcgctagcagatgatcaacgtgcacaacaagaactcgtcctacttctgggagtggatccccaacaacgggaaggccagcg

SEQ ID NO: 108723 - DNA, 610 bp, Zea mays
  Clone ID: MRT4577_3064C.1
tgggaccctcgaggccggccgggccggggattgcacacacacacagtagctattgtggtcttttcttatccgtgtcgcagctgatggtattctaagatgcgaagctgtttctgatcgcgcgatgtcgaatgattacccaaccgagagcggcgagcactctgaggtcggctagaaggacatgatcaagctccgctgcctcatcgcctagaagattgctcgcccctcatgtatccgcctcgcgtgagactccacaagaacgttctaggtggcggctaggaccggggggcccttccttactatgaagagcacagggaaactggatcacggtgccgacgagactttgaatatcgcggtgtggttgttcctatgcatcttggaggagatctcctccctctactatgcctatttctagcatcgtgccttacatcgaggcgacgaggtctgctacgtggctgtcatccccttccaccccggaagagaggacaagcctcattcgtgatcagatgggcgccttcctgatgccacctgggtttctgacgacctgatgcaagtctttgagaagcaaatgcgtgtgatgctgatgcatgtacatgttgacctctctggtggt

SEQ ID NO: 108724 - DNA, 191 bp, Zea mays
  Clone ID: MRT4577_30650C.1
acagagagtagtcatcgcaggctatagaagacgatggtcacatgacgactgtgatcagagagcggtggtggcggcggcgagtgcggtggcaaggtacacatggtccttccgcaggggatgcatcagcgtgcgcgatgtaccctgacgcgtggaccgtcgccaccaccagggtcaagaccacggtcctcgcc

SEQ ID NO: 108725 - DNA, 176 bp, Zea mays
  Clone ID: MRT4577_30651C.1
ctttattttttttttcttcgacgaacaagaagattctaccatctcatagagagaagccttgtcacccagcataggcgcatgagcacagcaccaccgccaccacatgccatgcttgtcttaaaaatacatcacggcacggagagtctaatgactaaatcgcagaagaagaagaaact

SEQ ID NO: 108726 - DNA, 404 bp, Zea mays
  Clone ID: MRT4577_30652C.1
ctcagggatgcaccacagggcgctttaaattgttctaagacccaaagaaaaaggccccgaaacggcaagacccctgccagagtccggccacggcacgggggggggggcgggcctgaacaacaccccttacccgcaacaccaaaaggcccgcccggcaacccaagaaggccccgaaaaaagacacaggcaaacccccataagactccaaaccagaaaccgtaacaattaaaagtcagaaatggcagggggagaacaccggcttcggaggaaaagggcatccagaacgtagcaggaaaacattgcccgcgaaacaaggcgctccgccacacccaacggagccatgaagttgccccaacggggacaagaagccccaaaggaaccaacaacctgccccttaggggtca

SEQ ID NO: 108727 - DNA, 257 bp, Zea mays
  Clone ID: MRT4577_30653C.1
aaatgtctacgggctcgtgtacaaggtataaaacgaggcgtgcatgctgacaggcttgtgccacccatagctaggacggttataccgctggacgttcagcctgagcatgggagatgattcgggtggacgaggacatggtccaaagcatcgggtgcccagcacttaacaggggagtgaacctgccagcgcgcactgaggtgttcgctcccactgagggcaagaaggcaggcctgggcagggactacctacctgacccc

SEQ ID NO: 108728 - DNA, 354 bp, Zea mays
  Clone ID: MRT4577_30654C.1
ttccttaattcccttttcgacccactcgtcctcccacacttcctcttacacttagtcttactcttttttcaacccgcaacttacacccagatgaattttttcttacccgatgcagcaatccttcacctctatcctaacataccattcttctcttaacatttattaaaactacttccataccaacatattacccttactttttatttaacttcattcttaaaaaataccctccaataaattattttcaaaaacccttccattaacaacttcccctttgcttaaccccacacacatctattccaaacccctctaatccatttcccatacttctacttctattcaattcacaatcta

SEQ ID NO: 108729 - DNA, 527 bp, Zea mays
  unsure (1)..(527): unsure at all n locations
  Clone ID: MRT4577_30655C.1
cctcgaggtcctgtcncgggaaaaaaaagaaaaaaaaaaaaaaaaaaaaaaaaaaaaaaaaaaaaaaaaaaaaaaaaaaaaaaaaaaaaaaaaaaaaaaaaaaaaaaaaaaaaaaaaaaaaaaaccggcccttgcggggggccgtttccagaccggggccttgaacttgaagccttcatccgagagagtggagctgaaaagggaaaaccttctgagtctaattaggacaacgctggggggggggcccccccttgttagttaggaggctcgaggcccaaaaaaaaaaagcttaacgatgaggcgcgcggagccggtcgggaagcaggcggacccggagcgggggataaccggttacaagggcgtgcgggggccccgggggggcaagggggtgtcgaaaatccgggtgcccggttcgggggagcgcctggggctcggttcctaccccacgcccgaggccgccgccgtcgcccacaaaacggccgtttacttcttccggggnggngggggcggcccgggcaacttccggg

SEQ ID NO: 108730 - DNA, 381 bp, Zea mays
  Clone ID: MRT4577_30656C.1
cgggctatcgaaaacctatcccctgctccttctcaatcttcgccgatcccttcccagtggtgggcggcgggggagtgagaagaatagatggccgtctatggcgatggcccctgtatcggcatcgatcacgggacgacgcactcttgcgtaggggtgtgggaacgcgaccgagtcgagatcagttgcgcacgactcagggtgacctcaccacacccgcgtgcggggacttaaccgactccgatcgcctcatgcgagatccggtcaagaaccatggtggccatgaaccccatcaacactcgttttcatgcccatgcggctatcaacaggaggatcacagatgcctccgtgcagagctgatatcacccggctgggccgggaggg

SEQ ID NO: 108731 - DNA, 1435 bp, Zea mays
  Clone ID: MRT4577_30657C.1
tgtaccgtcggtcgcctggacgggtgcggcggccacgtcttcgtcttcatcgtgacccacgacggagaggagagagagagagaggcctggcgtcagggaggaagacgtctcacctcgcctcgtctcgtcgtcttctgcggcgtccgttcttcaagccctgccccgtcgcccaccagtagcccgcccgccagcccccccaaggaggacgcagcggtttgccatgagaagacatctttggttgtgccaaacacgaacagcagcctaggaattccagcatgggttcagggaatctggtaacgaagaaggtggtaaggcggcccagctccatcgaccaggacataaagttcgatcaaagctgggtggaggatgtcgcgtgcccaatctgtctggattccccccacaatgcagtgttgctcaggtgcgcctcgtatgagaagggctgtaggcctttcatatgcgacactgaccagactcgctccaactgtctggagaggttcagaggcgctcatggactgccactgccagtgccagccaacgccagagcctcctcccgtaccgtggctcctctcaacagcatccataccattaccatctcttcgtcgaatgcaaacaacaaccgcccggcttgcccgctgtgtagaggcgatgtgatggggtggttcgtcatcggcgaggctcgctcgcaccttaaccagaagagaagatgctgcgaagagagccgctgctcgtacgtcggcagcttccacgagctccagaggcacacccagcaaaagcatccggactcgcgcccttccgcgatcgaccctgctcgccgggccgattgggagaacctgcagcggtcttccgacgtggtagatgtcctgagcacaatacacgcgcaggttccaaacggtgtggttcttggagactatgtcatcgagtacggggacggtgacgaagctggagacgacgactacgaggtttaccacggggttagagcaagctggtggacgtcctgtatcttctgcaaagcgttctgtaggtcttcccccccaggaggagtccggagaaggacgaggacgagggaaaggagaagcagtggtggaagtggaacaaggagcagcagcaacaggtctaggtctagtcaagaaaggttcactcttgatgaagttgacgatggatatgtagttgcaggggccatggccagggttgctgtgtcagggacaatggctgctcgttacaggtctgtttggtaactgtgctgttgtttcctgctttctgttattcatcagagatcatatggttaaatgccatgcacacatacagaatcgaagatatcatgagaaaatactttgttttattttatgttctccatctgtacgcttttttgtttcgtcgctgtaaaagtgtgtccaattttagtaccctggctctgatatatatgaacttttcatcc

SEQ ID NO: 108732 - DNA, 465 bp, Zea mays
  Clone ID: MRT4577_30658C.1
gctcgtcaaaggccacgagattacaaggaactattcaaccttcgccatgcacaactacgcaatcatattgagagaactattggtattctgaaaatgagatttcctattttaagaactgcgtctcactacccagttcaaaagcaaattgacatatctgttgcctgttgtgttttacataatttcatacgtctacataatggtgacatgtcatggccaaacaatgatatcatggagattgatccacgccaaatcgttgatgtgccaagtggagataacaattatcatagtgacatacaagcatttaattactctagagatgctggaaatcaaatgcgagatcatatagcagaacagatgtgggcacaatattcagcgcgaagagcttaacataatgtaaactacgcaatctttgtatgataatatatttcaatatcgatttatcttcttaaaaaaaaaaaaaaaaaa

SEQ ID NO: 108733 - DNA, 294 bp, Zea mays
  Clone ID: MRT4577_30659C.1
gacgtggtctcatctacccgacctgtcgccggcaacattgatcactgttgcaggttgcagtattactaaaaaaaaaaaaaaaaaaaaaaaaaaaaaaaaaaaaaaaaaaaaaaaaaaaaaaaaaaaaaaaaaataaaaaaaaaataaaaaaaaaaaaaaaataaaaaaaaaaggggggggccgatttaaaaaatcaaagtttacttacgcgtgcataaaaactaaaaacttttttataagcgaacctaaattaaattaactgggcggggttaaaaaaagacgaaactggaaaaa

SEQ ID NO: 108734 - DNA, 2138 bp, Zea mays
  Clone ID: MRT4577_3065C.1
cttccgctttctcccttactcgcgctcagcacgcaggcgacggcgtcggcgctcaggtcgggctctgggcgacggcgtcatcggcttctcctcccgcctctctccagtcgcctcgcgccctcgcctccggtcctccgcacaccggccggtgaccctgctcacactgatgtggaggcctcaaaagagaaccgtggagcatgcagtttgaacaatgatcgtgctgatgctctagaagaagaggccaatgtttccacagctaggataggtcatgttgagagtgctgaccctggtggctctgtgggtgtagaaaaggaaattttcatggctgttaatgaggagtctgagggggagcaagctggggcaacactggaggatctgtttttctttaatggtgaagaggatgatgacagtgattgggaacctgctagtcgccttgttgtgaatagatggttttgcttgaactgcacaatgccaaatgtggacaagattacatattgcatgaattgccgtgagcttccaggatctgttgtagatggatatgatgtcttcaaaaagcaaattgcacaaacagctttgttatctgctgacacagggttgctgccagtgtctacggcgattggttttgatgaaagaatgctgctccacagtgagctagaagttaaaccaaatccacatccagaaagaccggatcgccttcgcgccattgctgcaagtcttgctgctgcagggatctttccctcaaaatgtgctttggtacctcctcgagaaatcacgaaggaggaacttcttatggttcatagtccagaccacattgaaagtgtcgagcagacaaagaacatgctttacagttacttcacttcggatacttacgcaaatggacattcagcatgtgctgccaaacttgcagctggattatgtgctgatcttgctagtttgatagtatctgggcgtgttcgcaatggctttgcgctggtaagacctcctgggcatcatgcaggggtgaagcaagcaatggggttttgtcttcacaacaatgcagcagtagctgcgttagctgcaaaaagagcaggtgccaagaaagtcctcatagttgactgggatgtgcaccatggaaatggcacacaagagatattcgacggggacaaaacagtcttgtacatatcattacatcgtcatgaggatggaaacttttaccctggaactggagctgctcatgaggtgggagttcttgatggtcaaggattctcagttaatataccttggagccgtggtggtgttggagatgatgactacatctttgcttttcagactgtggtgcttccaatagcttcagagtttgccgcagacatcactataatatctgcaggattcgatgcagctagaggtgaccctctgggttgttgtgacgtcactccaactggatactcttggatgacatccctgctagctggttcctcaaatggaagattgttggtgatacttgagggaggatacaatctccggtcgatatcctcatcagctactgaagttgttaaggtcctacttggggagggtcccaatcgtgcttcatttgtagtttcaccatcaaaagaggccttgagtactgtttctcaagtcctgaagattcaacaacagttttggccagttttaggtccaacatacgcatcactacaggcgcagcaggggtcggtttcttccaatcatagtaatgagctgaagaaaaggaagcgtccaggaggaggaccagggcccttctggtggaagatgggaagcaaaaggcttctatacgaagcgcttattgagcctcgcagccgtccgaggaaactcaaggggtcaactggttcagcagcgccttagacttagatgggcagtttgctggccgttgatcttctagacatgaacagggtagctcgctgaccgcgtttcctcaagcagagtaggctgcgtttacctagaaaacctagttttggctggttacttgcatgatggtcgaccgtttcagatggagtttgacagcaaacccgttgtgttaaccatgcgtggcgtatcagccgatgtttcatgcatgctactgtctttttctttggttggtttcgtaccatagatagacgtgtgtagcgaccatcgatgaagggcga

SEQ ID NO: 108735 - DNA, 155 bp, Zea mays
  Clone ID: MRT4577_30660C.1
aattgaacagtcattgtgaagtatcactgacttagctgatcaagttctactaccatgtcttgtgtgcacgtagatatcacaattcatatatagcgcaatactgcacgcatcactgcaactgtgctaaatcatactgacggtctcgccgtgcctac

SEQ ID NO: 108736 - DNA, 748 bp, Zea mays
  Clone ID: MRT4577_30661C.1
ccggccgggaatttctcttctatgatcaggggtaggagaaggaggaggaggagtagaagcagctccacacctgtacgtagctgccgcgcgccggtgagcgaggtcgttcttgagagctgtatatatatatatatagctccgcgacgacgccgatgatggccatcaagtcgctgagcatggtggaggccagcctgcctccggggttcaggttccacccgcgcgacgacgagctcgtgctggactacctggccaagaagctcggcggcggcggaggccctgtggtggtgagcatctacggctgccccaccatggtcgacgtcgatctcaacaagtgcgagccctgggaccttcccgacatcgcgtgcattggtggaaaagagtggtatttctacagccttagagatagaaagtatgccactggccagcgtacaaacagagcaactgattcgggatactggaaggccacagggaaagaccgtccaataagccggaaagggttacttgttggtatgcgcaaaacccttgtgttttatcaaggtagagccccaaagggaaagaagaccgagtgggttatgcatgagtttcgcatggaagggcgagatgatcccatgaaattacctttcaaggtaataattaattacgacgacttgatttcatcattgtgcatccttcttttttcagttgtttgtgttgattcattttattcacagttttccaataatatatgatagatacaatcataaatcat

SEQ ID NO: 108737 - DNA, 312 bp, Zea mays
  Clone ID: MRT4577_30662C.1
ccaaaaatatatggggaaaaaccccaaccaatatatggattatttcaaggaaccccaccccggaaggggggccccattaccgagcccatctaataggaaaccaaaaagagggcccccccaacgaggggtggctgccccaacaagacagggttaataaaaaaaaacgggttgtagggcaacaattgttgctgctgtaggaaggcaccccccaaggggttacccccggctaggggataaaaaaactgtggcccctgtgggaggcccccaccaaagttcaacaaagtcaggcggccgctcgcaatcaaaaactac

SEQ ID NO: 108738 - DNA, 162 bp, Zea mays
  Clone ID: MRT4577_30663C.1
aagactctaaatcgagtcgtattatacaaggatattgcttggtcttgattgatgatgtcgactgaaatcagacctgctcactcaggaccagccaggacccgtctaatccagtcagagagacgtacgcgatgatcgcctcggaatttctggggcggctcctgc

SEQ ID NO: 108739 - DNA, 385 bp, Zea mays
  Clone ID: MRT4577_30664C.1
catttggattttcctcttccaccgctacaagcaccagtgttgttgttgctgttggtaggagcgaccccgctagcgtgacatggacaaagcatcctttggtgccaggttcgattaggtttctacgacttatctggtctcaaggttcttcatggccttgactctcaaagatcagagtattcttgtcaatggggatatcaatgaaggcttgcttcgccttgtcacaagctttatcgtttaaggaaagaatatgaatacacatttgaaagcatgagaccagtatcttgctaggttagggacccaggggctacacattttattactgaaaacacatgagcagtttatgaggttgtcaagtttttatttcaatgcaaattcagctggacaa

SEQ ID NO: 108740 - DNA, 175 bp, Zea mays
  Clone ID: MRT4577_30665C.1
tgtgctgctggagctttacccgaagctgcttccttaatcttaccgatcgctctgagaacataaaagattttttctccctttctttgctaatctcctctggagctggaccacttcgaccccctatttttcgtggaggattgccggggtagggggcgatgtgatttttagagccctc

SEQ ID NO: 108741 - DNA, 531 bp, Zea mays
  Clone ID: MRT4577_30666C.1
tatatttcccatctattctaagaccagcaccgaagatctcacgcccgaaacaacgccaccagcatcacactagaacgcgagggctgccaaaccaccatccctgtcacctctctgcgatcatctgtctccgccgctagcatgaatcgttccccgccgtgtctctaaagcatctcgaggaaatgatgactcgcttaggtgaaggataattagaagatgacactgctaccctactgcgtactctctacttcgagtgttagacatgctgaccctgtagatgagcaacgacagaataatgcaaacatcgctgctcacggactgaccttctgccgctgctgacactgtaaatgctatcgaggacatccatatcaccagtagtatgaagaggtggattgtgcgaactatgaaatgggtggcttctatgttgtggtggataccataacatatgagaagggatgggttatgaaggcactgctcaacgactctagtgagctccatttgctcatggaggtccacatatagtcgacttactgc

SEQ ID NO: 108742 - DNA, 1743 bp, Zea mays
  Clone ID: MRT4577_30667C.1
gctagaaagattgtatgtagattaatatgatccgatcatcaacagctatttggtggtctcctgacttgcgtagacctcaaacctaccaaatacacacaacaaaacaccgttcactaccaagctgcagaattaattctcatggttgccaaattacgatggagggagccatcacgaggaaggtgttcattcagttaaacattttacaacatgagtacagcgcatccaagcgtttccttggttatttcctactccagtccagcatgtgccaccgattttgaacacacacactgagacttgccaacttcctcaagcctcccgcttatgcttatgtctccagcaaatgtacattggcgcggtggggaagcatacctgccaccgttatatgccatctcgtcagtagcatggtcttcacaaacttccttgcacctcatgtcccgcttaagtaccttttgtacttgctttgtgcgagacttagtaagaagtctgtgaacatgcgctcatatcctggcattttgccgtaacctgggaagtagttgatatcaattatgtagtaccgatctttggttccaagttctctaatcatatctatattgaacaatctcaaaccaagccggccacgaagctccctgcccagtttctctagaagtggccttggaggaagctctgcaataagagggtcaagatctgcatcatccgcactagctgcagcacatgaaactcttggcaatcgatagatgccaacgttgtttagtaagtcatatgtgttaacatcaggaagagagaacctgcggacaacctgtattgtttcaccaatgatatacaccttaaagaggatcccgccatggtttatgaattcctgtagaaccagaggcggatcaagcattgacaaggatgcctcgtcatatgcaagatatagttcatgacctttagacgtcccatcaacaaccaatggcttggcaaccaagggcaaagttagtccagccatagctacagaagttggtatagaggatggatctttcgtaatgaccagctggcgtgggatacaaacttctccatagaaatttgacaggttcaaatcagctacttcttcaagcattgattgtcgattgttcagatgctcgatagcatttggtgggtcaaggacagtaacttctggatgttcttcgtgatagtcctccagaaccttctgccactccttcctagtaatcttgtgtaaaataacatcaaaagggccttgttctgagaggggaagagactcatcaatagatacaaaactgattccattcttcctggccagcaggagcagcttgggctgcaggaagctcttcaccttcttcttcgtgagggcgaaccccaccactagccggggaaccggcgccgccgcaccgatgagtggcggtggcgacagccccgccgaagccgtcacagcccccacctcgctcccctcctccatctcatcccgcacctccgcgtgcaggcgcatccttgccgctgaatctcgccgcgaatgggcgagaggagcggaagggaagggcaatcggaaacctcaaggttaattaactctgcacagagggtggtgggtcgagcagaggcggtgctctgcgcgggcacgggataggctgaggactaactgggtggggagggagagggaccgacgccgaccgaccgagggagggagggaccgcggagctgttaataatggcgattggcgggacgaggggaagccccccggccggcttcgag

SEQ ID NO: 108743 - DNA, 564 bp, Zea mays
  unsure (1)..(564): unsure at all n locations
  Clone ID: MRT4577_30668C.1
tgctgngcaattcgnctccttagcgtgccgtcccgggcatggtaacaaaaaaaaaaaaaaaaaaaaaaaaaaaaaaaaaaaaaaaaaaaaaaaattaaaagacaaaaaaaaaaaaaaaaaaaaaaagctggaacttaaaaacaaaaaaaaactagggggtacttttggccggtacccccctaagggcgatttttgaggattttctttccattgggcccccttcccccttccttttgggggccccatttcccccttccgggggtccttttacatttcattggccaaccttttacaccccccttttttaggaaaacccctggggttaccccttttattcccctggcgtaatatccctttttccccacctggtttattttccaaaaggcccgccccattggcttttcaaaggagtccccctgcctgattgcataatggcccccccttttgggggctccttaaaccgggacgttttggtttttcccccccgtgggccccgttcttttgcctgttccctatcccccgctccttaggtttgtttcctttcctttttagccttttttgcgg

SEQ ID NO: 108744 - DNA, 823 bp, Zea mays
  Clone ID: MRT4577_30669C.1
ttgggtacctcgaggccggccgggcatcactacagaaggatttggtgaggggaagaggtatacttgttggacgcgggctctatcatgtactccctctgcttctcgccgaaccgctactggctctgcgctgactctgtcaagacctgggacctcgagtcgaagcacgttgtgtaggacctcaagcccgacatccggatctccaagaaccagtggctatgcagatcctgaatatattgctactggaaaaatctcgaagaaggcagacatatatggatttggcatagtactttttgagataataagtggaaggttgatccattcttatatgaaggaagagggcactcgagagctaccataccctgcttatggcagcattgtttccgtgcgcagggccgtatagtataacctcctttgtctgcacacaaatacaacccaacccaaagacgctgcacaagcttgttgatccattgttgcgcgtggacaagcatgaacgggctcagattatggaatgcgtgagggtggcgcagttatgcgttgaccatatcgtgctaagcatcggcctgtcatgtcagaagttgtcaccatgcttcgcatggcagcatcaaagggatagttgtagctttgcaagacccacaaagtgatagatgtgaatgatggaagtgtgaactaattaatgagctctactcatctattttccccttgcgtaggcgagataatatgtgcgttctcatgcatgattgtgtaaacatcacggagattagtcagtgaaatatttggcatgcaccttacttgagcgctgtggctaataattgtgcttgcctgg

SEQ ID NO: 108745 - DNA, 1989 bp, Zea mays
  Clone ID: MRT4577_3066C.1
cttccgctttctcccttactcgcgctcagcacgcaggcgacggcgtcggcgctcaggtcgggctctgggcgacggcgtcatcggcttctcctcccgcctctctccagtcgcctcgcgccctcgcctccggtcctccgcacaccggccggtgaccctgcaaaaggaaattttcatggctgttaatgaggagtctgagggggagcaagctggggcaacactggaggatctgtttttctttaatggtgaagaggatgatgacagtgattgggaacctgctagtcgccttgttgtgaatagatggttttgcttgaactgcacaatgccaaatgtggacaagattacatattgcatgaattgccgtgagcttccaggatctgttgtagatggatatgatgtcttcaaaaagcaaattgcacaaacagctttgttatctgctgacacagggttgctgccagtgtctacggcgattggttttgatgaaagaatgctgctccacagtgagctagaagttaaaccaaatccacatccagaaagaccggatcgccttcgcgccattgctgcaagtcttgctgctgcagggatctttccctcaaaatgtgctttggtacctcctcgagaaatcacgaaggaggaacttcttatggttcatagtccagaccacattgaaagtgtcgagcagacaaagaacatgctttacagttacttcacttcggatacttacgcaaatggacattcagcatgtgctgccaaacttgcagctggattatgtgctgatcttgctagtttgatagtatctgggcgtgttcgcaatggctttgcgctggtaagacctcctgggcatcatgcaggggtgaagcaagcaatggggttttgtcttcacaacaatgcagcagtagctgcgttagctgcaaaaagagcaggtgccaagaaagtcctcatagttgactgggatgtgcaccatggaaatggcacacaagagatattcgacggggacaaaacagtcttgtacatatcattacatcgtcatgaggatggaaacttttaccctggaactggagctgctcatgaggtgggagttcttgatggtcaaggattctcagttaatataccttggagccgtggtggtgttggagatgatgactacatctttgcttttcagactgtggtgcttccaatagcttcagagtttgccgcagacatcactataatatctgcaggattcgatgcagctagaggtgaccctctgggttgttgtgacgtcactccaactggatactcttggatgacatccctgctagctggttcctcaaatggaagattgttggtgatacttgagggaggatacaatctccggtcgatatcctcatcagctactgaagttgttaaggtcctacttggggagggtcccaatcgtgcttcatttgtagtttcaccatcaaaagaggccttgagtactgtttctcaagtcctgaagattcaacaacagttttggccagttttaggtccaacatacgcatcactacaggcgcagcaggggtcggtttcttccaatcatagtaatgagctgaagaaaaggaagcgtccaggaggaggaccagggcccttctggtggaagatgggaagcaaaaggcttctatacgaagcgcttattgagcctcgcagccgtccgaggaaactcaaggggtcaactggttcagcagcgccttagacttagatgggcagtttgctggccgttgatcttctagacatgaacagggtagctcgctgaccgcgtttcctcaagcagagtaggctgcgtttacctagaaaacctagttttggctggttacttgcatgatggtcgaccgtttcagatggagtttgacagcaaacccgttgtgttaaccatgcgtggcgtatcagccgatgtttcatgcatgctactgtctttttctttggttggtttcgtaccatagatagacgtgtgtagcgaccatcgatgaagggcga

SEQ ID NO: 108746 - DNA, 189 bp, Zea mays
  Clone ID: MRT4577_30670C.1
gacccactcgtccgggactcgtccgagcgatcccactccctttcagtttctgatcgctcactcttgcatctggatcagtctttatctgctctagctctagcctctatccctatctagtatctagccactcggtcgagtagtcatcagccttctgatcgtcacccatggccactgccgaagtccagaccc

SEQ ID NO: 108747 - DNA, 474 bp, Zea mays
  Clone ID: MRT4577_30671C.1
tcaatccccaacaggtaactgttaccctcatgttagcaaattcaaaaggatgacacttaatacactaatttaatgagaaaacactcacaagaatgaacctctttttttttttaaaatttgtaaacttaagtccaaatactagaaacaaataatcattaaatgaaataatataaaaagatctttaaacaagcacttaataactttgtaaaataaataaatcattacattcaataatacaaacactataatcatatccttactaaaaaacgataaattctcactaatgagtaatctctacatttacacatatgatgttgaaaaaacatagaatcagtaaacattcacgaaccatgaattaaagaaaaaaaactgcagtaactacatattcatggaaatcatacaaatattgctaattactaaaattcttgaaagaaaccaattttaagtcatctatacactgcatcaattttaata

SEQ ID NO: 108748 - DNA, 674 bp, Zea mays
  Clone ID: MRT4577_30672C.1
gttcaagcagtgcttctgcactaagccatgcaagagagagagagctgatgctacactccggtcgtcaggcctctgatcatgttgtgcttgatccgcatgacagcgcgactctcgcttgtatgcctagttttttttgtatgtaataaataaacaaaatagtaaatgacatgtttttcttacatgaaagtcaagcgattttgcttatctgaccggcatgtgtccgcgcgaatcgatttgctctgagatggttttatttctatacatcagagagaaggagacgctcgcgtcgccccccgcgcgggcgaccgagcggacacctaatcctagccgccgcggcgccgccatcctcacctcgcctcttctcgccgcaccgctgcccgagcaggatgccggctgctcgtgcggcctgcggggaaggcggcggcggggccctctcttctcttctccggtggattggggcggacgcggctgcctggtcccccggacctcctcgtcggcgatgacgggctggcggtggaggaggatagggccaccagatccgatattccctcggctggatccggtggccgtgcgacgagaggtgtgtgatgtgcgtggggcggcaggacgccgggcagcggcggcggccggctcgggcggcaccgacggtggtcgtggcccccgacccggccggc

SEQ ID NO: 108749 - DNA, 590 bp, Zea mays
  unsure (1)..(590): unsure at all n locations
  Clone ID: MRT4577_30673C.1
tcgcgatctagaactaggtcacggagaaggataaaggggctgccgagaaaatatagtgccaatatttgatggcaagtggtcttgattatatgtgtcccaaaaattgcaaaatcatcactagagaaggatttggttgaggggaagaggctatacttgttggacgcgggctctatcatgtactccctctgcttctcgccgaaccgctactggctctgcgctgactctgtcaagacctgggacctcgagtcgaagcacgttgtgtaggacctcaagcccgacatccggatctccaagaaccaggctaggacagataaaattatggaaaggcccgcggtctaacttgcccattcacatcaccctcaaggactaccgagatccacgacggcatgggcctcgagctctactacaactgagccgncgcccctctctccttangtcagtggctatgcagatcctgaatatatngctactggaaaaatctcgaagaaggcagacatatatggatntggcatagtactttttgagataataaagtggagggtgatccattcttatatgaaggcagagggcactcgagagctccataccct

SEQ ID NO: 108750 - DNA, 472 bp, Zea mays
  Clone ID: MRT4577_30674C.1
gcagagggcactcgagagctaccataccctgcttatgcacacaaatacaacccaaagacgctgcacaagcttgttgatccattgttgcgcgtggacgagcatgaacgggctcagattatggaatgcgtgagggtggcgcagttatgcgttgaccatcgtgccaagcatcggcctgtgatgtcagaagttgtcaccatgcttggcatggcagcatcaaagggatagttgtagctttgcaagacccacaaagggatagctgtgaatgatgcaagtgtgaaataattaatgagctctactcaactattttcccccttctcatgcatgattgtgtaaacatcagggagattagtcagtgaaatatttggcatgccccttacttgagcgctgtggctaataaattgtggttggctggaatgcaaattgctccatggtgttgttaaaaaaaaaaaaaaagaaaaaaaaaaaaaaaaaa

SEQ ID NO: 108751 - DNA, 216 bp, Zea mays
  unsure (1)..(216): unsure at all n locations
  Clone ID: MRT4577_30675C.1
ggannnccggtcgacgcgggcgtccgaaaaaaaaaaaaaaaaaaaaaaaaagaaaacaagattattataaataaaaaggaaaataaaaatttatggggggtgtatgtcttataggacgaccacttcctatcccagcacctgatctactgtatatggcattccaacagcaagagacgtgtttcgtaacctgcagaagagggggaaacttctgttaaa

SEQ ID NO: 108752 - DNA, 263 bp, Zea mays
  unsure (1)..(263): unsure at all n locations
  Clone ID: MRT4577_30676C.1
cgacttagttcctcagatncgcgcagncngcncgctcgnatctcagtgaagcnacgttcgaaacgcccggtgtagattacatgtgcgcgtgcacncggtaaactctgncaggacgtnagcgcagactttgcgcctgattagtggagtncgtcatntagcagncttgnggcgtcatatncatgagtncatgagnctgttttccctagtggtgaaaatngttnatncgcgactacacagattgccacatcacancangagcgnnc

SEQ ID NO: 108753 - DNA, 278 bp, Zea mays
  Clone ID: MRT4577_30677C.1
ctctagttttggcgcccacaggcaaattctcgtgcactcaatcgcgagcataggcagcactgcatgcatggacgccagcggagccggtagcatggcgattaacggggcggctgggcgcaaggctggcggccccatggaagaagtcggcgtcgcggtccagcaaaggccggtctggagttccccgtgagccggatcgggcgctacctgatgaaggggcggggcgcgcagcgcgtgggcaccgtcgcccgcgtgtatctaggcgacgtgcttgagtacct

SEQ ID NO: 108754 - DNA, 528 bp, Zea mays
  Clone ID: MRT4577_30678C.1
aatcgactaatttacaccaagagaacgtaccaacgttaccgatcgtagatatacatgttagagacttaccatgaaaaagcactgcggactggataaagggaacactcttttctggaagaacccctgcgcccaacacattttcttctttattgtaacccttttactgaccacaagcgaggattatccatgctggagaaagggattcattattgaagaaccatccatttcaaacccctgctgaacagaataaaacaggggtggggatgcatactcccaagctctgtagtttggtggagcaccatgccggaactaatgttagccgaagaggagggggggctatttctcacccatggcctatttgagggcctggcggaacttctttttctaatggatgggaggggaatcctaatcaccggtgcctactgaaaccgcggcagtaaccaccactaagaccttgtgcctaaccgcgtgctcggggtccttatttgacaattgcttctaacagaacgcaaatgccccagcgactat

SEQ ID NO: 108755 - DNA, 319 bp, Zea mays
  Clone ID: MRT4577_30679C.1
ctgtgcgccaaacccctgctggtgggggcgggcaaagttgaccccctaaagctgtttattgcaaatataagcgggggacacattaaaatagcccaggtttttgtggcataaagaactaggctgggctgcttcacaaaataaccaggggcagcaactctgatattggcctatcgccgaccacataagaatttgatattttttacatgtctttcctggatcgtatccacagttttagtttcccagggcgcaactttctttgaggaattttggacaatggcaccaggggaagcattgcaggatggacctcgggagaccctgg

SEQ ID NO: 108756 - DNA, 215 bp, Zea mays
  Clone ID: MRT4577_3067C.1
gtaataaccaacatccatccatcaaaccaaggatttgcagacatggccaaggcgaggcaattgagcaagaacgcgggccataccccatgcccacggcaataaactaaattaaacaaaagtaacggaacacaacagcagccgctgggcacggattctgtattgaagcctggtcttaaccatattacacttcgcccctcacttctgcaaaagcggcc

SEQ ID NO: 108757 - DNA, 581 bp, Zea mays
  Clone ID: MRT4577_30680C.1
ccggccgggaagacatgacgagccttggtcttcaatcatgatcaacgcatttctggtcttcaatggccaaggtcagccccgtctgaccaagttctacactcaactggaaacgagcatacaacagcgcctcatatccgaaatctttactctcgtatcgaaccgaccagccggatcttacaacttcctacctctcccacctatgcttgccgcttctggcacctctcacacgtcctccgaggagcagaacgatgtccctacactcgtaacataccgcaactatgcgactctttactttattgttatctccacctcgaccgaatcgcctctcgcattgatcgacctgattcaagtctacgtggaggccctcgataagctctttgagaatgtctgcgagcttgacctgatatttaacttcgaaactctacattctacgttatcggagatgataataggaggtgtcgtaatagagacaaatctggatcgcattgtctcggggggcaaggcgcaaggaacagttgcaaagagacctgtcaatgaagggaggagggccacctggtctgggaaggggacttggtatgggc

SEQ ID NO: 108758 - DNA, 432 bp, Zea mays
  Clone ID: MRT4577_30681C.1
aaataaaaataaataaaaaaaaaaacaatataaaaaaaaaaaaaaaaacaaacacaaagaaggcaaaaaaaataggggcggctctatctataacgctccattctttcctcctgcgcgcttgctttacaactgcctcttctgtggtgcccctttctttacccaacttacccgccttttatcacctcctcgtttgtttaatttgtggcgttccaaaacttattgtcctgcccgcacttccccctttcccactgtgaaacctttggatggcccccctctctgagcgtctttccaaacacttttttgcccggtatggctaatggcacgacccctttccggtcctttttttccaacggttgtctttctttatcgccctttgacccctccccttgtcggccctttttcccccgctagttttgtttttttccctccctt

SEQ ID NO: 108759 - DNA, 850 bp, Zea mays
  Clone ID: MRT4577_30682C.1
gaatgaagtggtgagggatctactcattatatttcacaaataaaaagattccgagaagataaacttatttctcaaaccaaacagatttttgcatcatcctgtagatcgatcgaatgatgaagaaaaatatttacatgattgatccattatatcaccctaaaaccaatatagaatgaaaatgcgtgcttctcaaaaagcactccgaccgtgccaagaagacgacgatacgaaacggatcctaccaacgatcgatcaatcgaccctagcgagggaatggcgagggcgagggcgagacgacggcgatcgccgaccgaggacgccttccccacagcccatccccgaggggatcgatcggctccagctccagctccagtaaattccctaggagtcgccgccgatggagatggcggtgcgggcggcgcggccgagcggggagcgggagcgctgcctgtcgaggtcccgcaggcctcggcgcatctcggagacgtggtgctggtacgtctcgtgcaccttggcccgctcgtcctcctcctgcttgatccgcatcacctggctgtgcatcaccatcaccacctcctcctcctgctgctgcggctgctgccgccagccttcctggcgctccctgctctgcttctccatcatcttgtctcggcagaatctcttattcggagacgagaggtcaagggaggaggtgatctaccgtactgtttggattctggacgaacgcaacgcaacgcaacgcggcgcggcgcggcgcatgggatagggcggcccggccggtctcgaccggggacgtccaacatgggagtaggaaggggtcgtcggttccttcctcgagccgaattcgagc

SEQ ID NO: 108760 - DNA, 228 bp, Zea mays
  Clone ID: MRT4577_30683C.1
ccaaacaagaggggcccaccccagccgttttattataataataccaaggataattattactgcatgccagctggggggggggggggaaaaaacccttggttaacttttcgggggggggccacccccaccatttatgggggacgagctaaccctagcagggcccaggggtccaacggggcccccccccccaaaaaagggggggggggccctgggccaacccggccccgg

SEQ ID NO: 108761 - DNA, 438 bp, Zea mays
  Clone ID: MRT4577_30684C.1
gggcaacgggttttatggaacggggggtttaaaaatttaagaacagccccggggcgggccctaaaccacaaaaacccgggggcaccgggattccaaaggggcccccacttttgcccaggggggaggagggatcaaaaatacggcccccaccaaaagattgcttgaagccacaacccagttttaaacttttacaacttttactctcaatcgatgcttgacggttcgggtaaacacttccaacattaaaaaaaaccattttaagttttaccccttttattccttgttaaaaaaagggagaggccccagcaaatttttcagtaaaaaagggaaccttgccacaaataacctttgggagaaaagccatccgggttgccccccttgaaatccggagggggttaatgggcggggggcttccgaaaaacgctggtgaaaaacccc

SEQ ID NO: 108762 - DNA, 358 bp, Zea mays
  Clone ID: MRT4577_30685C.1
aaggggaacacatgaatgatacattgtaataggcacttatacaatgataagggggcctaatgtttctaagggagaaagtgaaaaaaaaacgggaagaagaaaatggatcgtctagctgaatgcatgtttcaagcaatgtaaagccctcactaatttgcctaagcagcagcagtgtaactccttcgagcgttcagagccttcgtcgttgtcattgcaagggacggggtagaaggatcacgacacgggctccggacgacagctttactcgatcttgacgaggttctcctcctttctgaacgactcggccctgaggtcccggacgccacagaagcgttggggaaccttctggtcccgtccc

SEQ ID NO: 108763 - DNA, 553 bp, Zea mays
  Clone ID: MRT4577_30686C.1
gaaaacaaacgatatatatattatcttcaatcttaatatcttataggtatgtacccgtgcattgcagcggaacataaatttacataaattgacgagcatctaatggctcagagccctagtgacaggcgacgcgagcgcaatggtaatgggaacccttatggggaacagtgccttgttgcagaggagcgcgagtccgagcgagccaccacttgacgccttgagctccatcgtcctgttgtgaggatgcatttgccacgagctcccttgcaacgaacaacaatgtttatggcatctgaaggctgaagattgaaggtgatgttgactggtggatcattgacctttgttaaataaagttaagacagtatgcttcttgaattcttttgtttaccctaacaagttttacctgaacccaaaaccaccatcatgatagaaggggcaataagatgaattaacttatccttgaccaagtaagcatattttcggcacaacggagagcagcagctgtatcagtcatgaagaatgggttccctgttccagcagcaaatatgacaac

SEQ ID NO: 108764 - DNA, 179 bp, Zea mays
  Clone ID: MRT4577_30687C.1
acgatatatgattttagagatatccgtgtatatctcgatcctattagaccgactcttgtcgcctaaatacagcagagggtggatgctatggtctgatagtagatgttctgtcttaccaaactggtgttgtcctattacttgtaggctcctgcgtcttgccagatggggggaaaactata

SEQ ID NO: 108765 - DNA, 324 bp, Zea mays
  Clone ID: MRT4577_30688C.1
cccacgcgtccgcccacgcgtccgcggacgcgtgggggaaaagaagctcgtcttttacacaaaagtaaaagatgcaattacttccttaaacgctaagaagactatcaataagaaaaatacacggagtcggcgtcagaagaaactgaaagcatatgacctctcagcactgtccgagtccctcccagaaccaggtgcaccaaagcagaagcctgaagcaaagttgaactgcaagtcaagacagtcattagtattacgggaggctgctcatctcaaggttgtgctgggaaagatgcagttccagcttgacccatttgctgcgatcca

SEQ ID NO: 108766 - DNA, 3308 bp, Zea mays
  unsure (1)..(3308): unsure at all n locations
  Clone ID: MRT4577_30689C.1
ccctcgagtcctggccggcgagtccgagcccgaacgagaaccccgcttcgtcctggccgggcccttcccttcgtcccctcccttcccggccgccgcggtgcgcgcccgcctccttccgtccggaggcaactactcgcttctctctactctcggggaagcctgagctgattcctcctcgtgctctctcgtgggaagcatggcggatgggggtattgtggtagccatttgccaatatggtggagaattcacttctggccccaatggtaatttgacatacaaaggaggcgaggcgcatgctgttgatgttactcgtgacatgccactggagaacttcaaggatgaggtgtccaaggtgttccatgttgatgtcactgacatgtcattgaagtacttccttccgaataattacagaacgctaatcacaatatcatgtgatcgagatttacaaaggatggttgattttactaccagtgccacacaagtggaagttttcttgattagtagagtagaaaacaggagtattgttacttactctggagcttctgcaagtaagcctggatctaatgctcctggtgataaaaggaaaaggccaccttccaaaaacaaggtatccaaaagtaacaagaagactccaactcccagtgctcctggcacttcagtccaacctagtgctaataatgtgaaacagccaagaccaatagctattgaaaccaacgacaacagggtattccaactggaatttggaagtgatgttgcctttgccaccccagctggaggtgcttctactgcgccagacattctggatcagcaaaaccttgctcttgttgacactgcacatcgggaaccaattggccatttcaatgattcaggtgactcatatgttggttctgagatcactgtagatcctcagcatggactcgacaaccctgttatgttttgggatgacattattaaaggtgttggtcaagaatttgataatgtgaaggatttccgtgctcaattgtgcaaatatgccattgggaaaggatttgcgtaccggttcattaaaaatgaaactactcgtgtcacggtaaaatgtgttgcagagggctgcacgtggcgaatgcatgcatccgagtcatctcgtaacaagaaatttgtgatcaagaaaatgacagatgagcatacatgtggaggaggaaatggagaaggtcagcgtcgagcgacaagacaatggctgaccactgttattaaggagaagctgcatgataatccgatgttgaagccaaaggaccttgtcaaggaaatatatgaacaatatggagttacactgacctattcacaggtctggcgaggtaaagaagtagcacagaaggaactgtatcatgctatcagggagacttacagccatttgccttggtattgtgagaggcttacagagtccaacccagggagtattgctttgttatctccaatggtggatacaaaattccgtcgcttttttgttgcatttcatgcttctttgcatggttttgcaaatgggtgcaggcccctattgtttcttgacaaggttccactgaaagcaacaaatgagtacaagttgctggtggccgctgcagtcgatgctgacgatgctgtctttccagtggcatttagcgtggtcgaggatgaaaactatgaaagttgggtttggttcttaatgcagctgaaattccctgtccaaaatcacagctacgcttacaatgccatgacattcttgtccagtggacagaagggtctggatgctgccgtttctcaagtttttgaagatagccatcatgccttctgtttgcatcatatcatggaggaattcaaaggagagctgagaaagggaccatggtcacaacaaataagagaggggatgattgaggattttactcgcgccgctcaagcatgtagtattgaggattttaacacgtcaatcgagagcattaggaacatatccactgaagctgctgagtggatcatagcaagcaagcctgagcattggtccgacgccattttcagaggctgtcgatacgaccatttctcctcaaacattgttgatgccttcaataactggataccaaccaagaaggagggttcaattgtgctgatggttgactcactgagaacaaaaataatggagataatagaaacaaggcgtgaggcttgcaaggcgtggtcaggacctttgacgccttccatggaattcaaagcacaggaggaggtgacgaaggctggtaaaatgactgttctgtgctcttccgaaaccgtgtttgaagtgcgaggcaatgcgatctttgtcgttaatctcgcaaattgggaatgcacctgccggaggtggcagctttctggcctcccgtgcctgcatgctgtcgctgtgttcaaccggatcgggcgatctttctacgactactgctccaagtttttcagaatagagagctaccatatgacttactcaggaacgatcttcccaatacctgatatggacactgttgattttagtgccggtgcaaatctaatcccgcctcccaagccacggacgtcggataaaccaagaaggaagcggtttaaccccaacaagatccccacggtaatacggctctgcagcaggtgcaagcaagcaggccacaacaaggcaacctgtgaagctattttgtagacaaaaaagtagctgctgcatctggggtttgtattttatagcaggtaccctttttacgttttaactttgacttctcgtgctatatatatttatttttctgaagtaaggtaatattttgaatcatggtaagaataataaaaaaaatcaaataaaccgcccggtagctggtaaaggatttcaagtttttgtctggagcgctatggctggtgctgcctgtttttgcagttttttttttggaaaggggaaattgggtatcaggcatacatatgattcccctgtgtttttgtgggacccgtagcttaattttttttggagtgggtggatgaacccaagtgttagggatctgtctgctagtacagcatagattgtaaccagtggtaacaacgcagagtacgcggggtagtccgtagtcttatcgtctagatgaaaccattagcagtttattctcatgtagatcgatcttcgcacgtgccaggcaccactggtggttgcttccgtaatactatcttctttctcaaaaaaaaaaaaaaaaaaaaaaaaaaaaagaaaaaaaaaaaaaatttttttttttaaaaaaaaaaaaaaagnattaggaaaaaaaaaaaaaaaaaaaaaaaaaaaagacccctgcgttgttaccactgtt

SEQ ID NO: 108767 - DNA, 1795 bp, Zea mays
  Clone ID: MRT4577_3068C.1
cttccgctttctcccttactcgcgctcagcacgcaggcgacggcgtcggcgctcaggtcgggctctgggcgacggcgtcatcggcttctcctcccgcctctctccagtcgcctcgcgccctcgcctccggtcctccgcacaccggccggtgaccctgcaattgccgtgagcttccaggatctgttgtagatggatatgatgtcttcaaaaagcaaattgcacaaacagctttgttatctgctgacacagggttgctgccagtgtctacggcgattggttttgatgaaagaatgctgctccacagtgagctagaagttaaaccaaatccacatccagaaagaccggatcgccttcgcgccattgctgcaagtcttgctgctgcagggatctttccctcaaaatgtgctttggtacctcctcgagaaatcacgaaggaggaacttcttatggttcatagtccagaccacattgaaagtgtcgagcagacaaagaacatgctttacagttacttcacttcggatacttacgcaaatggacattcagcatgtgctgccaaacttgcagctggattatgtgctgatcttgctagtttgatagtatctgggcgtgttcgcaatggctttgcgctggtaagacctcctgggcatcatgcaggggtgaagcaagcaatggggttttgtcttcacaacaatgcagcagtagctgcgttagctgcaaaaagagcaggtgccaagaaagtcctcatagttgactgggatgtgcaccatggaaatggcacacaagagatattcgacggggacaaaacagtcttgtacatatcattacatcgtcatgaggatggaaacttttaccctggaactggagctgctcatgaggtgggagttcttgatggtcaaggattctcagttaatataccttggagccgtggtggtgttggagatgatgactacatctttgcttttcagactgtggtgcttccaatagcttcagagtttgccgcagacatcactataatatctgcaggattcgatgcagctagaggtgaccctctgggttgttgtgacgtcactccaactggatactcttggatgacatccctgctagctggttcctcaaatggaagattgttggtgatacttgagggaggatacaatctccggtcgatatcctcatcagctactgaagttgttaaggtcctacttggggagggtcccaatcgtgcttcatttgtagtttcaccatcaaaagaggccttgagtactgtttctcaagtcctgaagattcaacaacagttttggccagttttaggtccaacatacgcatcactacaggcgcagcaggggtcggtttcttccaatcatagtaatgagctgaagaaaaggaagcgtccaggaggaggaccagggcccttctggtggaagatgggaagcaaaaggcttctatacgaagcgcttattgagcctcgcagccgtccgaggaaactcaaggggtcaactggttcagcagcgccttagacttagatgggcagtttgctggccgttgatcttctagacatgaacagggtagctcgctgaccgcgtttcctcaagcagagtaggctgcgtttacctagaaaacctagttttggctggttacttgcatgatggtcgaccgtttcagatggagtttgacagcaaacccgttgtgttaaccatgcgtggcgtatcagccgatgtttcatgcatgctactgtctttttctttggttggtttcgtaccatagatagacgtgtgtagcgaccatcgatgaagggcga

SEQ ID NO: 108768 - DNA, 1815 bp, Zea mays
  Clone ID: MRT4577_30690C.1
cattgggtacctcgaggccggccgggattctattcctccacaccgatcactcgctgctcccctctctcgccggagctccgggccggatggcggcggcagcagcagctcctcccgcctccgtgatcgcgtgatggacgcacacaccgccgcgctccgccgatggacgacgccggaaggccaccaccacacgctcccgtggcggtgaccgcctccgcctccgcctccgccaccgccgcgcccgcccctccccaaccctcagccactgctgccgtcgacaggtcctcccccgaccccgacgcgctctatgaagaggggatgtggcaacagatggccatggacagcggtgccactatgcaacctgggtcatatcctgagcgaccaggtgaacccgactgcacttactatctcaggactggattgtgtcgatttggcatgagctgccgattcaatcatcctcccgataggaatctggctattgcctctgccagaatgaagggagaatatcctgagagagcaggacagccagagtgtcagtattatctgaagactggaacatgcaagtttggccctacatgcaaatttcaccatcccagggaaaaggctggaattgcagggagggtgcagctaaacacatcaggatatccactccgcccggacactgtaaatatgcaaatacttgtaaattccaccatccggaacttttcaatgtggtgccttcgtcacgtggttctcctatttatacctctgtacattcctctgcgagtgctggtccgcagtcctatactggaactatgccaagctgggctttcccacgagcttcttttataccaagccctaggtggcaaagtccttcaaattatgcgccgatgattgtacctcagggccttgttcaaatgccgagctggaattcatatactggtcagctgcagtcacctggggctcaacaaacttatggaagttcacaacaaggcgaagctagtacaggaaatcagggaatgctatcaccctacagatctagttcgtttcctgtgcctcaatatgcgctgcagagagagaatgtatttcctgagagacctgatgaaccagaatgccaatattacatgaagacaggagattgtaaattcggtgcagtgtgcaagttccatcatccccgggtgagatcactgccccctccagattgtgtcttaagtccaatgggtcttccactacgtccaggtgaagaactgtgcaaattctattctcgttacggcatctgcaagttcggcgccaactgtaaattcgaccatcctacagtggttgctccaatggtctatgcgtatggtttctccgcgtctgcttcccctgcatccgcttcgactaatgtacctatggcgcgacgccttctgggatccccaccggggtctggatatacatcttaggcgtcgttttttttttcagttgacctacttcgatttataaaatccatggcactgcctcaggcgctgtgaatgtttctcctaacttcctgccgggatcaaagttctgtaaattgagttgctaccggagatgtacagccccgttttttttggttttaatccagatctttgggaataactcccgaaaccgaataaactttggatacagagatgccagttttcaggtgcctgcactatttgacattattgctgcccctatggttccgaacagaggaacagttgaattctctggaggggctgaagcctgcccttgtgcagttgagattatatcatcgcgtcgatttaaaaaaaaaaaaaaaaaaaaaaaaaaaaaaaaaaaaaaaaaaaaaaaaaaaaaaaa

SEQ ID NO: 108769 - DNA, 739 bp, Zea mays
  Clone ID: MRT4577_30691C.1
ggccctaggggccttttttttttttttttttcaccatcttaatatctttctctttttttcattgcattttttgtctctactaataacgtagaacaagcctctgtacaaacacatgcaccactacaccagacgccacgcggcagggaacaaacacaggtgaggagtgtgggtccggtcctccggcctctccttgcgtgtcatcaaatcaaatctttaaaaagggctgggcctgatccggtctgttaacgagggcatttccgggcaacctgggtaggccccgtggcgcagcgcaggcagcaggctaggacaaaaagttagtgccccttggcttctagtatcactcgctatatacacagggacaaagggtcgcgggaggggtgtttcggtcattctggacaggtccaccagaaccaggaggccggtgacagacccgcggcattcccgtcaatttcgacaaaaagaatgtgggacagccggacaggcgaagcatctgggctatgatgcggctgccgggcgcgcgggacgtcgtggccggaagatcaccggcgcgccgtactgcgggtagagcagcatcaggaccgtgggcgcgtggacgtagttcggggacgccctcatctcgaaccgctgcagcaggaccgccacggtgagctgggcctccaggcgcgccaggttctggccgatgcacgcccgggcgccaagcccgaacgggatgaacgccagcgggtgcttcgccgccctc

SEQ ID NO: 108770 - DNA, 1603 bp, Zea mays
  unsure (1)..(1603): unsure at all n locations
  Clone ID: MRT4577_30692C.1
cattgggtacctcgaggccggccgggnnannnntcnnnnaaaaaaaaaacaaaaaaaaaaaaaaaaaaaaaaaaaaaaaaccccccttattctattcctccacaccgatcactcgctgctcccctctctcgccggagctccgggccggatggcggcggcagcagcagctcctcccgcctccgtgatcgcgtgatggacgcacacaccgccgcgctccgccgatggacgacgccggaaggccaccaccacacgctcccgtggcggtgaccgcctccgcctccgcctccgccaccgccgcgcccgcccctccccaaccctcagccactgctgccgtcgacaggtcctcccccgaccccgacgcgctctatgaagaggggatgtggcaacagatggccatggacagcggtgccactatgcaacctgggtcatatcctgagcgaccaggtgaacccgactgcacttactatctcaggactggattgtgtcgatttggcatgagctgccgattcaatcatcctcccgataggaatctggctattgcctctgccagaatgaagggagaatatcctgagagagcaggacagccagagtgtcagtattatctgaagactggaacatgcaagtttggccctacatgcaaatttcaccatcccagggaaaaggctggaattgcagggagggtgcagctaaacacatcaggatatccactccgcccgaatgaaaaggagtgtgcatattatttaaaaacaggacactgtaaatatgcaaatacttgtaaattccaccatccggaacttttcaatgtggtgccttcgtcacgtggttctcctatttatacctctgtacattcctctgcgagtgctggtccgcagtcctatactggaactatgccaagctgggctttcccacgagcttcttttataccaagccctaggtggcaaagtccttcaaattatgcgccgatgattgtacctcagggccttgttcaaatgccgagctggaattcatatactggtcagctgcagtcacctggggctcaacaaacttatggaagttcacaacaaggcgaagctagtacaggaaatcagggaatgctatcaccctacagatctagttcgtttcctgtgcctcaatatgcgctgcagagagagaatgtatttcctgagagacctgatgaaccagaatgccaatattacatgaagacaggagattgtaaattcggtgcagtgtgcaagttccatcatccccgggtgagatcactgccccctccagattgtgtcttaagtccaatgggtcttccactacgtccaggtgaagaactgtgcaaattctattctcgttacggcatctgcaagttcggcgccaactgtaaattcgaccatcctacagtggttgctccaatggtctatgcttgacctacttcgatttataaaatccatggcactgcctcaggcgctgtgaatgtttctcctaacttcctgccgggatcaaagttctgtaaattgagttgctaccggagatgtacagccccgtttttttttggttaatccagatctttgggaataactctcgaaaccgaataaactttggatacagagatgcc

SEQ ID NO: 108771 - DNA, 1171 bp, Zea mays
  Clone ID: MRT4577_30693C.1
cccacgcgtccgcctcttcatagagcgcgtcggggtcgggggaggacctgtcgatttggcatgagctgccgattcaatcatcctccggataggaatctggctattgcctctgccagaatgaagggagaatatcctgagagagcgggacagccagagtgtcagtattatctgaagactggaacatgcaagtttggccctacatgcaaatttcaccatcccagggaaaaggctggaattgcagggagggtgcagctaaacacatcaggatatccactccgcccgaatgaaaaggagtgtgcatattatttaaaaacaggacactgtaaatatgcaaatacttgtaaattccaccatccggaacttttcaatgtggtgccttcgtcacgtggttctcctatttatacctctgtacattcctctgcgagtgctggtccgcagtcctatactggaactatgccaagctgggcttttccacgagcttcttttataccaagccctaggtggcaaagtccttcaaattatgcgccgatgattgtacctcagggccttgttcaaatgcagagctggaattcatatactggtcagctgcagtcacctggggctcaacaaacttatggaagttcacaacaaggagaagctagtacaggaaatcagggaatgctgtcaccatacagacccagttcgtttcccgtgcctcaatatgcgctgcagagagagaatgtatttcctgagagacctgatgaaccagaatgccaatattacatgaagacaggagattgtaaattcggtgcagtgtgcaagttccatcatccccggggtgaagaactgtgcaaattctattctcgttacggcatctgcaagttcggcgccaactgtaaattcgaccatcctacagtggttgctccaatggtctatgcgtatggtttctccgcgtctgcttcccctgcatccgcttcgactaatgtacctatggcgcgacgccttctgggatccccaccggggtctggatatacatcttaggcgtcgtttttttttcagttgacctacttcgatttataaaatccatggcactgcctcaggcgctgtgattgtttctcctaacttcctgccgggatcaaagttctgtaaattgagttgctaccggagatgtacagccccgttttttttttgg

SEQ ID NO: 108772 - DNA, 402 bp, Zea mays
  Clone ID: MRT4577_30694C.1
cacggtaaacacttgaaatccaacataaggcactagttctctctggactacatgcgccccattccaggaaggtctcggtcatatgccgagacggaataaaggggtcgaaatgatcaggtttctgtttatcgatccacagaatatacatcttttctggtctgaatcccagccagacatcaatcttacagatctgctgaggagcaggccctaagccccagcacagcaccagatacaaatgcttcttacacaacaatatgatgcaaatctgcacactcgtaggctttaaaacttgtctagtgcagctcttctcaggcttgctctccatgcatcccaaaagaccctgcatggaggattcaggtccacacactatggaatctgtcttttcgccacacctccttcgca

SEQ ID NO: 108773 - DNA, 1806 bp, Zea mays
  Clone ID: MRT4577_30695C.1
tccgcctcttcattgggtacctcgggcccggccgggattctattcctccacaccgatcactcgctgctcccctctctcgccggagctccgggccggatggcggcggcagcagcagctcctcccgcctccgtgatcgcgtgatggacgcacacaccgccgcgctccgccgatggacgacgccggaaggccaccaccacacgctcccgtggcggtgaccgcctccgcctccgcctccggccaccgccgcgcccgcccctccccaaccctcagccactgctgccgtcgacaggtcctcccccgaccccgacgcgctctatgaagaggggatgtggcaacaaatggccatggacagcggtgccactatgcaacctgggtcatatcctgagcgaccaggtgaacccgactgcacttactatctcaggactggattgtgtcgatttggcatgagctgccgattcaatcatcctccggataggaatctggctattgcctctgccagaatgaagggagaatatcctgagagagcgggacagccagagtgtcagtattatctgaagactggaacatgcaagtttggccctacatgcaaatttcaccatcccagggaaaaggctggaattgcagggagggtgcagctaaacacatcaggatatccactccgcccgaatgaaaaggagtgtgcatattatttaaaaacaggacactgtaaatatgcaaatacttgtaaattccaccatccggaacttttcaatgtggtgccttcgtcacgtggttctcctatttatacctctgtacattcctctgcgagtgctggtccgcagtcctatactggaactatgccaagctgggcttttccacgagcttcttttataccaagccctaggtggcaaagtccttcaaattatgcgccgatgattgtacctcagggccttgttcaaatgccgagctggaattcatatactggtcagctgcagtcacctggggctcaacaaacttatggaagttcacaacaaggcgaagctagtacaggaaatcagggaatgctatcaccctacagatccagttcgtttcctgtgcctcaatatgcgctgcagagagagaatgtatttcctgagagacctgatgaaccagaatgccaatattacatgaagacaggagattgtaaattcggtgcagtgtgcaagttccatcatccccgggtgagatcactgccccctccagattgtgtcttaagtccaatgggtcttccactacgtccaggtgaagaactgtgcaaattctattctcgttacggcatctgcaagttcggcgccaactgtaaattcgaccatcctacagtggttgctccaatggtctatgcgtatggtttctccgcgtctgcttcccctgcatccgcttcgactaatgtacctatggcgcgacgccttctgggatccccaccggggtctggatatacatcttaggcgtcgttttttttttcagttgacctacttcgatttataaaatccatggcactgcctcaggcgctgtgaatgtttctcctaacttcctgccgggatcaaagttctgtaaattgagttgctaccggagatgtacagcccctttttttttggttaatccagatctttgggaataactctcgaaaccgaataaactttggatacagagatgccagttttcaggtgcctgcactatttgaaaaaaaaaaaaaaaaaagcggcccaaaaaaaaaaaaaaaaaaaaaaaaaaaaaaaaaaaaaaaaaaaaaaaaaaaaaaaaaagaaaaaaaaaaaaaaaaaagcggcc

SEQ ID NO: 108774 - DNA, 2460 bp, Zea mays
  Clone ID: MRT4577_30696C.1
gcggttaggttgaatccccacgcgtccgggctattgcctctgccagaatgaagggagaatatcctgagagagtgggacagccagagtgtcagtattatctgaagaccggaacatgcaagtttggtcctacatgcaaatttcaccatcccagggaaaaggccggaattgcagggagggtgcagctaaacacattaggatatccacttctcccggtttgttttttcttgccagttacatgtcctcttctacatatgtctgtttgttttgctgaaaaggagtctactttacttttgtagaatgaaaaggagtgtgcgtattatttaaaaacaggacaatgtaaatatgcaaatacttgtaaattccaccacccagaacttttcaatgtggtgccttcgtcacgtggttcacctatttatacttctgtacattcctctgcaagcgctggtccacagtcatatactggaactatgtcaagctggacttttccacgagcttcttttataccaagccctaggtggcaaagtccttcaaattatgcaccaatgattgtacctcatggccttgtccaagtgccgagctggaattcatatcctggtcagctgcagtcacctggggctcaacaaacttatggaagttcacaacaaggcgaagctagtgcaggaaatcagggaatgctatcaccctatagatccagttcgtttcctgtgcctcaatatgcgctgcagagggataatgtatttcctgagagacccgatgaaccagaatgccaatattacatgaagacaggagattgtaaatttggtgcagtgtgcaagtttcatcatccccgtgtgagatcacagccccctccggattgtgtcttaagtccaatgggccttccaatacgtccagtatgttgttaaacccttcactctttctgttttattttgttttagaactacactgtttctgttgtattgatcctttgacattttatccattatatatgaatatgtcgattgttgtactatttggttgttcttatctaaaagaaatttgacctggcctttggcgtgggacaaatgaggtgattttttttaaccctagcctgaaattcgctctccagttctttggggtgggacacatgaggggattttttttaacctcggcctgaaatttgcttccacgaagagtcaatctcaggacttgaggaatgctactcaagccacctaatcaactcacctagaagccctttcgcaagtatgtgctatgcatttgttgtttataaaatggttttcatgtgagacaaaaaatgaaggatgttccatacatgttgtttctcagctagatgcctagatgattgatttcagtggcatgatttctgctaacgataactgatttattctcctagcaataaatgcacaccataccaaagatattaatatgcatatctaaggtaccactattggagcattctttacatgtgttggttgagctctgatctatcataaaaaacttttgagggctgagcctcaaatctcactacgacttacaagcgtcattgttgatgcctggacactgattagagcaatgttaaaagttacaaatttgctaggacatgtattaattttttactttagcatacaagttgttgaagggacgagtgtatagactgatatcagcttacaaataaagcctgtctcacgaataggcactagctagtccttctggtacacctcattgaatggtctgccatcttgattatcctgtccaatggtttttagggtgaagaactgtgcaaattctattctcgttatggcatctgcaaattcggcgccaactgtaaatttgatcatcctacaatggctgctccaatgggagtttatgcatatggtttctctgggtctgcttctgtcgcacccgcttcaactaatgcacctatgacgcgacatcttcttggatctccatcaggttctggatatatgtcttaggtgtctttttttcagttgacctactttgatgtataaaatccacggcatcgcctcaggcgctgtgaatgtttctcctaacttcccgccgggatgaagttctgtaaattgagttgctgccggagatgtacagcccccctcccccaattaatccagaactttgggaataactgttggaacctaataaacttcagatacagagatgccagttttcaggtgcctgcactatttgacattaatggtgcacctatggttccgaacagaggaacagttgaattctctggaggggctgaagcctgcacttgtgcagttgagattatatcatcgcgtcgatttattttggaacctgtattcagctggtgttgaggcatttgtttctgaggtgaaatgaactctccatgcccaacaactgaaactaaagacgacacgataaggtgcctgacctgaaccggcacatttcctgtggtcaggtttaatcatatatatgtagctg

SEQ ID NO: 108775 - DNA, 624 bp, Zea mays
  unsure (1)..(624): unsure at all n locations
  Clone ID: MRT4577_30697C.1
acgagctcggcaagtacgacgtggtcttccttgccgcgctcgtaggcatgncgnccgaggacaaggccaaggtggtggcacatcttggcaggcacatggctgacggagcggctctcgtcgcgcgcagcgcccacggggctcgtgcctttctctacccgatcgtcgatcctgaggacatccgtcgcggtgggttcgacgtgcttaccgtgtaccacccggacaacgaggtcgtcaactccgtcatcatcgcgcgtaagatggacgcccatgccaaggggcttcagaatggacacgcgcatgcacgcggcacggtgccaatagtgagccccccgtgcaagtgctgcaaggtggaggccaacaccctccagaagagggaggagatggcgacaatgacggagctgtccatctaatgcaaggaacgtttgaggaattgtgtgtggtaaccgtagttgcaaatcgttgttgcgtctctggatctcccatgtaactgtttgtttgcacttctttatttgatgtcatgcactgtgaagtgtttaataagaatgtgttcttcctatataaaacacatgcccctatatgtactcatacagatcgaggggaaacttaaacctgggtttgtggccc

SEQ ID NO: 108776 - DNA, 281 bp, Zea mays
  Clone ID: MRT4577_30698C.1
caactggaacggtttttttaattaaagtaaattaaataaggaactggaacatttgattgaataggatccaaaaatactaacgggattatgagaaaacccacaaagaaacgggttttaaaaaaaaaaaaaaaatattgggggcccggccaccaccatcgaaagggccccaaaaaacgcccgccctaaattcccccctacaaaaaaaaaaaataatttttggaaaaatatgggcggggggtttcacccccccaacccatttcttgcccccaaggggagggcct

SEQ ID NO: 108777 - DNA, 1516 bp, Zea mays
  Clone ID: MRT4577_30699C.1
gccggcccgggctgcaggaattcggcaccaagttgtcgatcacttgcctgctcttgagctcgatctatcatcagctgcatcttgcgctcaccaacaagctatcatcagctacagcttccgagcagcaacagcctcccaactgcaactgtagcagcgacaactgccatggaggcccagaacgtggaggttgctgccctggtgcagaagatcgcggccctccacgcccacatcgccaagctgccgtcgctgagcccgtcccccgacgccaacgcgctgttcaccagcctcgtcatggcctgcgtcccgccaaaccctgtcgacgtgaccaagctcagcccggacgtccaggggatgcgagaggagctcatccgcctctgctccgacgccgagggccacctcgaggcgcactacgccgacatgctcgccgccttcgacaacccgctcgaccacctcggccgctttccctacttcagcaactacatcgacctgagcaagctggagtttgacctccttgtccgctacatcccagggctcgcgccttcccgtgtcgccttcgtcggctccggccccttgccgttcagctcgctcgtgctcgccgcgcgccacctgcccaacacactgttcgacaactacgatcggtgcgccgccgccaacgaccgtgctcggaagctggtccgtgcggacaaggacctgaacgcgcgcatgtccttccacacggtcgacgtcgccaacctcacggacgagctcggcaagtacgacgtggtcttccttgccgcgctcgtaggcatggcggctgaggacaaggccaaggtggttgcgcatcttggcaggcacatggcggatggagcggctctcgtcgtgcgcagcgcccacggggctcgcggcttcctctacccgatcgtcgatcctgaggacattcgtcgcggtgggttcgacgtgcttgccgtgtaccacccggacaacgaggtcatcaactccgtcatcatcgcgcgtaagatggacgcccacgccaaggggcttcagaatggacacgcgcatgcacgcggcacggtgccgatagtgagcccgccgtgcaagtgctgcaagatggaggccaacgcgctccagaagagagaggagatggcgaccacgacagagctgtccatctgatgcaaggaacttttgagcacctatgcgtgcgtggtaacaataatagttacaaatcgctgctgctgaatttctcatgcacttctttattcgatgctatgcattgtgaagtgtttaataagaatgtgttcttcctatgtgatgatatatgccaagttgctagcacttttacgtgtgatgtaacggacatcgtgtgaacagtttgatggatgggttggtttatctttctcactaatatcaattttgttttatggttaataagaatgtgttcttccctatgtgataaaaaaagccaagttgctaccaaaaaaaaaaaaaaaaaaaaaaccaaaaaaaaaaaaaaaaaaaaaaaaaaaaaaaaaaacaacac

SEQ ID NO: 108778 - DNA, 465 bp, Zea mays
  unsure (1)..(465): unsure at all n locations
  Clone ID: MRT4577_3069C.1
cccagcgtccggngatacctgctcacgtatcacaaaggctgtaagattttttttccccttctcttttacgacgtgtaatgcaacctactcagggctaaccaccagttgtcatgtgtaaaaaaaaaaaaaaaaaaaaaaaaaaaaaaaaaaaaaaaaaaaaaaaaaaaaaaaaaaaaaaaaaaaaaaaaaaaaaaaaataaaaaagggcgtagctattttatagagacaagctaaattaaattaacctggccggcggtttaacaacttttatgactgggcaaaaacctgaatttactgaacttaatttgatagcaggacatctggcaaaacccgggtggcgccaaagataataggcttgaaccaatcgcccttctcacagtttgcctaactgaatggaggaatggaacgctccctgttccgacccattaagcaccttggatggggaaggtacgcccacctggaccg

SEQ ID NO: 108779 - DNA, 858 bp, Zea mays
  Clone ID: MRT4577_306C.1
ctacacgagggcgttcttcgaggtgctagcgagttccttgtctaaggtgtccccaaatgccttgagaagatcatcgaggctggctagggatacatcttcttcgtcggaccagtcatcgattctggggggaggtagggctagaggggccttcttcttcttcttctctgtctggcatccttggttagtggtcttcttttggatcttctttttgggggcgagtgccttcagcttcttgtcaaagtctgacttcaaggttcggtaggcctcacgggtgttggcttcctcgtcttccgctatgctgagactctcctgaagggataccttctcttgcgtaagctctttgacttgctgctctaggaattccactcgggagtttaggtgggtacaatgggaggagagctcatcgtagtggttgtcgagggtgtggaggtatccggccatgtagacgatagtgggatcatcctctatgggatctcctcctgacagagcctggagtcttttcttccaggttggggtgtttttgttgctgggtgggaaatatcggaggggagtctcaaagatctctcggccatagttttggcacagttgtttgagggcttttcgagcaacgctctggcatgtgtctgggaagcggtgcccgatgaaggtaatttggaaaggagggtggtttgggtagttccggctttctcccaagtagaccgccatagagcacttttccattccattttcacggtactctttccagacatattcgggcttcttgcggatccccaagtgcagtgcgcagcttcgaagaaggtgaggaaagccttcctcctctgagcaataggaagtcctaatcacccaggggttttccat

SEQ ID NO: 108780 - DNA, 611 bp, Zea mays
  Clone ID: MRT4577_30700C.1
aaaaccaacaaacccagggggaacccaacacccaaaagcaaaaaaggcccaaacgacccaaagccaacacagggagaaaccctcacggccggggcgggggggttttaaaagcacacgggcctggaccacccgacccacggggaaacaaactgggaaaaataaaagcaaaccaaaagcacaccccccccaacgcaacgttttggagggggccccaaaggcccggccggccaaaacgaacaagggacacccccccccgggaacctaaggagcgggtttggggccccccgggggggccctgggggtttttttcacccgagctttggggggagccgggaatttgggcaaagattttgcccagaaggcccttttggccatcggggcgggggacggcaacctcgggggggggccccggggggggcccgggaacgcccggcccgggggggggggaaaaactggcttccggttttggggggccccgggaaagcttctcctgtgattgggccaggaggccttttttcttctcccccgggcgccgggggggggggctgaattttttggtgggcgccccgcattgtggggccaccggggggggggggggccccccggggcgg

SEQ ID NO: 108781 - DNA, 250 bp, Zea mays
  Clone ID: MRT4577_30701C.1
aaaaatcttaaccacaatatcttactttccaatctaacataaacaagatcaaggagcgtctcattttccactccaacgtcacattccaatacgcgacccataacttgctcataataccggatcacatttattccataattactgctcccacctaccccaagacaatactacagttctcctacatttacaatatctatacctcgaactcttaatgcactaagacaatcactcacttaatcaatgcaacttt

SEQ ID NO: 108782 - DNA, 656 bp, Zea mays
  unsure (1)..(656): unsure at all n locations
  Clone ID: MRT4577_30702C.1
taactcctaatcaagttttgtggcattaagtttcaagttctacaggatcacctattcaccccccctctaggtgctctcacaaggggacttgacttctcgaacagaaagacaaaaattcacacaggaatctgcttttattctcattctgagcagcaccatacacattaataaaattctagatgaaattcttttccttgtgcaagacaagggtgagaatcatgaactcacccgcttcatgatctctcacatcaaacacctcagagttgaaacccaccaaaagacctccagatttaccattaagaggtgaagaaaaccaggtagagtttgctaccaccaatcgaagccaaccaaggatcactacattgtttcttattagtttcttaattgtaagccaataaattccactttctcgtctctaatgagttctttcaaaaactcaaacttagatttttcccctaaaccctgacaattccatgtgaggcctatcatcagaaaggatccaaggggggccaatttcaactgcttcactccttatattaggtgtacacctaaacttaggagaagcttttttcttggttgttttctttcgatgtttaatttttctcccttttcttaaaacataacatccagaanatcatagtcgatatttttgtctg

SEQ ID NO: 108783 - DNA, 510 bp, Zea mays
  unsure (1)..(510): unsure at all n locations
  Clone ID: MRT4577_30703C.1
ttaagatgggtattntcccgagaccactggcataagcgacgcgcgactggtggcaagaggaagccaatcaggaagaagaggaagtttgagttaggaagacctgctgccaacactaagcttggtgctcgcagaatccacactgtaagaactcgtggtggcaacaagaaatacagagcactgcgggtggacacagggaacttctcttggggctcagaatgctgcactcgcaagacccgtgtcatcgacgtcgtgtataacgcctccaataacgaattggtgcgtaccaagacgttggtgaagaacgctatcgtcgtcattgacgccacaccgttcaggcaatggtacgagtctcactacgctctacctattggcaggaagaagggagctaagctaaccgagcaagaggaggcgatgttgaataagaagaggtcaaagatagtcgacaggaagtacaaggcgaggcagcgattggccaaggtcgagccggctcttggggagcagttccaaact

SEQ ID NO: 108784 - DNA, 205 bp, Zea mays
  Clone ID: MRT4577_30704C.1
aaaaaacaccctttacgggaacataatttttttttttttaggccattacaaccccggggtttgttattttgctaaaaaaatccattgggggcccaaaaaacaagggcagcaacccccccaaataaaaccattttctagtttacacccggggaagcagcccaaccctttattttttactggggggtaaattatcaagtagccccct

SEQ ID NO: 108785 - DNA, 353 bp, Zea mays
  Clone ID: MRT4577_30705C.1
aaaacacaatgttctttttttttcactaagaaaaccatgactgtttacataatgacacaaggacagcacgacatatactaatcccatcttggagtgcaaaaaccgcacgctgatttaaagcagctttattttattttgtctgaaaacaaaaaagaaggggaaagaaatcccaatattcgtacacaataccctcgcatatgcaaaacaagcggaagggaaattaagatgataccaatccaacggtttaggatggaggcctctcgtatgagaaaaaggcaggcctcggcaccttttaatatggccgcgacagactcattaaacttgggaaatatagctctaaacctagacgcccg

SEQ ID NO: 108786 - DNA, 1263 bp, Zea mays
  unsure (1)..(1263): unsure at all n locations
  Clone ID: MRT4577_30706C.1
ggccgcttttttttttttttttttaggggtgaagtgtgtgtatttatcatgataaaaacaaatagaaattaaaattcttaaaagctgtaaaaagaattaaaaaaccaccacaaaaaatacaaaaaatataaacgagaaaacaaaagaaagaaaagaaaaagaaaaagaaaaagaaaaggagagggagagggagaggaagcgagcggctgggcgccccaagccccacatggtgcagcgaggtccacgctaacaacttctcgaccttggcctcccacggctctgccgcattgccgcgcgccgccggccggcactcgccgtcctgacgcgagaaggaagatgctctaggaagttgggggcctggctagggacagcctgtgtcccgccgtgggatcggtgggagagggggaggcaggcatgtgtgatctggtggcccgcacgggccggcacctgcagcgctacgagaacggccgtcgccttgtggccgggtgcataccattcagatatagggatattaatgatggagcttctgatgatgaacaaaagaaacttgttgaagttctcatgatcagctcccaaagtggaccgggtcttctatttccaaagggaggctgggagaatgatgaaactgttgaagaggcagctgcaagggaagctatcgaagaagctggagtgcgaggagatttagtgcaactgctggggttctacgatttcaagagcaagcagcccgaagcaacgtgcagagccgcaatcttcgccctgcacgtgaaggaagagctagcatcctggccagaacagagcacccggcagaggagctggctcaccgttcccgaggcggcggagcggagccgctacccgtggatgcaggaggccctcgtgacaggcttctccgcctggctcgagaactggagaaacggtggtggcggcggcggcggcggcggctgcgtggaccgaactgagagatgacaccaccttaaagcatcaggggtctctgatgctcggtagcttttgtttactttgtcgctttattacaccgccgtcttcaggatgacagtctcctcagctgatgatggcccgaggtttgttaaattgtaagcttgctgattctcgcggtcgccagctatatttaactgtcttgtattgagccttgagacaaagcaagctttgtgtatatcatgtgtcgtcgtcgtcgtggtgtaatggtgtttgcctttttttgaagaagttactggtgtttgccttgctnnnnnnnnaaaaaaaaaaaaa

SEQ ID NO: 108787 - DNA, 518 bp, Zea mays
  Clone ID: MRT4577_30707C.1
aaaaaaaaaaaaaaaaaaaaaaaaaaaaaaaaaaaaaaaaaaaaaaaaaaaaaaaaaaaaaaaaaaaaaaaaaaaaaaaaaaaaaaaaaaaaaaaaaaaaaaaaaaaaaaaaaaaaaaaaaaaaaagtttttttttttggccggaacccccttagggggaatttttgaaattttctttaaaattggggggggttgaactttttttttaaggggccaatttccccttttagggagtgttttaaaatttaattggccgttttttaaaaacttggggattggaaaaaccttgggtttcccaaatttattccctttgaaaaaattcccctttttccaatttggtttattaccaaaaaggcccaacccattcccctttcaaaaaatttgccaaccttaattgggaaatggaccccccttttaggggccatttaagccgggggggtgtggggtttcccccaaggggaaccttttttttttcaagccccttaacccccgtttttttggtttttttcctttttttt

SEQ ID NO: 108788 - DNA, 276 bp, Zea mays
  Clone ID: MRT4577_30708C.1
gtcactaaatatatcataccagcaccttcttttttatatcataatcgctttcaactacgcgtcgatggtgtttctatacggatgtctcttcccataccttacaccaaaccacaactcatgttatattccccgcatatctcggctttttttacatagacctcactgaatcattttaagcactattatatgaaacacttactatcccaaacccaaacatagagctccttattacggcctccggtggaatcttttgtgctactgactctatactatatt

SEQ ID NO: 108789 - DNA, 1099 bp, Zea mays
  unsure (1)..(1099): unsure at all n locations
  Clone ID: MRT4577_30709C.1
gctagggacagcctgtgtcccgccgtgggatcggtggaagagcgggaggcaggcatgtgtgatctggtggcccgcacgggccggcacctgcagcgctacgagaacggccatcgccttgtggccgggtgcgtccgtaaggggagccccccttccctacccccaaccaccacggctcttctccctctgccttctcgcatccacacaccaaagacatcaggcatttttatctgccctcgattcgatctgattgggtttgtccggttgcggtgcttgcttggttgggcagcttaaaggtgcataccattcagatatagggatattaatgatggagcttctgatgatgaacaaaagaaacttgttgaagttctcatgatcagctcccaaagtggaccgggtcttctatttccaaagggaggctgggagaatgatgaaactgttgaagaggcagctgcaagggaagctatcgaagaagctggagtgcgaggagatttagtgcaactgctggggttctacgatttcaagagcaagcagcccgaagcaacgtgcagggccgcaatcttcgccctgcacgtgaaggaagagctagcatcctggccagaacagagcacccggcagaggagctggctcaccgttcccgaggcggcggagcggagccgctacccgtggatgcaggaggccctcgtgacaggcttctccgcctggctcgagaactggagaaacggcggcggcggctgcgcggaccgaactgagagatgacaccactttaaagcatcagggttctctgatgctcggtagcttttgtttactttgtcgctttacagccatcttcaggatgacagtctcctcagctgacccgaggattgttggagttgtaagctgctgattctcgcggtcgccagctatatttaactgtcttgtattgaaccttgagacaaagcaagctttgtgtatcatgtgtcgtcttgtttgccttgctatggaagtgtgtttgtatcgggattcgggagtcctattgttgtcatagtcgcaacttctctgcctttttacccccggaaagatgctcttgcgaccntatattataataatttaaataattaat

SEQ ID NO: 108790 - DNA, 2616 bp, Zea mays
  Clone ID: MRT4577_3070C.1
aattcggcacgaggttccgctttctcccttactcgcgctcagcacgcaggcgacggcgtcggcgctcaggtcgggctctgggcgacggcgtcatcggcttctcctcccgcctctctccagtcgcctcgcgccctcgcctccggtcctccgcacaccggccggtgaccctgcgtgcgtgcctctctctctctctctctctcccttcccgcctccggtggatcgtcaacgccgcccggcccgggtggcagcaccgcgcgcgacctgaggggtgagggcagcgggagccagcagccgctgctccaccaaggcggtcgcgccgcttttggagcgcttatgccccccggtccgctgagcgcttagtgcagtttttttggaacatgagacctcctagcagtggcaaaaagactgaggtctcccatagcgtggggaaatgtggggtttctgatcaagcttgtcatggcaaatgccaaagctgtggcattgatgcaaaacctttttgtgctggagtgaacgaagtctccttgttgactggcagtcacactgatgtggaggcctcaaaagagaaccgtggagcatgcagtttgaacaatgatcgtgctgatgctctagaagaagaggccaatgtttccacagctaggataggtcatgttgagagtgctgaccctggtggctctgtgggtgtagaaaaggaaattttcatggctgttaatgaggagtctgagggggagcaagctggggcaacactggaggatctgtttttctttaatggtgaagaggatgatgacagtgattgggaacctgctagtcgccttgttgtgaatagatggttttgcttgaactgcacaatgccaaatgtggacaagattacatattgcatgaattgccgtgagcttccaggatctgttgtagatggatatgatgtcttcaaaaagcaaattgcacaaacagctttgttatctgctgacacagggttgctgccagtgtctacggcgattggttttgatgaaagaatgctgctccacagtgagctagaagttaaaccaaatccacatccagaaagaccggatcgccttcgcgccattgctgcaagtcttgctgctgcagggatctttccctcaaaatgtgctttggtacctcctcgagaaatcacgaaggaggaacttcttatggttcatagtccagaccacattgaaagtgtcgagcagacaaagaacatgctttacagttacttcacttcggatacttacgcaaatggacattcagcatgtgctgccaaacttgcagctggattatgtgctgatcttgctagtttgatagtatctgggcgtgttcgcaatggctttgcgctggtaagacctcctgggcatcatgcaggggtgaagcaagcaatggggttttgtcttcacaacaatgcagcagtagctgcgttagctgcaaaaagagcaggtgccaagaaagtcctcatagttgactgggatgtgcaccatggaaatggcacacaagagatattcgacggggacaaaacagtcttgtacatatcattacatcgtcatgaggatggaaacttttaccctggaactggagctgctcatgaggtgggagttcttgatggtcaaggattctcagttaatataccttggagccgtggtggtgttggagatgatgactacatctttgcttttcagactgtggtgcttccaatagcttcagagtttgccgcagacatcactataatatctgcaggattcgatgcagctagaggtgaccctctgggttgttgtgacgtcactccaactggatactcttggatgacatccctgctagctggttcctcaaatggaagattgttggtgatacttgagggaggatacaatctccggtcgatatcctcatcagctactgaagttgttaaggtcctacttggggagggtcccaatcgtgcttcatttgtagtttcaccatcaaaagaggccttgagtactgtttctcaagtcctgaagattcaacaacagttttggccagttttaggtccaacatacgcatcactacaggcgcagcaggggtcggtttcttccaatcatagtaatgagctgaagaaaaggaagcgtccaggaggaggaccagggcccttctggtggaagatgggaagcaaaaggcttctatacgaagcgcttattgagcctcgcagccgtccgaggaaactcaaggggtcaactggttcagcagcgccttagacttagatgggcagtttgctggccgttgatcttctagacatgaacagggtagctcgctgaccgcgtttcctcaagcagagtaggctgcgtttacctagaaaacctagttttggctggttacttgcatgatggtcgaccgtttcagatggagtttgacagcaaacccgttgtgttaaccatgcgtggcgtatcagccgatgtttcatgcatgctactgtctttttctttggttggtttcgtaccatagatagacgtgtgtagcgaccatcgatggaaaaaaaccttgcacatctggaacggcatgcatctcagttattagccaaaaaaaaaaaaaaaaaaactcgcggcgcggattttctgtgcgacttgactgccctgtgcc

SEQ ID NO: 108791 - DNA, 702 bp, Zea mays
  Clone ID: MRT4577_30710C.1
caagagcaagcagcccgaagcaacgtgcagagccgcaattttcgccctgcacgtgaagaaagagctagcctcctggccagaacagagcacccggcagaggagctggctcaccgttcccgaggcggcggagcggagccgctacccgtggatgcaggaggccctcgtgacaggcttctccgcctggctcgagaactggagaaacggtggtggcgcgcggcggcgtgcgtggaccgaactgagagatgacaccaccttaaagcatcagggggccccccgagccgagaagccatctgctagctatttcttggcgttgtatcttgcttggactagaattttcttccagaggctgactgcggcatacatgcatgagggctctctgatgctcggtagcttttgtttactttgtcgctttattacacaggatgacagtctcctcagctgatgatggcccgaggtttgttaaattgtaagcttgctgattctcgcggtcgccagctatatttaactgtcttgtattgagccttgagacaaagcaagctttgtgtataacatgtgtcgtcttgtttgccttgctatggaagtgtgtttgtatcgggattcgggagtcctattgttgtcatagtcgcaacttctctgcttttttacccccggaaagatgctcttgcgaccaaaaaaaaaaaaaaaaaaaaaaaaaaaaaataa

SEQ ID NO: 108792 - DNA, 351 bp, Zea mays
  Clone ID: MRT4577_30711C.1
agcagtggtaacaacgcagagtactttttttttttttttttttttttttttttgggactcaccttcgagtgagtatgtggtatttgatcctagttaagtggctttatcagactagatctgagggactgacgggttattccgatttaagtgtgtgacggcccttgaggcgtgacttaggcactatagctggaataattcgggcagttctgccagaacactagattctataatcctatttaagaataccatttagttgagtatacccagctgactttatctttacaaagctctagcccgcgtactctgcgttgttaccactgcttaagggcgacatccagcacactggcggcg

SEQ ID NO: 108793 - DNA, 615 bp, Zea mays
  Clone ID: MRT4577_30712C.1
cccacgcgtccgcccacgcgtccgcccacgcgtccggatattgctaattcatgggcaggaatttctcgtaggatcacaaggagtttaagctcgtcggctgcagcagtctcattgccatgtgatgctgaggaaaagagaggggctagaaaggtagaaagctcagtagcagctgatgtgatattggccaccctcgttggaaaaaagaggaggaagacatggtgcaggcctaaggccagggaggaacttcctgccgcagctctaggcgaaaggggtagctcgcagaagagtgatgttggtggcggttctgttgatcatggtgcttttcaagagttgtgtgcagatgctccagtgatacagcccgggacaaaagtggtgattttgtgtgctgaaagtggggttgaaagtcggaataatcctactgagggtgaggaaaaagaggaggtggtagaagcagccacttacaggaaacagaagcggaagatccaggagaattctgaggatatttgtgccagtgcgccgtctggaatttctcataggaggacgaggaagtcaagctcgtccccagctgctgttctgttgtcccctgctgttgagaagatggaagtggcagatgat

SEQ ID NO: 108794 - DNA, 430 bp, Zea mays
  Clone ID: MRT4577_30713C.1
tccaagtccgcccacgcctcacgttacaacaagatcatttcatttactttttctaattccctagcaactgtctaagggaatctgcttctacaaacagggggttgactatatttaattcgagcccatccacaaactcaaatttgtaccaccacaaccaatctaacacatctagcctgacctcttcactttcaaacatgctaataccatcataatctatattttccattttatatagctttccctctaagatagatgtgatcttcatgaaccaagttcatccatctacagatattaatgttccgatcatacctttcgtttgttgtacagtcatttacgtgcacttaaacttaattatttttcataatttattcaactttccttttgtccattcattattatactaattttataatcagttccttttcaattt

SEQ ID NO: 108795 - DNA, 309 bp, Zea mays
  Clone ID: MRT4577_30714C.1
gtaagcaagctaacaaatataaaagcaattcaaatgacccctagacagtttgcccgcagccgatgacggcatgaatagggcatgttattttacggcaggtctaaaattattcatggcatactaggggaaagtgggatggaccaaacagacattcattgatttattctcaaggtccgagaaccccaccgagtaaacaattggttgggcactacacaacacaggggctctgtatgggagtcaggggctccttgagggatggcatgggagcatgggagggatcacaaatactggtagaagatctggatgcgg

SEQ ID NO: 108796 - DNA, 761 bp, Zea mays
  unsure (1)..(761): unsure at all n locations
  Clone ID: MRT4577_30715C.1
ccggccgggttacacctcatggtgcattcgcagagtatgccattgcgcactactacactactttccacatcccagactccatatcttacgaggaggctgccactattccacttgctgcttacacctctgtgtgcgctttgttccaagagctgcaacttcctgacccttggtcaccgcttgccaagttggacgagaagcgtcctcttctcgtgtatggagctagcacagctacagcagcttttgctatcaagcttgctgctgctgccaatgtgcaccccattatcgctgtcggaagccagcgaagcgaatttgtcaagcccttcctagacgagagcaagggcgatttgttggtcgactacactcttcacgacaccgaagacaagcttgtcgctgctatccaggacgctatcaagaagagcggtgcccccgatggtcgctgttgggtagcctatgatagcgtctccgaagactcaacagtcagactcgttacaaaggctatcgctggtcctcccgacgccaatggtcgcaagccaagaatgacaaacctcctcatgaagtcgaacgtcgagggcgttgaccccagtgtcgaaattgtccacacaaaggttagccaggtgcacgagaagaacgagaaggatcagatgctgggcttgacatgggctgctgcgttctctaggggacttcgtgagggctggctgactgcccatccgtatattgnntggaagaatggtctgcaaggactttctgaggnctcgttgcct

SEQ ID NO: 108797 - DNA, 633 bp, Zea mays
  unsure (1)..(633): unsure at all n locations
  Clone ID: MRT4577_30716C.1
ccggccgggctgccctccgtaggcgatgaggggaggccaaggacgagtgtcttttcgtgcccgcaggccattgccactgctcacgagcctcccgcctcgcgctgccctgccctctgcggctctgccccaacgagccccaggagagccagccatccagctgcattatttgcacattatagagttcttaaatgcttccaatgaacaaactgatgtcaagaaaacaaaaaggatgaaaaacaaaaaggattcaacgaggctaaagccacgcctttcatgcaactctgtacaaaattctggaggtcttgaagatttgtccttaacagtttatattgtcagttttacaagagcatatatctcactacactggttactgttcttggatttgaaatttctattggagttgttgtctggaactctggatagcatgatgtggtaagagcagctgatgataagataatatatatgttgctcatgtaaaggagaagtgtagaataaaaatgtctcgacttatagtgagttcgtttttccgaaaaaaaaaaaaaaattagttggtttgaccacggttgaaggaatctgatactgctaccgagacatgagagactatgcactanaaaaaaaaaaaaaaaagcggcc

SEQ ID NO: 108798 - DNA, 219 bp, Zea mays
  Clone ID: MRT4577_30717C.1
gcaaccaatattttgattttttttgggaaacacacgtgggtttgagggcaccattttcgagtacatctcatttgtaatttaaaagatggcacctgcaacgaggggttgctgcctcgacaagtgcaggatccaacaaaaagaactggttgaatggtgacaattgttgttatttgaagaagggggagtccagtgggttagccattaccaatggtttaataa

SEQ ID NO: 108799 - DNA, 462 bp, Zea mays
  Clone ID: MRT4577_30718C.1
ggccccgcggctccgaagccgaagcctgcggccgccaagccgaaggccggcaccggtgctgcctgccacccgccttactttgcgaggatcaaagaggctatcacagcgctcaacgagaggaccgcatccagctcgaaggcgaccgccaagtatgtcagagacaagcacagagcgtctctgacggccaactcaaagaagatgctgtccatccagctgctgagctccacacacaagggcaagctgataaagggcaaggctccgtacaaactgtcggacgccgtcatgaaagcatcgcccaagaccaaggctaagacaacacaagccgacggtgccaagaccaccaggcccaagcgcgccaaggccgtcgccgtcaagtcaaacaacgcagcgattgccaacccaaagaaggacgttgctgctgggaccaagcacaaagtgcccgaaaagaaggacaagaccaag

SEQ ID NO: 108800 - DNA, 225 bp, Zea mays
  unsure (1)..(225): unsure at all n locations
  Clone ID: MRT4577_30719C.1
cccccaccctcctccctagggctcctcaccgccatgcttgcaagaaggcagaggagcttgcacctcggngaggagggtggcgccnccnccgttcaccaccgcgtcagcgtcgtcggcgcggcatgggcgtgcatggccatcttctgcggcggcggcggccgccgctctcgcgagcgtgagcgcctcttcttgaggctccagatcctgatgcaccaccacctccac

SEQ ID NO: 108801 - DNA, 549 bp, Zea mays
  Clone ID: MRT4577_3071C.1
cgagtacaagctttttttttttttttttttttttttttttttttttttttttttttttttttttttttattatttaccaccccccggggccgccccaaaaaagaagaccaccacaccaggggccgccactaagggacccaacctggggaccaaaaaggggggaataaaggccaaaaaaaattcccccgggaaaaaaatatccccccacaacaacacccaaaaaaaaaaccggaaaaacaaaaaggaaaaacgggggggcccactaaaggaagaaaccaacaacaaaaggggggggcccaaaacccgcaatccagcagggaaaaaacccgggccacccgcctaaaaaaaaaagccaaccccccgcgaaaagaggcgcgcttaaaaggggcccctcccccacctccttaactaaatacttgggctggggggatcggctgcggcgaacggcaataccccactacaaaggaggcaaaaaagcggtccaccacacaagggggaaaccccgggaaaaaacaacctggcaaaaagccgccccaaaaacagcaacca

SEQ ID NO: 108802 - DNA, 341 bp, Zea mays
  Clone ID: MRT4577_30720C.1
tccccctcccccctctttctgcgaaaaccaaccccaccaatccactcactgcttactacccccaaccacctcctccattcaatctaccgccaccattgcattttgctgcttctttacaacagccacctctaccactattcatccaactagccaactgagccctgcttccatcttcccacaacaccaccttgttgcccgccccacctgcactcttcgcctaacgctgccaccctcttacaactgcaacacctgctgacattcatcccaaatcccttccacaaacccaacaacgttctaccaacaacccatcatcggttgagccctcttttagattgcttatg

SEQ ID NO: 108803 - DNA, 590 bp, Zea mays
  Clone ID: MRT4577_30721C.1
acgcagtcgccgccgctgcgggtgtgcgttgccaatgcactcgccgccgccgctcaaatctcccctcccaatggcaccccgtcgctcacgatcaaatatttcctcccctataagtgcaagatcgccaacgaggagatattgatggcgctattggtggacccacctgacatggggagggagatgcttattgagatgcaccatctgctgcggcgtaggcatcgcagacggcgtggccgccggattggccggtggacgggcgctcgctcaatcctccatcgctgcccactatatcagtccagtatgtgagtcatattgatttttataatcgattttatgcgccagttcttgcctcgactaatgggtcctcttccattttgtaatcacctctgcatgtttactgtatcactttggtaaattactattgttccatgttgtcttccacaacatactggactggttcagtggttagtttcctattcaaccatttcataatgaaggatgtattggtatttaggtaaataattatttatgattgtgctggtattatctcaatagactggaaaattttaaataacctcatatgacataaa

SEQ ID NO: 108804 - DNA, 1358 bp, Zea mays
  Clone ID: MRT4577_30722C.1
gacgacccgtacgacccttacctctgcctttccctcttctcctcctatccctaacgcagtcgccgccgctcggctctcccttgccaatgcacacatgcactcgccgccgccgctcgactctcccctcccaatggcaccccgtcgctcaccatcaaatttttcctcccctacaagcgcaagatcgccaacgaggaggtatagccatctggcacacctgccactgtccctttgccatttctggtcctagatctgcgttacctgcatttttctttgccacgggatcgggatggttgaggagcagctggtggggatcaacatcttgcttcagatatctattctcgtgctctcgtccgtgcgtccgtgattcgtccgctgcctttcccttttctcctcctatccctaacgcagccgccgccgccgctcggctctcccttgccaatgcacacatgcactcgccgccgccgctcgactctcccctcccaatggcaccccgtcgctcaccatcaaatgtttcctcccctacaagtgcaagatcgccaatgaggtgatattgatggcgctgttggtggacccacctgacatcaagagggagatgtagatggagatgcagcccgcaccaccaccatctgctgcggcgtcggcatcgcagacggcgtggccactggattggccggtggacgggcgctcgctcaatcctccatcgccgcccactatatcagtccagtattagagcgctaggtatgctctctatgcctacgatgatttatatgaggatgacttagataaggaggtggatcacatgtcagtttcgagcaaggtgtttggactggaatgcgcacagtctgttactttgatggcaaaacgtatgaattggttggacagagccgccaacgaagtaccatgggtaaggatgtgctggacaatgaaagcttttgtcttataacaataggatacaagaagcttgcaagtggttttgtgaaggcttttgtgaatcacttgaatcattagttcttttaagaatggttttgtatagcgttagcaaatatgtgtaaaacacattaagatgtgtggcaaattcagtgaaaaaaaattcgacgcgtgggtagtatgtgagtcatattgatttttataatcggttttatgcgccagttcttgcctcgactaatgggtcctcttccattttgtaatcacctatgcatgtttactgtatcaatttggtaaattactattgttccatgttgtcttccacaacatactggactggttcagcggttagtttcctattcaaccatttcgtaatgaacgaggtattggtatttaggtaaataagcaaaaaaaaaaaaaaaaaagaggcggcc

SEQ ID NO: 108805 - DNA, 289 bp, Zea mays
  Clone ID: MRT4577_30723C.1
ttgttcttgaccaactggcccttccgcacccggagagatcttaagatcataccgggctctggaaaattcctggcgctctttggactcctttgattaagggctaccacaggactacactccttacagaccactgtcagagactccttcactcgggttgactcaccttgtccaaacagatgatcaacttctgcactcaacctcataatcacgaagggttcacacaggagatccactcacataggttcactactaaacaggactacaggctctaaggaccatcagacaattt

SEQ ID NO: 108806 - DNA, 270 bp, Zea mays
  Clone ID: MRT4577_30724C.1
gacggccacttacaacgtacacaatgttttgtatttcttaccacccacgccccatgtgcggcctagtattttgcactgggatcccatactgctcattcaacaagagcctgctactcgactttggtttccacaatgctcacaacaaaccctctctttggctacagccacgaaattttaatatccaacatattcaaccctacacaccttaaagaggccattgcatggaccacttttaccagacacataaccattagcccttgacaaacatat

SEQ ID NO: 108807 - DNA, 401 bp, Zea mays
  Clone ID: MRT4577_30725C.1
aattaaaaaaaaacaaaaaaaaaaaaaaaaaaaaaaaaaaaaaaacacaaacaagagaaggggataactttatatatgaaacaacctaacatacacttctctaaccaatccatatacatcctttttacttctttaactctattcaatacccaccttaatttaccttcctcacattcctttttccccagctatccctattttaattatcccccatccctctccccctttcccacacttgcacatcccttattgttacttccactccccccttttctctttctttcaccccctctccttgtttatttttcacgccactatttcccattcctcttttcatcttccttactcctcttttcctctccttcttcccctttctcttttctcttctcttctacctcttt

SEQ ID NO: 108808 - DNA, 290 bp, Zea mays
  Clone ID: MRT4577_30726C.1
gaaaaagaaatagcacgaattcctattgacttgaatgtaaacccgggagcatctattgcgctaccacccgaagtgagcacccaagctaatccatgctttgcagatgtgcttcgaagaaattcagaaattcaagacaactcaaagcatattgagctcaagacagatttagttgaacatatatggcatcgatatggtccaaagtagtatgaatattgtaattttaatttcgtgttacctaaattatatattatttatgtaaatattatgagtcaggcacaatacatctttgc

SEQ ID NO: 108809 - DNA, 157 bp, Zea mays
  Clone ID: MRT4577_30727C.1
actcgtgtcacgtgaattccatcatacacacggggggttcctgcgagcccaccaattttaactatagagagcataattatagaaggtggttatgatactcatatatgatgcctgcacaagaaaaatatacgatcacgcttcacaacaaaataccagc

SEQ ID NO: 108810 - DNA, 483 bp, Zea mays
  Clone ID: MRT4577_30728C.1
gcgttctacgcgaaggccggccagaccacggcgaagtgatcaaggaagggcagatgacgcgcgtgctcgagacggccgaagccgggttgatcgtgctgcccgagcacgactatcaggtgttacggcgcaggggcgacgatcaatacggattttgatccacggggaggaaaggtcgatgtcgatattcgagattgcgagttggattgccttggggacagtgccgattacggcgctggttacggtcgtgcggtcgatctacaccgggaactggatatggacgcgattcctgttgctgcccgtcatcctgacggcattgcttctatgttttgacatgacgcgcccacaacccgtgacaatagtcaacctgatcgctgcactcccgttccttcttgccgcattttgcttagtcaacatgttggcgggtttgtgcacgggtggcttgccggagacggagacgatcaaatgaaaacgactgcccgctac

SEQ ID NO: 108811 - DNA, 364 bp, Zea mays
  unsure (1)..(364): unsure at all n locations
  Clone ID: MRT4577_30729C.1
gtaagctttgggatccctcttagagccgggccgcactcttttttttttnttttatgagattaaatggccccanatactgactgattacaatagccggaagagtctttacaaaactacgggatatcagtaaggtgaactaattatttttcctcgccaccataccctgactacaaaacgccccctaaataagctcgaactcctgggtggggacttcctcctgggctacctactcttcaccagaatccgagatgatgatggcgcactcacgaagaggggcgcagacggtgctccgacaagaattggccccggttgaatcggcattccagccctatatttccaacgggtagtcacacgatgtctttgg

SEQ ID NO: 108812 - DNA, 406 bp, Zea mays
  Clone ID: MRT4577_3072C.1
aaaaccccaaccaaaaaatggattatttcaagaaaacccccccccctatgggggcccccataccgggccccccccaaagggaaccaaaaaaagggcccccccaaccagggggggccccccccccaaggggggggccaaaaaaaaaaaccggggggagggcaacaaatggtccccccggagaaaggcccccccccagggggtacccccccccgggggaaaaaaaaaccggggcccccgggggaggccccccccaaaatccccccccaccaattgggtaaaaggaaacccccgttccaaaaaagccccagggtttcccccacctagcggaatcaaaaccgggccaaactggggcaacaaccggggtggcagggttgtagggccccaaacccccacgggggggccaaaa

SEQ ID NO: 108813 - DNA, 528 bp, Zea mays
  Clone ID: MRT4577_30730C.1
ggctcgaggaggaattattgttttccccacaaaggaggaagtgtaggtacagattcaggtcatagaaaggcccatatgtcccaatattatttctcttacagagaaaacagatgaaattgacaattttttttgtctttccacagaccatcaccggcctcctgcaagagtttgatgtccaggcaagtagaggatgtggctttccttccccttcctcatcccgtcttctctttttcctttttctttccattggtttaagtagatcattgtgcaaacattgcgggcaaggggagagaaggcagtggtctcagctaggtcctcaccctcagctgctgctcccagacagaagctgacttgagtgctggccagagaatcaggaaccagtcacttcccacgaaagcaggacagagacaccgcctgtttcagtcccaaagagctggccagaacggtggggcgtgtgtggggaaaatggtgtgatgctgggctggcttgggaccctgtgaggggagggaacggaagcaaaagcttgat

SEQ ID NO: 108814 - DNA, 497 bp, Zea mays
  Clone ID: MRT4577_30731C.1
cttgacaactataggaaattcccaatgtttgcagtaagaacattttttagcaagtttcaaatttgaaaatctacagtttacaactactgtcaagtgcttatctttgttagtaatttgttatcctgtgggactcttttgttgatcacaccctatggcctgcatttagtctaggaaaacttcaggtagggaaaattacttattttagtttttgtttagtttttcaacatgtcgctatgcaacaattgacgacctgtacaactcttgaattgttgatgccttctttgaaatagacatttcacattctggttggaacactctttctttggtactccacttgttttccaacacttaaggagtcatctctattcattttaggtgttaagcaaaatggaagtgtattatatttctttcacagaacatttaagacctacaacattgggactaggaagtgtcgaaggataaacactaatgatgctgatgtccattggcacaacaca

SEQ ID NO: 108815 - DNA, 318 bp, Zea mays
  unsure (1)..(318): unsure at all n locations
  Clone ID: MRT4577_30732C.1
ggataataacaggnacctattcaggctttaaggcacatccgccacagttgggaggcgaatagcaagctgctcgggaggtgaccattcgtcccggcgggacggctcgttggcatgggcgacggcgaccaatcgacacgggcaaaggcggcgagctaggcaaggtagcccgtcaagccccgagcacctctcgtcctctgtgggccaccgcgccgcaaccatgctgtgtaagagaagagcgcgccggtgtgacgcgcgtctctcctgcctcgggatggaagctctgacaccctcttgtcagaagtcctgctccgtctgccg

SEQ ID NO: 108816 - DNA, 1078 bp, Zea mays
  Clone ID: MRT4577_30733C.1
accccaaccaaaatccacccccgaactaggtcatccatgtctggcggcgggcaagcagcggtctcgttcctgacgaaggtcgcaaaggtggctgccgggttgggcttgacggcatctgccgtctccacgtccctctacacggtggacggcggccaacgggcggtcatcttcgaccgcttccagggcgttctcccggcggtcgtctcggagggcacccacttcctcgtcccctggctccagaagcccttcctcttcgacatccgcacgcgcccgcacagcttctcctccacctccggaaccaaggatctgcagatggtcagcctcacgctccgcgtcctcgcccgccccgatgtggaacgccttcctgaaatcttcaccaacctcggcctcgactacgacgacaaggtgctcccctccatcggcaacgaggtgctcaaggcggtcgtcgcccagttcaacgcagaccagctcctcaccgaccgtccccacgtctctgccctcgtccgtgaagccctcgtccgccgcgccggcgagttcaacatcgtgctcgatgacgtcgccatcacccacctcgcctacgggcacgacttcgcccaggccgttgagaagaagcaggtcgcgcagcaggaggccgagcgctccaggttcctcgttgcgcgtgcagagcaggagaggcgtgctgccatcgtgcgcgctgagggagagagcgagtccgcgcgcctcatctctgaggccacggcgatggctgggacagggctgatcgagctcaggaggatcgaggcggccaaggagattgccgcagagctggctcgctcaccgaatgtggcatacattccttctggggaaaacggaaagatgctgcttggtctcaatgctactggatttggccggtgattcactgtttttttagtctgcttgtgctatgtgctgatgcatgactaaaacggaggttcgaactttgaaggacagtgatatctgctatccttgcttatgttaagttttccttgtcttggaaccaaaaaaaaaaaaaaaaaacccgaaaaaaaaaaaaaaaaaaaaaaaaaaactcgagaggggg

SEQ ID NO: 108817 - DNA, 1129 bp, Zea mays
  Clone ID: MRT4577_30734C.1
cattgggtacctcgaggccgcgccgggaaaaaatacaaaaaaaaaaaaaaaaaaaaaaaaaagatccgcacagcgacgccgccagccagacccgatcccctccctcgctagggttttcgtccccgcgccgccgcgcttccggatcccaccgaaacaaccatggccggcggtcccgcggcggtgtcgttcctgaccaacatcgcgaaggtggctgcggggctcggagccgcggcctcgctcgcctccgcgtcgctctacaccgtcgacggcggcgagcgcgccgtcatcttcgaccgtttccgcggggtgctcccggagaccgtcggcgagggcacccatttcctcgtgccctggctgcagaagcccttcatcttcgacatccgcacgcgcccgcacaacttctcctccaactcggggaccaaggacctgcagatggtcaacctcacgctccgtctcctctcccgccccgacgtccagcacctccccaccatcttcacctccctcggactcgagtacgacgacaaagtgctcccctccatcgggaacgaggtgctcaaggccgtcgttgcccagttcaatgccgaccagctcctcaccgaccgtccccacgtctcggcgctcgtccgcgactccctcatcaaaagggcccgtgagttcaacatcatactcgacgacgtcgccatcacccacctctcctacggcgccgatttctcccaggccgtcgagaagaagcaggtcgcccagcaggaggctgagcgctccaagttcttggtcgccaaggccgagcaggagaggcgcgctgccatcgtgcgtgctgagggagaaagtgagtctgcacgtctcatttctgaggccaccgccatcgctgggacagggctgatcgagctcaggaggatcgaggctgccaaggagatcgccgcggagcttgcccgctcacccaacgttgcctacatcccctctggtgacaacggcaagatgctgctcggcctcaacgctgctggattcggcggccggtgatttaccactccagttttacttgcccaaacatatcttgtgtcatgacggactaaactatggtttggagagacaatgatatctgttgctgtaggtctttaagtttgaatatctt

SEQ ID NO: 108818 - DNA, 1612 bp, Zea mays
  Clone ID: MRT4577_30735C.1
gggaggagatgcggcgtcccgtgcacgccttaaaaacgagatccctggggtcaccactggtcaactgcgtcactgcgccgaatcactagaaaccccaacaaacggaatttcacacatccagcgagcaataccgcaccgcaggtaagatcaaagaggaggcgacattgggtacctcgaggccggccggggcgcaagcgcaataaaacccctgcaaaaacccgccactctcagatccgcacagcgacgccgccagccagacccgatcccctccctcgctagggttttcgtccccgcgccgccgcgctcccggatcccaccgaaacaaccatggccggcggtcccgcggcggtgtcgttcctgaccaacatcgcgaaggtggctgcggggctcggagccgcggcctcgctcgcctccgcgtcgctctacaccgtcgacggcggcgagcgcgccgtcatcttcgaccgtttccgcggggtgctcccggagaccgtcggcgagggcacccatttcctcgtgccctggctgcagaagcccttcatcttcgacatccgcacgcgcccgcacaacttctcctccaactcggggaccaaggacctgcagatggtcaacctcacgctccgtctcctctcccgccccgacgtccagcacctccccaccatcttcacctccctcggactcgagtacgacgacaaagtgctcccctccatcggcaacgaggtgctcaaggccgtcgtcgcccagttcaatgccgaccagctcctcaccgaccgcccccacgtctccgccctcgtccgcgacgctctcatccgccgcgcccgcgagttcaacatcatcctcgacgacgtcgccatcacccacctctcctatggtatcgagttctcgctggccgttgagaagaagcaggtcgcgcagcaggaggccgagcgctccaagttcctcgtcgccaaggcggagcaggagaggcgggcggccatcgtgcgcgctgagggagagagcgagtccgcgcgcctcatctctgaggccacggcgatggctgggacagggctgatcgagctcaggaggatcgaggcggccaaggagattgccgcagagctggctcgctcaccgaatgtggcatacattccttctggggaaaacggaaagatgctgcttggtctcaatgctactggatttggccggtgattcactgtttttttagtctgcttgtgctatgtgctgatgcatgactaaaacggaggttcgaactttgaaggacagtgatatctgctatccttgcttatgttaagttttccttgtcttggaactaaatgtgtctgttgtgctccaaataagttttggtttttgactgcatatttgcaattggtagggttaatgcgacattgtgttaagcctgcatagtgcattctaattttcccttacattgcctgttaaaaaaaaaaaaaaaaagcggccgaactggtccgtgaagaagggaggtgatttcattggtgaagttattgctgtgatgctcgtcaaccttggtgttccctgggccatttttggacactctgaacggagagctctgctgggagaattaaatgaatttgttggagtcaaggttgcgtatgccctg

SEQ ID NO: 108819 - DNA, 711 bp, Zea mays
  unsure (1)..(711): unsure at all n locations
  Clone ID: MRT4577_30736C.1
gggaccctcgaggccggccgggccgggtggagcctctgtacaagaaggtgtcattctcgttcatgattcccactcttatcttcctgggcgttctctacgcgtctgtgtcggcccgtttcattttcttccgcatcttcgacaacacccgccacaagaacgagcacactgttgtcggttggggcgtatgggccgctattctcctggttacctggatctttgccttcatcattgccgaagtcattccgttcttttcggacctcctctccctcatgtcctcgcttttcgacagcttcttcgggtttatcttctggggcgtcgcttacttccgcatgcgcaaggttgatggcggccttgagcttgtcaagcagggcaacatccgtgccatcctgatggctatcctcaacgtggccattatcctcatcggcatcttcttcctcactgcgggtacatatgccagtgttcagagtattgttgatgctttcaatgctcaccaggtcggcggcgtcttcacctgcgttagcaacggcttgtaagatggaaggaagatcttgggtctcaccaaagtcgactcgcctggagaataccacatacataattgggaagcaattcttaaaaattggatcgcggtaattcgggccgttgcttttggatattatacttctattatatcgntttcttagcaaaaaaaaaaaaaaaaagggccctagggcc

SEQ ID NO: 108820 - DNA, 461 bp, Zea mays
  Clone ID: MRT4577_30737C.1
tgggaccctcgaggccggccgggccgggactagatctctatctacgattatggtgaatcgtactggatcccctatcgtgaaccgcatgctaggtgaagaagctgcatgaatccccagcagatgagctgttcgagtcggcatgcctctctcccgagagaccaccaacctcctgaacaccgctagagacgatgttgttgcgcatgtgtgatcatgatatgctatgttgagctgattcctgtatctactgagctaaagaaagactgttctgtttacgaagaacgccgacacataggctttgcttagacacggatagaactattgctttgcatagatgacaacatactgaagaaactgaaggagtatctctggtcgctggaccgataaaatggactcgaccagataataaggatgtgagagtatctccaatgattatctgctgatcatgtgtgatggtgatgaca

SEQ ID NO: 108821 - DNA, 282 bp, Zea mays
  Clone ID: MRT4577_30738C.1
gtgcctggtttaatttaaagaacggtccgttccttccctaggggggggcctaaagaacataactttttgtccccaaaaacactttcctatgtccaaagacctcggttcaaaaacgcggggagcccggaaattccctaaaacccttttggggggcctttatacccggttttcccgccctaagaacttacgttccttcggatactggatgggggcccaccccccaatttgtcggtttccatttgtccatgttggcccagacatttggtcccccctctcatttgt

SEQ ID NO: 108822 - DNA, 105 bp, Zea mays
  unsure (1)..(105): unsure at all n locations
  Clone ID: MRT4577_30739C.1
ggcacgaggaaacgagttctctccagaagaggatgctcatgttattggtgactgtattaaggaagngacaaggnaagaagantttatgagataagnagggagata

SEQ ID NO: 108823 - DNA, 499 bp, Zea mays
  Clone ID: MRT4577_3073C.1
ggcccgggccggggaaacggcctacgggacatcaccaccttgggaggtgagctctgccgcaacattcatattcttccaggcgcggggacggacggcggcgacactggaggccgaagtgcctaggcgtgctgcgctctccgaacggagcctgctcccacatcccaacgccgagacaaggagataaatatttcatttacaggggaagatgccaaagtcatgcagttgctatggcgtctgtcagcagctagatccagacaaaggagcgtggagagcttgatcgaccagctgagaaaacatactcctgccagccagtctgaatctgcagtgaagaaatcgcggaaaaagggacctgcataccgtgtcattctgcacatatgagctctacaacatgcgcacagtacggtggagaggaactgatgagatataaccgtgccaagaccgaaggcaacgcgtgggaacatgatgcaggatggacacgtgaatggactgtaaggggtga

SEQ ID NO: 108824 - DNA, 352 bp, Zea mays
  unsure (1)..(352): unsure at all n locations
  Clone ID: MRT4577_30740C.1
ggaataatatatagggcaaaaagatgtttgngaaaaaaaaaaaaaaaaaaaaaaaaaaaaaaaaaaaaaaaaaaaaaaaaaaaaaaaaaaaaaaaaaaaaaaaaaaaaaaaaaaaaaaaaaaaaaaagcttaaaaattctaaaaggtcaaatgcttgaaaataccaaaaacattagttccccaatacactatacagtttaaaggccccaaataccccctaaaccaaagaccaattaaaatcccatggtaatacaattaaaaattccgtgaaattgaaaaaaccaaacccgtaaaaaaacctaaaacccttacaancccaaccccattccccaagttgcccctaaaaactaaa

SEQ ID NO: 108825 - DNA, 482 bp, Zea mays
  Clone ID: MRT4577_30741C.1
gagctagtgagcttcatgcgcagcgcgcgcgtgcgcgggtactctctagcgcgcgcgccctttttttttttttttttttttttttttttttgcagcgaaaaccacgctatatagcttgaaaaaccaatattttgtgatcaaatacatttcatttccaaagctttactcttattgcgtggggaagggctccaaattatgacaactagtttcaagaaacgcatgctccatactggactagattagtgctaaggttgtccattaactaatttaggacattaacgcaagttgttccaatggctgaatgggcactgctgtttcttgggcgctacagcaccacccggaatgaactgggccacctggtgggcctgctggcgcccatggaggccctgccaccatgcgctcacctgccttagcgcatcgccaatagccgactactttagggtcatggggcatttcaacggggggaaggtgctccctgccgc

SEQ ID NO: 108826 - DNA, 315 bp, Zea mays
  Clone ID: MRT4577_30742C.1
gggcaccaaaaaaaaaacgacctttgaaatgagcttgggtacaaaaaaaataccccattggggccctttaaaaattgcattttaaaaatactttagctaattccaacaacttttggggccctgcaaacctaaccattaaacttttttttttccaacggccccccccaagtttggaaccaaattttttggggatgggatttaaaaaaaaaccccctttttaaagccaaatttatttttgccccttataaactttaaaatttcaaaattgccccaaccttttttttacttttttggcaaaaaccaaaaatttttttc

SEQ ID NO: 108827 - DNA, 398 bp, Zea mays
  Clone ID: MRT4577_30743C.1
aaacgaaaaaaaccccccccaatattttgtttttttttaaaaaacccctcgccgggggaggggccccattttcgagtacatttattatgaaaaaaaaaaaagggcccccccaacaagggggggctgcccccaaaaaaaaggatttataaaaaaaaaccggttttatggcaaaaattttttcttttttagaaaggccccacccaaggggttaccccctgccaagggataaaaaaactggggccgctggggaaggcccccaaaaaatttccaaataattagggggttaaaaggaaacaccttttgaaaaaaagcaacagggtttcccacatttagctgatttaaagcgggtacaatttggtgcaaaaatttttgttcaagatttgtaggggcattgcccc

SEQ ID NO: 108828 - DNA, 322 bp, Zea mays
  Clone ID: MRT4577_30744C.1
gttgaccaagatctgtgatggcatcctcaagctgcttgagacccatcttgggccgacttccactgacgaccagttcaatgtcttctatgtcaagatgaagggtgactgctacagattccttgatgtgttcaagactggagctgtgagacaggacgccgttctaaacacgatcgtggcatacatagctgcccatgacattgctctggctgagctcgctacaactcaccctattgggcttggactggctcttaacttctcagtgttctactatgagattctgaacgcacctgatcctcacctgcatgtctagcaaagcatgctt

SEQ ID NO: 108829 - DNA, 1329 bp, Zea mays
  Clone ID: MRT4577_30745C.1
atggacaaggatcaccagggggctgcgcagaagcgccaggcggctgtcaggctcgttgaagccaggccgaagaggcagcgggggtcggcgaaggctgcggcccccggcagaggccggccgccgccggcggcgaagtcgggcgtccctgcagctagcaaggcgtcggaggcaacggcgaaggcggtgccgccgtccggcggagtggcggaggtcgcgaaggcggcgcgagcgttgccgttgtcgggcaaacgtgtcgccgacttcgccactgatattagtgtggatgatttcttggtggtggctgacttcgccagccgcactgcgtctggggccctcacggcagccgtggctgccgaagtcgagagacttcggacgcaacatgctgacggcgttcgtgagaagtcggccgccgacagcaagtgtcgcaagctggcggacaaggtgtccacgctggagggagagaaggttgacctccggcgccagctggcggaggagaggagggagaccaacgaggccctcgtcaaggcgcaggctgcgcaggcggaggctaacctggcacgggcggagggcaatcttgccagggagcgcgccgagcagttgcaggagcggctcaccgccctggagagccgcgtggggagggccgaggccatgtcgcgcgcagaggcggagcggacgcgccagctgctcgtggatacataccgcgggctgggcgcggggaccggtgatttcgaggtgccggaccgggagcccggacttcgctgtctggagtgggtgcaggaggagctgcaagcactccccactgtcatggagggctttatggcgtatgcctccctggtcaccagcgagggggcgatgaacgcgctctcccgcgaagggtgccggcacttcgaggtcttcgaccaagccgatgaagatttcgagcgagatatctttaaggttgaggaccccgtagtgaaggagtccgccggagccctctacgaccggatgtggggtctgcatggtcgcgaggtggtcagggagcgagccgagacggcgagggcgcaggcgttgcgtggcgagagggtggacgacttcggggcattgaacagcatgctgtctggcccggagccgaccccggggatcgtagaaaacgcgccgggtgcccccgcagccgccgcgacctgcgaaggcctgcccgcggaggccgccgaaggcgcgcctgatgccctcgcagccgcggcgccgagtgctggagatcccgcagcggtggcggcggaagcagcagcggagacaacggcggagccaacggcggaggctcccgcaacgtcagggccgtcgcaggtggcgtag

SEQ ID NO: 108830 - DNA, 1515 bp, Zea mays
  Clone ID: MRT4577_30746C.1
atggacaaggatcgccagggagctgcacaaaagcggcaggcggccatccggcttgttgaagctaggccgaagaggcagcggttgggtgcgaaggctgcggcccccggcggaggcaagccgccgctgccggcgaactcgggcgcccctgcatctagcaaggtgtcggaggcaacggcaggcgccgggggctccaaatcggcaaaggtggtgccgccttccggcggagtggcggaggtcgcgaaggcggcccaagcgttgccgttgtcaggcaaacgcgtcgccgacttcgccaccaacattagcgtggacgactatcttgttgggtcggacgaaggccaacttgctatagttgcgcctgtcgcggcgaccacgacggccgccgtggtgccgaaggcgaagggcggggctcttagcgccgggggcgaggcgtcggccttcgcggctgtggctgacttcgccgaccgtacagcgtcgggggccctcacggcggctgtgtctgccgaggtcgagagacttcggacacaacacgccgacgccgtccgcgaaaaatcggccgccgacagcaagtgccgtaagctgacggacaaggtggccgtattggagaaagagaaggctgacctccggcgccaactggcgggggagaggagggagaccaatgatgccctcgccaaggagaaggctgcgcaggcggaggctaaaatggcgcgggcggagggcaatattgccagggagcgcgccgagcagctgcaggagcggctcactgccctggagagccgcatggagagggccgaggccgtggcgcgtgcggaggcggagcggacgcgcaaacagctcatggatacataccgtgagctgggcgcggggaccggtgaattcaaagtgccagaccgagaggccggacttcgctgcctggagtgggtgcaggaggaattgcaagcgctccccactgttgtggaggggtttatgtcgtatgcctccctggtcacctgcgagggggcgatgaacgcgctctcccacgaagggtgtcggcacttcgaggtcttcgaccaagccgatgaagatttcgagcgagatatctttaaggttgaggaccccgtagtgaaggaatccgccggagccatctacgaccggctgtggggtgcgtacggtcgcgaggtggttagggatcgggccgagacggcgagggctcaggcggcgcgtggcgagagggtggacgacttcggggcgttgaacgacgtgctatctgacccggagccaggcccggcggaggccgtgcctgggcccgtcctggggccgaccccggagactgcgggagacgcgtcgggtgcctccgtagccgctgcggccggcgaaggcctgcccccagaggtcgccgaagtcgcacctgatgcctccgcggcggctgcgccgagcgccgtagatcccgcagcggtggcggcgaagataacagcggaagcagcggcggagccaacggcggaggctcccgcagcgtcagggccgtcgcaggtggcgtag

SEQ ID NO: 108831 - DNA, 2874 bp, Zea mays
  Clone ID: MRT4577_30747C.1
atgtcgtcttcctcttcttccgctgctgctacgccgccggccggttcctcgccgccggccgccgcctcgtcggaggagacactgagcagtttgatgccggaggggttgcgcgtcggcgattctgttgatttcggcgtgtcgcgaatgtcgtcggcccgcgtggaggatatgcagcggttgggctacttcggcggcggagttgcccgtgccccggggacggagaaagtccccgagccggagggcgagttggttgttttcgaggcgtttttcgccgccggcctccgcttgcctgcgcatcggtttgttggcgaagtcctgcgcaggttcaacgtgcaaatacatcagctgacgccgaatgccgtggtggccctgtcgaagtatgtcttggcgacgacttcgtacggcggacagccatcggtcgaagtttttgcgaagcattattgtttacactggcagaagaggatgatcggggacgaagttgctcagtttgggttctgcacattcacgccgaagaccggcaagaccacgatgccagtagtcgagttggtcccttgcgcccgcaacaagtggggcaactggaatgaattttggttttatgttgctgagggtaccgtcgaagaccacgagggacttcccgtgtccgagatgtgctctcatttttactcggcgtacccgccctttgaagtggcggaggatgatgtggacgaaggggcccttcggtgtgccgccggccagagcagtgggcgcgacttggttgaagagtttgtggcgtacggggtatggcccatggcgcatggttgggcgttgggcgaagtatgccctcgccagatgcctttccgtggtggagagatggtgcggagtcccgccttcgcgctaaatctgcgaaaccgtgatccggccgcctttgtgcgtgaagctgaggatgaggcggtgcggcttgttgggcgttatgtgccgaggaccgagggccagcacagctgtgagatccgcgggtcgaatgaccgtttgaatagggtcttcgaattgaaccaactgccatatgacggctatcctggtcaagacgacacggaccgccgggggaagaaaccggtggtggagactaaagacgaccctgcgccggcggccgccccatcctctaaaaagaggaaactaggtactgccatgggaggacttggggtttccgatgggtttgctagagagttgatgaggacatgcgcggccccgggggaaaggatgtcttcgcccgagctccgggagtcttcggctcggatgctgaaggttaccgggggttgctggcctaggaatgttcctatcccccgcgcggccagcggggacgtttttacatctcgcatggttcgcaaatggagagtttttccttacgggcggaatattgctgctgttgtgttagcagtgatggacaaggatcgccagggggctgcacagaagcgccaggcggctgtcaggctcgttgaagccaggccgaagaggcagcgggggtctgcaaaggctggggcccccggcggaggccggccgccgccgtcggcgaagtcgggcgtccctgcagctagcaaggcgccgaaggcaacggcgaaggcggtgccgccgtcaggcggagtggcggaggtcgcgaaggcggcgcgagcgttgccgttgtcgggcaaacgtgtcgccgacttcgccactgatattagtgtggatgactatcttggtgggtcgggcgagggccaacttgctatggttgcgcctgccgcggcgaccacgacggctgccgcagtgctaaaggcgaagggcggggctcttagcgccgggggcgaggtgtcagccctcgcggttgtcatggatgaggcgggcgctgcgacccgccggctgaaggaggtgacagaggcgctgagtcaggtggctgacttcgccagccgcactgcgtcgggggccctcacggcagctgtggctgccgaagtcgagagacttcggacgcaacatgctgacgccgtccgtgagaagtcggccgccgacagcaagtgtcgcaagctggcggacaaggtgtccacgctggagggagagaaggctgacctccggcgccagttggcgggggaaaggagggagaccaacgaggccctcgtcaaggcgcaggctgcgcaggcggaggctaacctggcacgggcggagggcaatcttgccagggagcgcgccgagcagttgcaggagcggctcaccgccctggagagccgcgtggagagggccgaggccatgtcgcgcgcggaggcggagcggacgcgccagctgctcgtggatacatatcgcgggctgggcgcggggaccggaggagctgcaagcactcccccactgtcgtggagggcttttatggcgtatgcctccctggtcacctgcgagggggcgatgaacgcgctctcccgcgaagggtgtcagcacttcgaggtcttcgaccaagccgatgaagatttcgagcgagatatctttaaggttgaggaccccgtagtgaaggagtccgccggagccctctacgaccggatgtggggtctgcatggtcgcgaggtggtgcgggagcgggccgagacggcgagggcgcaggcgttgcgtggcgagagggtggacgacttcggggcgttgaacgacatgctgtctgacccggagccgaccccggggaccgcggaaaacgcgccgggtgcctccgcatccgccgcggccggcgaaggcctgcccgcggaggccgccgaaggcgcgcctgatgccctcgcagccgcggcgccgagtgctggagatcccgcagcggtggcggcggaagcagcagcggagacaacggcggagccaacggcggaggctcccgcaacgtcagggccgtcgcaggtggcgtag

SEQ ID NO: 108832 - DNA, 644 bp, Zea mays
  unsure (1)..(644): unsure at all n locations
  Clone ID: MRT4577_30748C.1
acttctctcgggagccgggactcgggagattacttcgccgccgtcgcctcgcctccgcaaccgcgacacgacacacaccagcgccgccaccgcggaaggagcaaggttgaagaagaagcggcacccgccacagatacgccgcgcggcggcgccatggccgagctgcggcacgccacggcggcgacccgcgccaccagttccccatccaagcgcgacgccgaggccgcgtccgcgtcctcgcccttggtcgcgtccccccgcgtcgacggcggcaaggacggcctccgcccccagccaaggtggtcactcccgccccccttccgctccctcctcgcgctcgaggaccccaggtcccccacggcttccgcctcctaccggattctcgtcgccgcaatcgcctgcttcgcgctcactgcgctcttcttcgcgcctttcgtctggacacgcctcgtcagttcttggctccctgatcgcttcctctcgtatcatattcgttacgtttcatcgagatatcagactcgctgcttacgctcgtgctgctgctggaccctagaacgcgccgtacctgtgccgcaaggaggngattcggctccactgccccagggtgaggcagcgggactctctgtgggagaatctcatgcagc

SEQ ID NO: 108833 - DNA, 817 bp, Zea mays
  Clone ID: MRT4577_30749C.1
ccacgcgtccggcaatgcagcctactgagttagtagatccttacatgcagtctctatcagcgaccccttcagtgaaatcagagtgtgcatcgccgagaaacagtggtcttttcgaagagctgcttcatgaacctcatgcactaagatctgggaagagccaacaaccatcggtccgaagttcaagttcttctgctggcacaccttatgggactatggttagctcagaatttgatatgggtcaggaatattgggaagaacagcccggttctctcctcagcgaatatgctcacttcagcgggaattatttggctgaatgcgctcctcctgttagcgctgcatcaactgatatctttccgctccccaagatttctcctgaaagcccttcaatgggctctggcgagcaggcgttagagcctaaacatgagtcagcagcttcacgttcatcttggaaacttgaggcatgatgcattattctctgggaacacagcccattcatccagtttcaacgataccataacaatgctcatcggcgatgtacctgttcttggtgatggaattgtgctcgattcttcctcatgggacaacatgccacatgcttttcaaatggcggaattcaaatgagttccatataatttctttgtgatgctgaagggcttcttcctgcttgttttggggtcaatatcagggaacgccccactgattgtgacgctgcattcctgacagagatcctttgtgatcttcatgcggatagtccttttgtctaattaagtgcatggaagataacctggatattattttttattttttgctttgtatt

SEQ ID NO: 108834 - DNA, 436 bp, Zea mays
  Clone ID: MRT4577_3074C.1
ggcagagctatgccaggattgctataaacatgggttctgaaaaaggcattacaaaagcaagacgcaggcgaaacaatttacagggacagtgacaggtcactgagaagtaggatacaaactaaaaaggccgaaacaaacctgccctaagaagaaacggggactcccagcgtcgcaatcaacgtgcgttttgatgccgggcgagcgaggttagattcttgggcagacatttggcgcaggggcaagcatcgccactttgacttgatgcacttcttagggcatgtcacaatgatccgcttcagatttgatagatccagcaacgataaggcaacacgttcagcacaagatcttgagtataaactcctcgtccttttccttttgcgaaaagaaaaacacgttttttgatagaaagggaattcctttcctctaggaatttttt

SEQ ID NO: 108835 - DNA, 3453 bp, Zea mays
  Clone ID: MRT4577_30750C.1
atgccgtcctcgtcttcttccgctgccgctacgccgccggccgatccccctccttcggccgccgcctcgtctgaggagacgctgagtctttccatggcggaggagttgcgtgccggcgatcctattgatttcgccctttcgcggagttcgtcgctccgctggcacgacctcctccctctgcgttacctcggcgaccgcgctgttcctgtcttagcccccgacgaagtcccccgcccgtagcccgagctacttgcccgtccggcgcaattcgctccctgccattcgccgcctgcgccctgttgtgtcgggccacgcctgagcattgtccgccgccaaccaccgtaccacggagcatagagtcagttgcccctctcggattactcgtgggagacgactgacgacgacggcgacaccgccgtctcccttctcgctaccttttatcctccttatttaaatggttaatttagtggttaagaatcaacttctattcctacccgtggaagaacgtcaacttttcactaagcaagtatgagcttgcagaagaagatatcatgttgaactccatggatgctagtctagtgatacccccggtcatcttcctgtggatggatgtccatgtttcgctgtactttgatgaataaaggttaagactattatgtctgttcgaagtgctaatatgttaatataatcgttatttacgctgttgaaaaaaaaaaaaaaaaagccgccggcctgagcagtgggcgcgacttggttgaagaatttgtggcgtacggggtatggcccttggcgcatggctgggcgttgggcgaagtgtgccctcaccagatgccttcccatggtggaaagatggtgcgaagtcctgccttcgtactgaatctgcaaaaccgcgacccggccgccattgtgcgtgaggcggaggatggggcggtgcggctcgttgggcgttacgtgccgaggacagagggccagcgcagttgggatatccgcgggtcgaatgaccgtttgaacagggtgttcgagttaaatcaattgccatatgacggctaccctggtcaagacgatgtggaccgccgtgggaagaaaccggcgggggagattggaggcgaccctgcgccggcggccgccccatcctctaaaaagagaaaattaggtactgttatgggaggtcttggggtttctgatggttttgctagagagctgatgaggacgtgcgcggcccccgggggaaggatgtcttcgcccgagctccgagagtcttcggctcggatgctgagggttaccgggggttattggcctaggaatgttcctatcccctgcgcggccggcgaagactcttttacatctcgcatggttcgtaaatggagagtttttccttacgggcagaatattgctgctgttgtgtcggcagtgatggacaaggatcgccagggagctgcacagaagcgccaggcggctgtcaggctcgttgaagccaggccgaagaggcagcggggggctacgaaggctgtggtccccggcggaggccggccgccgctggcggcaaagtcgggcgtccctgcatctagcaaggcaccggaggcaacggcaggcgccggaggctcgaaatcggcgaaggcggtgccgccgtccagcggagtggcggagatcgcgaaggcggcccgagcgttgccgttgtcgggcaaacgtgtcgccgacttcgccaccgatattagtgtggacgactatctcggtgggtcgggcgaaggccaacttgctacggttgcgcctgccgcggcgaccacgacggctgccgcattgccgaaggcgaagtgcggggctcttagcgccggaggcgaggtgtcggccctcgcggttgtcatggatgaggcgggcgctgcgtcccgccggctggaggaggtgacagcggcgctaagtcaggtggctgacttcgccagccgcgctgcgtcgggggccctcacgtcagctgtggctgccgaagtcgagagacttcggacacaacatgctgacgccgtccgtgagaaatcggccgccgacagtaagtgtcgcaagctggcggacaaggtgaccacgctggagggagagaaggctgccctccggcgtcagctggcgggggaaaggagggagaccaacgaggcccttgtcaaggcgcaggctgcgcaggcggaggctaacctggcgcgggcggagggcaatcttgccagggagcgcgctgagcagctacaggagcggctcaccgccctggagagccgcgtggagagggccgaggccgcgtcacgcgcggaggcagagcggacgtgccgactgcttatagatacataccgtgggctgggcgcggggaccggtgaattcgaagtgctggaccgagagcccggacttcgctgcctggagtgggtgcaggaggagctgcaggcgctccccactgtcgtggaggggtttatggcgtatgcctccctggtcacctgcgagggggcgatgaacgcgctctcccgcgaagggtgccgacacttcgaggtcttcgaccaagccgatgaagattttgagcaagatatctttaaggttgaagaccccgtagtgaaggaatccgccggagccctctatgaccggatgtggggagcgcacggtcgcgaggtggtcagggagcgggccaagacggcgagggctcaggcggcgcgtggcgagagggtggacgacttcggggcgttgaacagcatgctgtctgacctggagccgaccccggcggaggccgtgcctggggtcgccctggagccgaccccggagactgcgggagacgcgtcgggtgcccccgcatccgctgcggccgacgaagacctgcccccagaggtcgccgaaggcgcgcctaatgcctccgcagctgctgcgccgagtgctgaagatcccgcagcggtggtggcggggacaacagcggaaacagcggcggggccaacggcggaggctcccgcaacgtcagggccgtcgcaggttccggattttaggcctgcgcacacaaccgctactactagatttttggcggcttcgaccgcggaagatggtaatgaatgtggtgggtctgcatttgagttttttgattgtgctgactctgggagctcggttgagtggattgaggagtcgtcggaggaggacttggactactttgcggccttggatgtggctgcggcggaggcttcgtcgcacgtcgcggacgcaggagatgcgccaggtcctagcactgggcgacgacgacgaagggcggttgcgaaacgtagagttagtggggcggagggggctcggcttcgtgtgagtggggctggccggcaggaactgttgtctttgccgaccgctgtgaatacaggtgaaggggaactgcgaagtctttttgcgggtgaggagcttaggatgatgttatttaattatagggagatgagaattattcctaaggttgagccgatgtaa

SEQ ID NO: 108836 - DNA, 156 bp, Zea mays
  Clone ID: MRT4577_30751C.1
ttctttcaagagagggagccagcgagcagaggcggcgcaacaagggcggcggggggagcacacaccggccaggagcggacgactacctcgacgctgacccagaccctgctgctgcaccaactccagggcagcgccagcaccaagcggggaaggagc

SEQ ID NO: 108837 - DNA, 2904 bp, Zea mays
  Clone ID: MRT4577_30752C.1
atgccgtcttcctcttcttccgctgccgctacgccgccggccggttcctcgccgccggccgccgcctcgtcggaggagacgctgagcagtttgacgtcggaggagttgcgcgccggcgattctgttgatttcggcgtgtcgcgaatgtcgtcggcccgcgtggaggatatgcagcggttgggctacttcggcggcggagttgcccgtgccccggggacggagaaagtccccgagccggagggcgagttggttgttttcgaggcgtttttcgccgccggtctccgcttgcctgcacatcggtttgttggcgaagtcctgcgcaggttcaacgtgcaaatacatcagctgacgccgaatgccgtggtggccctgtcgaagtatgtctgggcgacgacttcgtacggcggacagccatcggtcgaagtttttgcgaagcattattgtttacactggcagaagaggatgattggggacgaagttgctcagtttgggtcctgcacattcacgccgaagaccggcaagaccacgatgccagtagtcgagttggtcccttgcgcccgcaacaagtggggcaactggaatgaattttggttttacgttgctgagggtgccgtcgaaggccacgagggacttcccgtgtccgagatgtgctctcatttttactcggcgtacccgccctttgaagtggcggaggatgatgtggacgaaggggcccttcggtgtgccgccggccagagcagtgggcgcgacttggttgaagagtttgcggcgtacggggtgtggcccttggcgcgtggttgggcgctgggcgaagtatgccctcgccggatgcctttccgtggtggagagatggtgcggagtcccgccttcgcgcttaatctgcgacaccgtgatccggccgccttcgtgcgtgaagcggaggacgaggcggcgcggcttgttgggcgttatgtgccgaggaccgagggccagcgcagcggggagatccgcgggtcgaatgaccgtctgaatagggtcttcgaattgaaccaactgccgtatggcggctatcctggtcaagacgacccggaccgtcgggggaagaagccggtggtggaggctaaagacgaccctgcgccatcctctaagaagaggagactaggtactgccatgggaggacttggggtttccgatgggtttgctagagagttgatgaggacatgcgcggcccggggggaaaggatgtcttcgcccgagctccgggagtcttcggctcggatgctgaaggttaccgggggttgctggcctaggaatgttcctatcccccgcgcggccagcggggacgcttttacatctcgcatggttcgtaaatggagagtttttccttacgggcgaaatattgctgctgttgtgtcggtagtgatggacaaggatcgccagggggctgcccaaaaacggcaggcggctatcaggattgttgacgccaggccaaagaggcaaaagcgggggtcggcgacggctgcggcccccggcggagggaaaccgccgctggtggcgaagtcaggcgtccctgcatctagcaaggcgctagaggcagcggcgggcgccggaggctccaagccggcgaaggctgtgccgccgctcagcagggtggcggaggccgcgaaggcggcccgagcgttgccgccggcaggcaagcgtgtcgccgacttcgccaccgacatttgtgtggatgactatcttggtgggtcggacgagggccagcttgctacagttgcgcctgacgcggcggtcgcgacggctgccatagcgccgaaggcaaggggcgaggctcttggctccggaggcgaggcggcggccctcgcggttgtcagggacgaggcggacgcagcgatccgccggctgaaggaggtgtcggaggcgctgagtcaggtggctgacttcgccagccgtactgcgtcgggggccctcacggcagctgtttctgccgaagtcgagaggcttcggacgcaacatgctgacgctgtccgtgagaaatcagcctccgacagcaagtgtcgtaaactggcggacaaggtggccgcgttggagagggagaaggctgacctccggcgccaactggcggcggagaggagggaaaccaacgaggccgtcgccaaggagcaggctgcgcaggcggaggccaagctggcgcgagcggagggcaatcttgccaaggagctcgccgaacatctgcaagagcggctcaccgccctggagagccgcgcgaagggggccgaggccgcgatgcatgcggaggccgaacggacgcgcacgcagcttatggatacatatcgtgagctggtgggtgcaggaggagctgctggaactcccagccgtcgcggggggttgatgtcgtacgcctccctggttacctgcgagggggcgatgaacgcgctctcccgcgaagggtgccggcacttcgaggccttcgaccaggcggatgaagattttgagcgagatatctataaggtcgaagaccccgtagtgaaggaatccgccggggccctttatgaccggatgtggggtctgtacggtcgtgaggtggtcagggagcgggcggaggcggcgatggctcaggcgttgcgtggcgagcgggtggacgacctcggggcgctgaacagtgcgctgcctgacccggagccgacccctgcggaggccgcgtccggggtcgccctggagccaaccccggagaccgcccccacacctgccgcggccggcgaagacctgcccccaaaggtggacgaaggcgcccctgatgcccccgcagctgctgtgccgagtgctggagatcccgcggtggaggcggtggaaacaacagcaggaacggcggcggagccagcggcggaggctcctgcagcgtcagggccttcgcaggtggcatag

SEQ ID NO: 108838 - DNA, 533 bp, Zea mays
  Clone ID: MRT4577_30753C.1
cctcgaggccggccgggatgtccttatctgtggctgcgctcgcctctattcatttcttcacgcccctcggctttgtgctctgaatgcgtcggctgtagcttagtccgatacgatgattacgtatcatctaccagctgtcgaacgtagcagggacgctgcctgcatgtggggctacctgcaaggcttgccagctatgcatggccaggcgtcctccgcagcttcacactttctagaacaagatcgaccgccaggtctccttcatccaagcgccagcttcgtgcctgctccagaacgcgtacgagtatctgcgagatctgcgacgcgccacagtctgctcatcatcttctccaaccagagggaagctctacgacttctgcaacgccaccatcatcaccaacacacttgagaggtatgacaagaacagctatggaggaccaaatactgttgcactgaccaacgagaacgagttagtccagatgactcataatgactacctcaagctgaaagccagcgtgcataatttacacaggact

SEQ ID NO: 108839 - DNA, 442 bp, Zea mays
  unsure (1)..(442): unsure at all n locations
  Clone ID: MRT4577_30754C.1
cccgcaacacggggggcacgaggggagccagaaccacnacaccgagagcacgagacgagagccacagaacacacgccagagaggcacaaggcaaacccacccaccctagcccccggcaagaaagcgcaccggaacaagcgaagccacacgcacgccagcaacaacncangaccggacgaggaggggaggccagcccccaacgccccacngccgaccacaccacagcgaccccgggaagccccccgaccgaccaacaacagcacaaccgccaccgacgagccggaccacacgacgccgacagnacacgccgccggcgcaccgggcccggacgaggcgggcaaacaccgacagagacccgaccacagaagagacaggcgagacaacccagacaccaccgggcccncacccaaaacacaaccggagccggcaagccacaccgccg

SEQ ID NO: 108840 - DNA, 3039 bp, Zea mays
  Clone ID: MRT4577_30755C.1
atgatcggggacgaagttgctcagtttgggtcctgcacattcacgccgaagaccggcaagaccacgatgccagtagtcgagttggtcccttgcgcccgcaacaagtggggcaactggaatgaattttggttttacgttgctgagggtaccgtcgaaggccacgagggacttcccgtgtccgagatgtgctcttatttttactcggcgtacccgccctttgaagtggcggaggatgatgtggacgaaggggcccttcggtgtgccgccggccagagcagtgggcgcgacttggttgaagagtttgtggcttacggggtatggcccttggcgcgtggttgggcgctgggcgaagtatgccctcgccagatgcctttccgtggtggagagatggtgcggagtcccgccttcgcgctaaatctgcgaaaccgtgatccggccgccttcgtgcgtgaagctgaggatgaggcggcgcggattgttgggcgttatgtgccgaggaccgagggccagcgcagctgggagatccgctggtcgaatgaccgtctgaatagggtcttcgaattgaaccaactgccatatgacggctatcctggtcaagacgacgcggaccgccgggggaagaaaccggtggtggagactaaagacgaccctgcgccggcggccgccccatcctctaagaagagaaaactaggtactgccatgggaggacttggggtttccgatgggtttgctagagagttgatgaggacatgcgcggccccgggggaaaggatgtcttcgcccgagctccgggagtcttcggctcggatgctgaaggttaccgggggctgctggcctaggaatgttcctatcccccccgcgaccgacgaagactcttttacatctcgcatggttcgtaaatggagagtttttccttacgggcggaatattgctgctgttgtgtcggcagtgatggacaaggatcgccagggagctgcacaaaagcggcaggcggccatccggcttgttgaagctaggccgaagaggcagcggttgggtgcgaaggctgcggcccccggcggaggcaagccgccgctgccggcgaactcgggcgcccctgcatctagcaaggtgtcggaggcaacggcaggcgccgggggctccaaatcggcaaaggtggtgccgccttccggcggagtggcggaggtcgcgaaggcggcccaagcgttgccgttgtcaggcaaacgcgtcgccgacttcgccaccaacattagcgtggacgactatcttgttgggtcggacgaaggccaacttgctatagttgcgcctgtcgcggcgaccacgacggccgccgtggtgccgaaggcgaagggcggggctcttagcgccgggggcgaggcgtcggccttcgcggctgtcagggacgaggcgggcgctgcgtcccgccggttggcagaggtgacggaggcgctgagccaggcgtcccgccggctgcaggaggtggctgacttcgccgaccgtacagcgtcgggggccctcacggcggctgtgtctgccgaggtcgagagacttcggacacaacacgccgacgccgtccgcgaaaaatcggccgccgacagcaagtgccgtaagctgacggacaaggtggccgtattggagaaagagaaggctgacctccggcgccaactggcgggggagaggagggagaccaatgatgccctcgccaaggagaaggctgcgcaggcggaggctaaaatggcgcgggcggagggcaatattgccagggagcgcgccgagcagctgcaggagcggctcactgccctggagagccgcatggagagggccgaggccgtggcgcgtgcggaggcggagcggacgcgcaaacagctcatggatacataccgtgagctgggcgcggggaccggtgaattcaaagtgccagaccgagaggccggacttcgctgcctggagtgggtgcaggaggaattgcaagcgctccccactgttgtggaggggtttatgtcgtatgcctccctggtcacctgcgagggggcgatgaacgcgctctcccacgaagggtgtcggcacttcgaggtcttcgaccaagccgatgaagatttcgagcgagatatctttaaggttgaggaccccgtagtgaaggaatccgccggagccatctacgaccggctgtggggtgcgtacggtcgcgaggtggttagggatcgggccgagacggcgagggctcaggcggcgcgtggcgagagggtggacgacttcggggcgttgaacgacgtgctatctgacccggagccaggcccggcggaggccgtgcctgggcccgtcctggggccgaccccggagactgcgggagacgcgtcgggtgcctccgtagccgctgcggccggcgaaggcctgcccccagaggtcgccgaagtcgcacctgatgcctccgcggcggctgcgccgagcgccgtagatcccgcagcggtggcggcgaagataacagcggaagcagcggcggagccaacggcggaggctcccgcagcgtcagggccgtcgcaggttcaagattttgggcctgcgcacacaaccgctactactaaaattttggcggcttcgaccgcggaagatggtaatgaatgtggtgggtctgcatctgagtttttggattgtgctgactctgggagctcggttgagtgtactgagtcatcggaggaggacttggactactttgcggccttggatgtggctgcggcggaggcttcgccgcacgtcgcgggcgcaggagatgtgccaggtcctagcaccgggcgacgacgacgaagggcggttgcgaagcgtagagttagtgggacggagggggctcggcttcgtgtgagtgggactgagggggctcggcttcgtgtgagtgggactggccggcaggaactgttgtctttgccggccgccgtgaatacgggtgaaggggaactgcgaagtctttttgcgggtgaggagcttaggataatgttatttaattatagggagatgggaattattcccaaggttgagccgatgtag

SEQ ID NO: 108841 - DNA, 422 bp, Zea mays
  unsure (1)..(422): unsure at all n locations
  Clone ID: MRT4577_30756C.1
ggcngaanagatacagagtaggtgaaaagcgcganganacaccngaanagacgannngggggggggaagnggcagcagacgccacagaccacccgnnacaagagacagncagggnncannanccctccgccaagggggcaaaagncgngactgaaaaanagacaacgcgcacaaagggnnangganangnngaaaanggngagcctacagagcaagcncgcgcaaggactgaaaagaaaggaaggccnngnncanccaggccnangcgnannggnccngcagcaaggaggaaaaacacaggaggcgncgggcaagagagagnaccaanaacncaaggagctcagnccgagaaggaccccaacaataccaccatatttgttggtgggcaagaccccaaagtcaccgaagataccctaaaacaa

SEQ ID NO: 108842 - DNA, 317 bp, Zea mays
  Clone ID: MRT4577_30757C.1
ggctaacctgctggatcgacggatgcgttggaaagtatgaaacaaggggatttagactttctttgttttgcaacaaacgttctctacaagcacagtaaagtaaactgggactacacaatgagtttatacaacataattttttgaaggcaagaccgctacctgactataagcgaaaaatctgacattgttgtggcagtaatcaaatcgtctcggataagacaaagagacctgacttggggctatgatgtcatgaaaggtatttacagatacatgctatctggcgtgtacatttgtcacttaaaggttacaggttccat

SEQ ID NO: 108843 - DNA, 294 bp, Zea mays
  Clone ID: MRT4577_30758C.1
tacatttttccccccacacgacccaacagtgggggttttattttagaattgggtgggtaaccacaaccccccccagatggtcacaagatttaaccaacagttgtaacccctggaaccgatctatatgagctctgcaaaactggctcatatagtaattatccacctgagctgctggagcgacattgcggcaagatcccgggatttggacccaccttggactctagtgcattcggtcaccaaacgattatgctatgcctattgctaccttatggtgactcgaaagcttacctttcc

SEQ ID NO: 108844 - DNA, 608 bp, Zea mays
  Clone ID: MRT4577_30759C.1
cgggcacaaaggaaattcccatggagcttctgtctttggtctactggcgtggctcaaacagacttctgcaagcgtcttgctgctaaactcgatggtcagaacaacagacatgctctggaaaccgatacacatctccgtctccacggagcaccccttggagatgtctatgccatcggtgactgcgcaaccgtacaaaataacgtctctgatcacattgtgaactttctccgcactacggcctgggagaagggcaaggaccctgaaagcctgcacatttcctattcggactggcgtggcattgctaagcgtgtcaagcagcgatttcctcaagcttccaaccatctccgccgtctagacaagctctttgagcaatacgacaaagacaagtcgggcactctcgactttggtgagcttagagagctgcttttccaaatcgactcaaagctcacttccctccctgccaccgctcagcgcgctaaccagcagggcgagtaccttggccgcaagttcaacaagattgcccaggctgcgccaggtatggctctgaacaatgtcgactatggtgacttggacgatgcagtgtacagggcattcgagtacaagcacct

SEQ ID NO: 108845 - DNA, 314 bp, Zea mays
  Clone ID: MRT4577_3075C.1
aaaacaatcctcgcatggggggtttttttaagattagctgtttaaatggggcaggggctacccattggttataaatatcctaggtttttgctcgaacgttgtttccaaatcaatttgataaaatactttgttttacaagggcttacagtttaacataggggggaataattgtttaaagcggttcccccctttaaacaaaggtgggatggacaataatacatgtagaagagcccattcctttaaaaaggggcgggctattaggcttggaattgggcttcctggggccatgccttaatcctgaacaaaaggccttt

SEQ ID NO: 108846 - DNA, 566 bp, Zea mays
  Clone ID: MRT4577_30760C.1
aaatttcccacgcgctaaaccaccacgtcagtcgccgtcgtcgggggagagagagagagagagagaggccgcaacgaagggaggccgggccgccactgttgacacggggtcatgtcgccgttccaacctagggtggttcctaggagcttcgcagggcttcggcagacgtgcttgtggcgatgccgggcagattcgaggtcggagatcccgggaattgcactccgacgttgtcctccgacgtgcgtccgtacctcatcgaggctagccctagccaccgcttgaactccgtggacgagcaagtgatcgaggagcccggagcaccacaggttgaagatactgagcaggagctcgctgaaggaaagttgtgtccttgaccactcttctttatccaataatgttctctataatcagtgtgacatgctcaggttaaatttgatgggatctaataggttgccctagtttgttacctcacaccttgcatgcaaatgaattattgtgtagtttgcttatgctctacttgccttttgaaaataattctttatggcccatgatcatgctttattact

SEQ ID NO: 108847 - DNA, 1194 bp, Zea mays
  Clone ID: MRT4577_30761C.1
gccgtctcctttcttaccgcggcccctaaacccctttcctcgttcccctccgtctctcagttaggcacaatgatgctagctaataggcttggtggtttgctcaagaatgctacgagttcaaagagttcaaatatgtctgtctaccaagcaatcagatgcatgtcatcatccaagctttttgttggagggctttcttatggaaccgatgatcacagtctcagagacgagtttgccaaatatggtcaggttaatgacatccaagttctttgttatagggatttcttatcaaactgattttcacagtctcagggacgagtttgccaaatatgggcaagtcattgaaggtatcatgcccattgctgcacttgccttggctctactttctgctgaccagttatgcttcaatctgtccagctaggattatcattcgaccgatgaatctgggaggtctagaggttttggctttgtaacttacacgtcttctgaggaggcttcagctgccattactgccttggatggaaagactctcgatggacggagcatacgtgttaatcatgctaacgagaagacaggtggctttcgtggcggcggtggctatggtggcggcggctacagtggtggtggaggatatggtggtggtggcggtggctatggtggtggtggaggctatcgaggtggtggcggcggacgcggcgcccaagtcaccggcgccggaggcgcccaaacgagcctggcgagggtgcatgcagctgccgcctggagtgaggccactagtcgtcggaggggttcggcctcggcgacgtcatgaagggcgccgagcagctggtgggagggaataagcagggcggcggggaggagagcgccggcggcggtgggctgtttaagatggcccagggcttcctcaagtagatattgtctggccaacgtatatacgagtacgtaattagcttcaaaataatgttcccctcgcctttatttgctgttcaagtccctgtaataaccgagaacgttaattgtagcagtgtgttttttatatgattaaataagtactatgttgtataaggctagtgcagctgtgcaggttactctatattcttactctatatcactatttgtagtctactcatcaattaataaatagattgcttgataatataaaacaagaaggagatctaattatataaaaaataaaat

SEQ ID NO: 108848 - DNA, 737 bp, Zea mays
  unsure (1)..(737): unsure at all n locations
  Clone ID: MRT4577_30762C.1
aagctgacagagagagctagcaacgctctgcaagatccgccatctaaactttgcagcactctactccaccactctcctccgtctgcgactgcgactaggtcccaaatggccgctccaccggtggccgccgctctgtctgcgctccatgaggcacaagagacccacggccatgacgacagccgcgctgggcacgcgagaggccactggcggccagccgaggatgccaagctcaaggacctcgtggcgctgtacggccccaagaactggaacctcatcgccagcaaactccacggcagatcagggaaaagctgccggctgcggtggttcaaccagctggacccgcgggtcaaccgccgcccgttctcggcggcggaggagcagcggctggtggcggcgcaccgcgcccacggcaacaagtgggcgctcatcgcgcgcctcttcccaggccgcaccgacaacgccgtcaagaaccactggcacgtcctcacggcgcgcaggcagcgggagcggaccggcgcgccgccgcgccgacgcaagccctcctcgtcgtcacccgccgcccaccaccaccgtgcaccatctcctctgccgttctgcgccggcaaggccacccgaccccgctcggtgcggcgacggcgacggcgacggnggcgggtccgacgagtccgcgtcgtccacctcctccggnaccgacctctcctccctaggctccgtgtgcgcccccgccgtcccctgct

SEQ ID NO: 108849 - DNA, 204 bp, Zea mays
  Clone ID: MRT4577_30765C.1
aaaccataagggattaatatacaaacccctggggagggtacataggggggggggaaaaccggggggtaatttacctcccaaaaagattttgggagggaaataaagatcccccggttttgggggtttttccattgataaaaatataggacttttgattttttcccaccaaaaaacaattccccgacaaaaagctccaggtcagca

SEQ ID NO: 108850 - DNA, 307 bp, Zea mays
  Clone ID: MRT4577_30767C.1
ctgccggggttgccaaataccgttgaccagaatggcacttcatgatgcgaaaaccaaatggtgcaaccctacagcacccaacgcgcgatgaacggaagcatctgaccttgatcacccaaggcacctgcaacaaccatcagctctattacagaatgtacctagcgttgcattgtgtgtgacacaaaacatcaaggcacagcaactacaacaacttgtgctaggaaaccttgctggctactctcagcaacagcagttaattgcattcaaccaactggctgaattgaactcttctagttatttggtacaa

SEQ ID NO: 108851 - DNA, 252 bp, Zea mays
  Clone ID: MRT4577_30768C.1
aacaaccctctatgaaagatggtctacttttgggagcacctacttggcgatgtggactaacaggcctgatgtcttcttaggcatgatcacctgtggtacctgggcagccccgatcgtgatggagctgaccgccatcccggaggcctaaacgggcaagacctgaccgtcgctaagtactggcacactgggtgctgacaagactgttaagtcgatgcaatagaatagctccaccttccacccgatgatgcgccc

SEQ ID NO: 108852 - DNA, 296 bp, Zea mays
  Clone ID: MRT4577_30769C.1
attttaggagcgaccacgctcactaatgcgacggcgggacctttctgtcctggtggggagcacagcacacacacccggaacgcggtaccagctcagagtcagataccaagacagttaatcatggctcggccgggcattgtcggtgcctgtgtcgctaggcccctcctgctggtgctctccgccgcccgagcggcgcgtcgcgacgccgcgaacgctgcagacagcgacttcctgctgaagttttgccgaacgacgcagcacctgtccgtgtgcaaggagagcctggcgtaggacgg

SEQ ID NO: 108853 - DNA, 540 bp, Zea mays
  Clone ID: MRT4577_3076C.1
gggggggcattatgagcccatttcaaccccatttgttcgaaaggcctcaaaaaaagcatacctaaagttcccaaccaaccaccaaaatttagggggggcgggggcaacaacaacccaacggggaaaacaacaatgacaggggccttttaaaattttatttaggccaccacgctttcccaaaaactggagaaatcgcacagcctgaatataaccctataagtctataacccttttttaaaaaaaaagaagggttctaatttgggagctaagggggaacaaaatcagcatcccaaaactgggggccaaaaatcatggaagtgggggcacccctttattgggggggcaggcactgttaattattggtggcacctttgtcaggggggggactatggattaagtttccatacttaaaaaccttggatgtaacaagggggtttcggatctcgccctggctttggatcaacctgatctttaaactggtgggcaaggggtcaaaacccgccattttataatcttccacagtttttttaaaaagggcct

SEQ ID NO: 108854 - DNA, 2197 bp, Zea mays
  Clone ID: MRT4577_30770C.1
ggtgacactatagaagagctatgacgtcgcatgcacgcgtacgtaagctcggaattcggctcgagtgttaattgggagatagatgcttcagaaactcaaactactattcctggaagtagtgaggtgcaaaatgaccatgcaggaaagaggacctctactgtggatgatagctcatcgtcttgttcatctgactcagtgccttcagttactgtgaatggatcatataaaggaggtgcctggacaagcgtcagatcctcatgcgattcaggggaaacaacaggaggaataaggatactgaagcacgggcaggatttgcacaaggtggatcatgttcatcgcataatggttttataggctctggcagcaatgcctctggccactcaaaggaaagacacgaacctgaggatgataaagttgtcttgcagaggaagcaacatgcacaatggaacattgatatcattagctcctccaagtcaagaatggcagagtcttcattttcttctgtgagctctattaagaagcaacctcaaccaaattttttgctagaaagcaccaatagtttgaatcaccgtggaagcgaagcttctggcactgtgacttccactacaacagcgggtgcctcttcaaccccggccactcagttagttttgaataaaggacctgtatccagtgctgcaacccagaatgagaagccactacctctgcaggtgcttgtaccatccaaatctgaagtgcagaagcaggcttccctaactggcagtgcaactaccgaggccttttcagtatcaaggcccttgactgccccacaagtccctgcagcaaaacaaagtgcaccagtcacttcaacagctcagaatgcaccttttctttctcgttcaatgagtgctgttgggcggttggggaatgaaccatctgccaatgctcctagtttcgttccccgttcacgaacatatcgcaatgccatgatggagaaaagttctggtggtggaagctgtttcacacatcagcaaggttcatcggagcaagcagttgcaccatggcaatcgatgtttacatcgcaacctttcattcggccatcagagaccttgtcttggaaagaggaaacattattgagatctgggtttacatttggaactgtgaagcccgagtcactgaacccatatcagggcagagaagagaactcacagcaagcgagcagcaacagcagtgattgtgcgccatcgagttcaaacatcagaagcgagatcgagaagctgaatttgagcggaagaccacgaagcaagcaactgttgtcagaaatttcgaccagatttactccctatcagccacaaggcttggtcgctgatgagttcccacacctagacatcatcaacgacttgctggatgaggagcagagtgacagaagaagggttcttcaacctgattttgttcaacagtcctatatgcctcatggtgccagcacacctgattatggtgagccatacttgtttgaccagtccgagcaatacttcgatgaggagcctccaaggttttatagtccattgagcagtgctcctcggaggttgagggacctgagctattcgcactttgatctcccatcacactccagcagcagccagtttgatgatctgatgatgagtcagtggccatacagccgcactgacatctccatgcctagttttgggtcagacacaagtggctacccctatcaggtgtgggatctcgcgaatggatcaagcaggtacccatcgtatcgccctgccaatgggcattgagagttttaatgattgcattgacaataatgtgtggttaagtccatgatgttcgcttctgagctgagtgtaattgtaatagttccccatagcagtgatataaagaattgttcctcagtttccttgttcaatcaatagttatatgacccccctcctccctcttttctctagttcagttttgcccagtggtaataaatctaagtcggctaaaatgatctggctaatcgtgttgtgaaatgtgtatgatgcaagcaaatggtagggtgtttttaagccatgccagtgcttcagctgatactacattaaactgggagtattctttgtttctccctctgacgagtgacgacgtgttattgatcgtctcaaaaaaaaaaaaaaaaaaaaaaaaaaaaaaaaaaaaaaaaaaaaaaaaaaaaaaaaaaaaa

SEQ ID NO: 108855 - DNA, 355 bp, Zea mays
  Clone ID: MRT4577_30771C.1
ctgaaacaaactacctctgtcgtcaacctactaacttccatattcttcacactcagctttgcaaaatttacttgactggctttttttggcttaaaatataactcagggagacgtgattttgggacgatcaaactgttgggattgcgcttggacattccgggcagcgtgcacccaagattgaccaagctgattcgacggtgctaggacaaagatcctgatgcgtgtctgacttttgcagagattactatagaactccaagatagtctacaccatatcgaggcacccaagggagccagccgtcgttcttgagcaaagatgtagaagaaataagaggaagaaaaagaatacatacgta

SEQ ID NO: 108856 - DNA, 334 bp, Zea mays
  Clone ID: MRT4577_30772C.1
ggggccaaaaacaaaaatttggaaggggatgggggcccaacagggaacagggaacaattttggaacaaggcccaaaaaaagggggggggggggggcccaattttttaaccccaaggggggccaatccccggaaaagggggggggaaacaaacaaggggggcccccaggggtttgcataacaataaaaactggccccagcaaaaaaaggggggtttgttagctttggcctgcagtttaaaaacttttgaaatttaaaacagctccttgcattgggaggttagtttatccaccatatcctccaaaattatcgccctgttttggggatgccgaaatt

SEQ ID NO: 108857 - DNA, 205 bp, Zea mays
  Clone ID: MRT4577_30773C.1
agtcaatcattttttgtttctcctagcagtggtgtaacttataatgtactagttacagcaccatgtttagctggcagctgtgttcaaggtgccactgccagcgtgaaatgtgttgacctcttgagctgaaaatatggaagaaatatgtctgtatatgtaaccttttcttgattagaaaaaggcaaagccctttttgcaatgaatc

SEQ ID NO: 108858 - DNA, 736 bp, Zea mays
  Clone ID: MRT4577_30774C.1
ggttggcggccaggcaacgatggctgatgagggggggtacttacgtaacaccacccctttgaattagggtggccgtttttttactggccccccatatgtgcgggtgggggggacccccgattcttttcaaatttttggtggagggattgtaagggcttaaaaaacaggggggccaaaaccttccttttccaaaaaaaaaaaaaaaggccggcaagggattcctgccccattgggggggcccagggggcgaaggtgacggacttgggccgccctcggggcgccgggaacccaaaggggccgggggaacccgggggacgggggaaacccccccggaaaaatcgggatgccgcccacaatgggcccggccgcccaaacgtattttatccggtggcggaaaaagggcttggggggggggtcgggggggcccccccagggcctccaagtgggtcctcttgggggcgggggcggggggcttgagggggacggccggccccccgcttggggcctgccccccgggggcgggaaaaaccgccgggggggggttgatccccggcagaaccttggggggggggcttcgacccggggggggggggggggactcagacaggctttaggggggctggggggcggggggggggtcgaggagggggcgagctgggggggcgggaggggaggggggggaggagggtgggggggggggcccggggggggggggggggggggggtaggggggggg

SEQ ID NO: 108859 - DNA, 221 bp, Zea mays
  Clone ID: MRT4577_30775C.1
tctcatctactcgatcacggtaatcttcaacaggctcatgtgctgccagctcgtcaccgatgaggcatggaggccactgatgacgaccccaaattatggcgcgcacacaatcgtggatacgccgactagcaactcagccgcacaggtcagctacgaccgggactacaaggagacgtgcggaactcacgtcttataacgctgaaagctcaagaactgattct

SEQ ID NO: 108860 - DNA, 425 bp, Zea mays
  unsure (1)..(425): unsure at all n locations
  Clone ID: MRT4577_30776C.1
cctgcagtacccgtccttaattccctgtcggcggacgcgtacgctcctatctctttgcaccaaatttccttcttctattgcgtcgcgctttgggctaagtgcatttggggggcgcatgttctcggggtgtgccttctctccatctaaagcgccctcctctctccccaaagcctacccatcccccaacctcttcttcttcggcttaatcaagcttaccacaattgaaggacttatacattcctttnctgagtttggtgaacttttgcatgctccagttttgaccgatcttgtcatttggttttctaatggattttgctttgtaatgggttctactacctaagatggacccaatggaatataatgaaaggatggaaattttctttatggatggcttatttttttcggaataccctaaatccatacca

SEQ ID NO: 108861 - DNA, 244 bp, Zea mays
  Clone ID: MRT4577_30777C.1
cccacgcgtgcgtgcagcggacagatcaggcgcggccggcgggcagtgcgtgcgtgtggctgttgatagagatcctgctcctcgccgagctgccaggcggaggatgcctggggctctacgagacgctgccggcgtccgaggtgccagaatggctgccgttcgttggtctggcgctcgccgcgctgacatgggcaggatgcatcgtcactagcgcatacctgtgctgccgcttatagcacgctgg

SEQ ID NO: 108862 - DNA, 306 bp, Zea mays
  Clone ID: MRT4577_30778C.1
tctacgcgtccgcccacgcatgcgcggactcctgggcggacagcgtgcagggaagcctccacggcgcgcgatctactgcgaccggagaaacggggcctaaggcagcagtccgccaggaagacccatacacgctgagcggatagatactctatctgacccgggtcacctgcaatccgagccggatgtgtagaagagccctctccgaccgccgagcgaggccctgatcggcagacgagctggcgcgagaactgaaagcctgtcgtgcaggcaccgccgggctctacgaggacaatggtgcctaccgcg

SEQ ID NO: 108863 - DNA, 154 bp, Zea mays
  Clone ID: MRT4577_30779C.1
ccccttatcgcccttggagatggagatgggcgggggtagctccggcgcgggggggggcctatagtcatacggctgggccgatcattggaccacgcttgcgagccatctgttattgtgggacatggtgcagttccaactccgtattcagataggg

SEQ ID NO: 108864 - DNA, 231 bp, Zea mays
  Clone ID: MRT4577_3077C.1
ttgagaccaactagcaacatagaaagcacaatagtgtacaacaatggcagccaaaatattttgcctccttatgctccttggtctttctgcaagggctgctacggcggcggttccttcacaacgcttatcagctactgtagactgcgctgctgttgcttcgccgctcctgccacttctggtattatcaggtttctgagagcgcatgggagccaccctgcacgtcaggtaccg

SEQ ID NO: 108865 - DNA, 813 bp, Zea mays
  unsure (1)..(813): unsure at all n locations
  Clone ID: MRT4577_30780C.1
cggccgctcgaggcggcgggccgggatccatcacccaccaaccgcctctacaagcgcagcccagatctcggctccttcccttcctcgaaccaagcatcagcaatggcgaccacggcagccgacgccacggccgcggttcccaaggagcagcagcccgccaacggttccgcggccgccaccaccggcggcgagcaggtcacgcgccactccgaggtcggacacaagagcctgctccagagcgacgccctctaccagtacatcctggagacgagcgtgtacccgcgcgagcacgagtgcatgaaggagctccgcgagatcaccgccaaccacccatggaacctgatgacgacgtcggcggacgagggccagttcctcaacatgctgctcaagctcatcggcgccaagaagaccatggagatcggcgtctacaccggctactccctgctcgccaccgcgctcgccatccccgacgacggcaccatcttggccatggacatcaaccgcgagaactacgagctggggctgccgtgcatcgagaaggccggcgtggcgcacaagatcgacttccgcgagggcccggcgctgcccgtcctggacgcgctgctggaggacgaggccaaccacgggaccttcgacttcgtcttcgtggacgccgacaaggacaactacctcaactaccacgagcgcctcatgaagctcgtcaaggtcggcggcctcctcggctacgacaacaccctctggaacggctccgtcgtgctcccgncgacgccccatgcgcagtacatcgctactacgcgactcgtctcgagctca

SEQ ID NO: 108866 - DNA, 2248 bp, Zea mays
  Clone ID: MRT4577_30781C.1
ggattcttttaatccttcggcatgcaggattgtctactcaaataaggtgataaatactaaagtatgcttgcacaacggcttcaggtacacctgccccctacacgcgtgctagggtgaaaaggcgtgcacataatgtcgaatgtcgtgctcacatttaatgcgagccatgcagtagttatctcttcgcaaagcgaccaccataccgaataccagggtaagtatgataacctatgacatcggcttctatgacctgggcttgttggcctcgagtgatttgtcggcatagtccctgatagtttattgtatttcttggtacaccatgcatgcgcttgtgtggttttaggactggcgtgtgcaccatgtagcggccttgagtgccctgcggtctatgttgcatgtctgcacattgagtcagtcccataatatttctcctcgtgcatttaatgtgttgtacctgagacttaaccatcgtccatttcgtccaccatgctttgattctatggctaacatcttcatcaatattcccgtgttgttgtagcattaatcctaaatatcaaaatgtatccatcccgagcactacttgatcttccaaaataacatctccttcctcgtgtgtagtagtgtcgaagacacatctcatattcggttttagttctattgagtctaaaacccttggattctagagtcttcttccacaactatagttctctatttactcgtgtctagctttcatgaccaacgccaaaaatagggggcgcggtcacccacaggctgagtcgatcaagatgtgatcggccagatcaagatgtgatcgaccaagtagagtttgttgagagtttttagcaaataggtaaagataaaattgttagcaaataagataagcagagtttttaggaaagtttgttagatcaaggactatataagccacatggcgcaagtaatggaattaagcagtaattcatctatctcttattcctcttctctaccaggaacataggtagctgaggggaaaacctcgctccgcctctaccagcggctacgccctgcgcggcttgggcgcgccgccaccgctaccagccctaggcacccagccacaccataatagttctattgagtttaaaacccttggattctagagtcttcttccacaactatagttttctgtttatttgtgtctagctttcataaactagcactacatcaattatgaataccatacttactattaaatagtggaaattgacatgtgttgaacatgaaattgttttgccatttttgtttttttggagccccataactgtagctaagtcttgtatgaattggtcatttgtctagtgactaactaactatagtatataatatctctacatatacatttttccccgaaagggtggcaagagcattgccacatattttattacaagagactctgcatagaattaccatttgctttgtttgaaaaaggttgtattttatttattgtctggtgtctttccttaaaaaacgaattggtatcttaataatgaatgtaggtctattttgttcttcatctaacaatatgactgttccgaactgtagccatcttcataatttctattctgatgttgcgtttttcataacgtctcaggttgggaccgtgacagcaatttgtgttacctgctttctgataagatgtgttgtggtcgcgctatctgcatttgatgctgatgtatctctcgaggttttggaccatccagtcctggatttcttctattatatgtttgcggagatactcccttctgcgctggttctcttcgtccttcggaagcttcctcccaagcgggtatcggcgcaataccaccctattaactagggagttctttgtttttatgatgttacatgctaagaactccggataagctggaactgctgaaaacctacatccggttgtattgctgtaatattttatggaagcatcccagggttggcaagatgcatcatcaccatcatgctctatgagaaaagagttttgagtggtgctaatgagtttgtgctactgctagccagagcatcacatgacatctccagcagagtaccataccattatttgaattgcatgtgcattcttgacgcggacaaggccaatgatttatcgccttgttggtcccagtgacttttatggagtacttgtgtggtaattgttggtattcctgaggactagatctgaaactgaaaatgcgttatatcagctatcggtcgtcctaatact

SEQ ID NO: 108867 - DNA, 347 bp, Zea mays
  Clone ID: MRT4577_30782C.1
caatccttttcacttatcggggttggtaaacaatacatttcaagcgcctaaacaaaaaccaccaggctcccacaatcggtgggaaggacatccatcgtctgtagacccagctctctcttattgtgcaacgctccgagccataccataccccactgattgctgcgacccgacaaaaaagatcgacgggatcagatggcaacaacaaacgccaccataagctgcctacaacgcctcaccaacaacatctcccatgtggctgcaatgaaaataccgggccccggtcaatacacaacacctgagggatcccaacccgaaaaaagaggaggcactaactagtcctacacctc

SEQ ID NO: 108868 - DNA, 204 bp, Zea mays
  Clone ID: MRT4577_30783C.1
cgggcccgctagctcggacggcgcttcctcttctttattttctggtaaagtaaccacgcgtgctgcttcatctctaccttccttcctgccgtgtggttgttggcagccgcagcgaaggcgcccgcgggtggaggagcaggagaggcggcgccatggacgggaccgggaagagggagcgcgtccctattcttaggatcgacaacc

SEQ ID NO: 108869 - DNA, 306 bp, Zea mays
  Clone ID: MRT4577_30784C.1
aaaaaaaaaaaaaaaaaaaaaaatatattataggcaaaccatataaaaaaaaacaagggggggtactcatacatgcaaacaaataaactaaactataaagacacctaaatataaatttaatgtaacaaaaattaacggccttctcttttttaaaaaccctgccttttcctcccacttgaataccccttgcaacacatttcttcttttggccacctaacttaattgccatgagccccgttctacacgcccttcccaacaaaacccctgccttaaccaaaaataagaccctccctgtaaatgcccttt

SEQ ID NO: 108870 - DNA, 676 bp, Zea mays
  Clone ID: MRT4577_30785C.1
acgctcgatgcctctcctcctctcctccccacctgtctatctcctcctctgtcgggttcgcgctccagatggtcgaatctagggcccaggaccgatgcgggatgtcaacccggaggaaggcaccaaggactactccttcctcctgatgagctccgacaagatggagctccctgagagggttgacattgtgaacactgcgagagatcaaggagcttcctccttatgatactgactggaactacatcaagagtgcattcattgcaaggaacatctatgtactgtaaagacatggctgtgttcgccttttagaagaactacattgtctccgacaggaatgggtccaggccaccacacttctacaagagcagtggtgatggtgcacacgacctcctgcaccagctgtacatgataggcatcctccatgaccatcccaagggagtacgcctcatcaccaaccagagaaggcatcatctgaaccaagtgcctggaaatcgcgcatgatgaaacgcgatcactgacatcttgcagctgaatcgcgtcatgatagaagcttcataacggtgagctctatgctctatcatgggacatgagttgccagtgtctactacattgaagactatagtatcgagctatgagtacacactatgttcgcctagtacctcatgagatatcgaga

SEQ ID NO: 108871 - DNA, 350 bp, Zea mays
  Clone ID: MRT4577_30786C.1
cccacgcgtccgcccacgcgtccggcgcgccgtcgtccccgtctggcgtcgcgtcatgtaacgatgagccgccggcgccagcggtgctgcaaaaggtgcgagcggagcatctgctctacgactactgcgaggatcagaaccggttcaaggacacggggctccctaaggaatgtaccgcagactagatgaagccctaccaactaatagtgtgattagacatgggcatagttcatcgaaacagagaaatcgatccgaaatcaaaaccaaaagaaatgatatacggagtacatgaattatgattcacttgtattgtataactatacttcatttatgtctgatgtctcacattg

SEQ ID NO: 108872 - DNA, 645 bp, Zea mays
  Clone ID: MRT4577_30787C.1
ggtacaggagcgagggcctctctctccatcccgacctctcgtggccgccgcgaagaaaaggagcttatcatggcttcaaaacgtatcctgaaggaactgaaggacttgcagaaagatcctccgacatcatgcagtgcaggtccttctggtgaggatatgttccattggcaggcaaccattatgggtcctcctgatagtccctatgctggaggtgttttcttagtgaatatccatttccccccggactaccccttcaagccgccgaaggtatcgttcaagacaaaggtcttccatccgaacatcaatagcaatggaagcatatgccttgacattctgaaggagcaatggagtcctgctttgacaatctctaaggttctgctttcaatctgctcgctgcttaccgaccctaacccggacgaccctctcgtccccgagattgcccacatgtacaagacggatcggtccaagtatgagacgacagcccgcagctggacgcagaagtatgccatgggatgatacgaagcccatgctcgtatccactgcttgcatgcagaagattgtgtcactgtcccgagaaactatctctgggccattattttctttgattacttgtcggtcgcgtgtgtctccctgatccatgtagga

SEQ ID NO: 108873 - DNA, 215 bp, Zea mays
  unsure (1)..(215): unsure at all n locations
  Clone ID: MRT4577_30788C.1
atcggaatagacgaagttgtgtgccactgctatgctgtgatctgccctgagtggctgctatccnnnaatgtaggtgttttgcagtattgaccacaagttcgaactgatgtacgccaagcgcgacttcgagcactggtacttaggtgatggtatggaggagggggagttttccgaagctcgtgaggatctggcggcgcttgagaaggactacgagg

SEQ ID NO: 108874 - DNA, 242 bp, Zea mays
  Clone ID: MRT4577_30789C.1
ggcccgcctgccggggccgggaacgtactgggtggaccgacgcatgcgatcccagtgccgtcgttctcgaccgttacatacgccggggcggttagtaccttgctttcgttcatggcatgttagcctcggacggggtgttagcctcagggcgtatggtcgcgagtgctgtcatggacgcaagaagaggccgcgcggagcggagcggccccgccgcggcaaacggctcgttcagactcgtccgc

SEQ ID NO: 108875 - DNA, 485 bp, Zea mays
  Clone ID: MRT4577_3078C.1
ggattcccacgcgtgtgtagaccatgtagcaaccctgggagggagggctggtcactggcaacataattttctgaagggcagctaataattcttccatcctctgacaacaagatatgggcgtttgcttacgccccacatgaacttattattctgttacaaaaacatatgacatatctaataacccaataggctggcgggggtggatggcacctacttacgactcttgtgccatcaactatgacaatcatatatcactgatcttgcaacctattcacttttaatggccagataattatgcttagtctcaataccgacaaaaagattgtgttattgttggtgatgatttctgtcgcatactgactgatgcacactctgataagaaaggacatccttaaaaggacatctgcactactcactatcatacagctctgagccctgattggcgaacatttgctaccgtcaaccaaaacaaacataccaaactt

SEQ ID NO: 108876 - DNA, 315 bp, Zea mays
  unsure (1)..(315): unsure at all n locations
  Clone ID: MRT4577_30790C.1
tacgtaagctcggaattcggctcgttcgggttgggaggccagttactttgagctggtgacaagccacgcatccggggtaaggtttaagggtgnaagcgctctaatgcctactactggggacattggtactgtcatcgaggacctgacaacctagggtgacatatgtgtccgtgccactctagtgcaggtgtgctatggcaactagagtgctatctggggacctaagctgcgatgatgatacacgatagctactgggaacatggtcattcagacaaggtgttatctatgctggcttgaaacctgagagaagcatat

SEQ ID NO: 108877 - DNA, 364 bp, Zea mays
  Clone ID: MRT4577_30791C.1
cagaccaaacctttccaggggcggcagatcactgctagatcaaaagccgccagatatacatatctgcagtgctggaagcagagtagagaaagttaagcaactgtagaacaccaggaagctaccacagcagcgtatccgggccgaaactggcagggaggccactgacgtacgtcaaggagagcagagcacgcgcgccaagatcaggtaaaacagaaagcttcatctgatgtaggcgacatggccgaacttggccgccgggatcgagcgcccgaacttggtcctgatcatctgggccacctcgttcagcaacgcctttacgccgcgcgcaaggccagcggcagcctgcgccgtcggccgccgcgga

SEQ ID NO: 108878 - DNA, 1010 bp, Zea mays
  Clone ID: MRT4577_30792C.1
ccacacccacacagagacacgtcggagacgtacaccggcacacaacacacacactgcacgctcaggcctgccgcctgcgcacacgctgtgatcgaaatggttggtgccagcgctagaccatctgcaggccgggacgggggcccggagacggcgctcccgaagctgcagctgctgccatgttggcttgacggagcggtagtgaagctcgtcgcggccgatggcgacggtgacgacctcctcgccggttcagcgtcgtcagggaagcggcggccgacggcgcaggctgccgctggccttgcgcgcggcgtgaaggcgttgctgagcgaggtggccgagatgatcaggaccaagttcgggcgctcgatcccggcggccaagttcggccatgtcgcctacatcagatgaagccttcctgttgtgcctgatcttggcgcgcgtcgcgtcctcgtgctctgctctccttgacgtgatgacgtcagtggcctccctgccagtttcggcacggatacgctgctgtggtagcttcatggtgttctacagttccttaactttctctactctgcttccagcactgcagatatgtatatctggtggcttttgatctagcagtgattactgcagcagttactagcactatctccttctcctggaaaggtttgaactgaagatattttcgtccgtccgatctgccgctagattcacgaagcatggacgctgaatatcgacgcctcctcattcctcttctgatcgacacctacaggctacagaaacagttacgcttgcgtggcgtgacggccatttccttgagatgaagcttgccgcttgccggcccgaaacagttacgctgatgcttacatctctcggcatttatgcgttgcccatgaagtagaatgagtctaaaatgattgtagacgttgctttctatgagtctcactccctttccggattccttttcgaaaaaaaataaaataaaggtctcttccaaaaaaaaaaaaaaaaaatttgcggcc

SEQ ID NO: 108879 - DNA, 277 bp, Zea mays
  unsure (1)..(277): unsure at all n locations
  Clone ID: MRT4577_30793C.1
gtttctcatggcaaccaaacgcacccgttccatacttcagagccactcacaaangtacgttgttggacttggacccaagagttgtccattcaaatgacgctgacgcttcaaccggcatcgctgccgtagaacaagaaagcggcttcgacggcctccaagtagacccaaggcacgagaccgagttccgctacgtgaaggagatattcagaaagtcgagcttcagcaccgagacgctgttcgacgaatggtgctcacagaacatcagtgtcctccagga

SEQ ID NO: 108880 - DNA, 796 bp, Zea mays
  Clone ID: MRT4577_30794C.1
cacaggcacggccacggccaccacccctcccccatcactcatcagtcctgcctgtcactcgtcacaagtgagtaacggttaaggctctgccgccggtgcctccccttcctgccggctcctgtttcgcacagccatccgctccgctgctccccagaggacacacctctccgctgcctctcctctcttctcttctctcctctcctcaaggatgaagctcgctggcccgccgaggatgagatgagaggctgggccaccgccggcagaggaacaagagccccgccaaccaccacaccgcaagcgagacgaggagggcagagatggggaactgcggcacgcgggaggagaatgccgtcgtcgccgcgcacgcgcaagttcagcaagtccacttgttacaacattccgacaagaatgctcttgcagataggaagcacacccgcacctcatcagatgtgagtgaccctccaacacctaggaaaatcgaagatgccaagaacatttccatatacaacaatgtgattgcattcacgttgtttgagcttgaaacaatcacaaagagctttcgggccgattatgttcttggcgaaggaggctttgggactgtttacaagggttacatagatgagaatgtcagggttggcctgaaatcactgcctgttgccgtcaaggtgctcaacaaagatggacatcaagggcacagagaatggctaactgaggttaatttcttggggcagctaagacatccaaacctagtaaaagttgatgggatattgctgtgaagatgaccacaggctgcttg

SEQ ID NO: 108881 - DNA, 1650 bp, Zea mays
  Clone ID: MRT4577_30795C.1
attgggtacctcgaggccggccgggaagcataaagacagcgagagagagagggaggaatcttttgtgacgacgaacgcagggtggtcgtttccatggggaagctcgcggcgaggctgcgggccttctccaggaaccgatggctggtgctggtggccgcaatgtgggtgcagtccatggccggcatcggctacctcttcggcgccatctcgccggtgctcaaggcccgcctcgggtacaaccagcggcagctggccgcgctggccgtcgccaagaacgtcggcggctacgtcggcgtcgtcgctggcacgctctccgccgcgctgccggcgtgggcgatgctgctcatgggcgcggcgcagaacctcctcggctacggatggctctggctcatcgtcaccggacaggcgccgccgctgccgctctggatggcgcgtgcatccgacagggccagcttcgtgttcgtctacgccgtgtgcctgctcctcgcctcgtacctcgccggcgtcaagctggtccaagacttcctgcagctgtctgacggcgtggtcgtttctctcaccgtggttctgctcgtcctccttatctcgccggttgccgtccctgtggccttgacgctgacgccggaagccgagtgtccgatccgggaggccctcctgtcgtcgtctgaaccactgacgggagaggggaacgcttcgcaagaatcgcctccatgcgcatctgagagcgggggcaggccggcaccgtacctgggggagaacttcaccatgatggaggcactggtgaaggctgacttttggctgatctgggtgtcgtttttgcttgggtcgggatcagggctgacggtgatggacaatctgggccagatgagccaggctcttgggttcgaggatgcgcatatcttcgtgtcgttgacgagcatatggaacttccttggtcgtattggaggtggctacttctctgagatcattgccaggcaacgagcatatccaaggcacatagcactggcatttgctcaggtgctgatcgccgctgcgcacttcctcttcgccatggcctggcctggaactatctacatcgggaccttcctagtcgggctcggatacggagctcactgggccatcgtgccggctgccgtctccgagcttttcggcataaagcacttcggcgccatgtacaatttcctcgctctagcaaaccccactggatcccttgtcttctccaacctcatcaccagtaccctgtatgattacgaagccgagaaacaggctcgccagcgtcgtcgtcgggtcatggcggaactgctggcgtcgtctccaagatcgcttcacagcgctggtctttttgctggtgcagtggtggaggaggaggaccactcatcaagtgcgaagggcctgcttgcttcttggtcagctctctgattatgtcggtgctgtgcgttgttggagccggcctgagcctcgtcactgttcacaggaccagacgggtttatgctcgtctgtatcggtccgtacgaacgtgaaattttcgtagatagaagtataaaatcatcgtgctacttacttcgtaccaaattatatatgcttgtatatacacatagagttacgttgtaagagaccattcgttgtgtaaatatatacaatatttgagtg

SEQ ID NO: 108882 - DNA, 267 bp, Zea mays
  Clone ID: MRT4577_30796C.1
agcacagtagccacacttgacgttgctacgacactgtagacgctcccagacaggacgtactgatggatggctaaggcgaaagccactgcgagagcggcccaggccacgagaggcgagagactacgccatatgaaccggccgcacggcgagctcactgatctggagtcacgatctggaggagcacaacactgacgcgtccctaccgaagagagacccggctgacgagctcatcgtccacgacacagacgaccaccaagagttcttcgc

SEQ ID NO: 108883 - DNA, 830 bp, Zea mays
  Clone ID: MRT4577_30797C.1
gacaaaactacgacccactggaaagtctcgcactctcgcgccgcccgaccccgagctccagcaagcataaagacagcgcgagagagagagaggaatcttttgtgacgacgaacgcagggtggtcgttgccatggggaagctcgcggcgaggctgcgggccttctccaggaaccgatggctggtgctggtggccgcaatgtgggtgcagtccatggccggcatcggctacctcttcggcgccatctcgccggtgctcaaggcccgtctcgggtacaaccagcggcagctggccgcgctggccgtcgccaagaacgtcggcgggtacgtcggcgtcgtcgccggcacgctctccgccgcgctgccggcgtgggcgatgctgctcatgggcgcggcgcagaacctcctcggctacggatggctctggctcatcgtcaccggaaaggcgccgccgctgccgctctggatgatgtgcgtccttatattcgtcggaaacaacagcgccacgtacttcaacacggcgtcgctggtgacatgcgtgcagaacttcccggcgagcaggggcccgatggtgggcatcctgaaggggttcctgggcctgacaagcgccatcctgacgcaagtctacgcggtgacgcgcgcgacagaccaggcctcgctcatcctgatcatcgccgtcggcccgtcgctggtcgccgttgccgtgatgctcgtcgtccggccggtcggaggccacctgcaggcgcgtgcatccgacagggtcagcttcgtgttcgtctacgccgtgtgcctgctcctcgcctcgtacctcgccggcgtcaagctggtccaag

SEQ ID NO: 108884 - DNA, 487 bp, Zea mays
  Clone ID: MRT4577_30798C.1
ggcttggaacctttgggctgatttatgtgcttgaatcgggtcctgttctcgtcgagagataagaggaggcctgcgaagtcggttgatttgccgtcgggtaataggcatttagcgaaggtgtcgcattaggtgtctgttgctgtgcttacgcgttcgtaggaggatgtcgttagttggttggggactagtgatgctgctgtggtgtctcttccttctgttgatttgtaacatcatttctttggaggtatggaagtcgaatataagagtatgtacagtgggatagataacgacagtagcttcttcaggattgaaacggctagggtagatgatgatacgaagtacagacgattgcagagggggagtcaaccaatgggaaatacggtaaagggaggacccgtagagtcgctcgctcgtctctcctaactccttccctgcacaaggcatattatgcaggtaggacgcaatactacctagagagccaccgatt

SEQ ID NO: 108885 - DNA, 310 bp, Zea mays
  Clone ID: MRT4577_30799C.1
gcggagtttactttgcttccgaactcgtcgccgggaccatgtgtttcgtgcgcaacgaccgaccagatgtatcttgtctgaaccatactcttgcggaccgcttacgtaggctcctgaaagatcactacggctctccggtgccacgtatgctcgacatgagagagagcttaatactccatgtgcgaaagcagggggagctggatggatgccggcgggctaacatttaacagagccccggccaagatcaggctacagagctatagacttgactctctgaacatacgggagatgctgatgtggacgacggggg

SEQ ID NO: 108886 - DNA, 1774 bp, Zea mays
  Clone ID: MRT4577_3079C.1
cacatcgtatcatggctataggttctctggccgcggctggtggccaacaagctcttccggaagacctcgggcagccacgctttcgtcgccgacttcccggccgccgatgacgatgacgacatcgtctttggaacggaggccgacggcgggggcgggtgcagccccgacgcggacgccagccgctgcgtgaagcgggcgcggccccatgagcgcaacaagaccctaaagtacaagctgttcgcgagcacgtggaacgtgggcggcgtggcgccaccggacgggctggacctgtcggactggctggacggcggcgacgacgacgggccctacgacatgtacgtgctggggttccaggaggtggtgccgctgcgcgcgcgcaacgtgctgggcgccgacaagaagcgcgtcgggatgcggtggatcgagctcacccgcgccgcgctgaaccggtcgcactcgcagcgcagcaggggcggcggcggcggcaagcagaaggtgcacccggtgcgggacggcggtggcggcgagctgggcagggagtaccggtgcgtggtgagcaagcagatggtgggcatcctgctcacggtgtgggtgcgctccgacctccgccgcttcgtccgccgccccagcgtctcctgcgtcggatgcggcgtcatgggctgcctcggcaacaaggtgagtatatagtactctacttggttactcccgaatatatggtggccgccggcgcggcatctctagctaagctaataagcaaacggtcgagaaacgaatggcagggtggcgtgtccgtccggttctggctgcacgacacgagcttctgcttcgtctgctgccacctcgcgtcgggcgggcgcgagggcgacgaggcgcaccgcaacgccgacgccatggagatcctttcccggacgaccttcccgcgggggcacgcgctcaacttgccgttgccgcagaacattctagaccacgaccgggtgatcctgctcggggacctcaactacaggatctccctgccggaggccaagacgaggctgctggtggagcgccaggactggaagacgctgctggagaacgaccagctgcgcgccgaggtgtgccgcggaggcgcgttccagggctggagcgaggggcccatcggcttctccccgacgtacaagtaccaccccaactccgacgcctactacggctgcgccaccgccgcccgcggccggaacaagcggcgcgcgccggcgtggtgcgaccgcgtcctgtggcgcggcgcggggctcgcgcagacccgctacgaccgctgcgagtcccggctgtcggaccaccgccccgtccgcgccgtcttcgcggtggaggtggatgcgcccggggacctcaactcgctcaggagcttcttcatgtccgagaggttcgacagggaccagatgctgctccgcaaggacgacgtcaacagcgccagattcgccgacactctttgagacatgcgtgttgagagggtgaagttgtcagtccagttctccgactgcaattgtactacgcaggcaaaagtgtgatgcagagtacatatatggatgtttttcatttctgagtcagtcagtgttcatacggtcgtatctactgcaggcagctaggaaggatacagagatgggttttatttgtctgtctgtttccaccctgttccctacgttctgtaactacgtgtgtactcttcttgatccagttagtatgatttggtcttcagtttgttgccatggacaaccatgaatgaagatagaatttgagcagc

SEQ ID NO: 108887 - DNA, 388 bp, Zea mays
  unsure (1)..(388): unsure at all n locations
  Clone ID: MRT4577_307C.1
cttggcacctattacacggccgacctatttttttttttttttttttaatattttttgttgtgttttatttttttattttttttttatattatttttttttttgttttatttttttttaacatttttttttttttttttttgtaacagagtcccgaaggccgtngaacattggagaggtagatgggggaaaataaaaaacttaacaccaaatattctcttgtaaaaaaaaagggggggggagagctaaatgccaaaataaaccaggttcccgattaagaatgcgaaaaaagaatttttgggcccttgggtttattttaaaagaataaaaaaaaattgggattttttttgaaacatgaaaatggattgtgttggggttgtccattgttgg

SEQ ID NO: 108888 - DNA, 379 bp, Zea mays
  Clone ID: MRT4577_30800C.1
caggtacctatctagaattcgcgggccgacccacgcatcagcattgattcttgacgagatcgagcttcttttgcaccacaaggtccaagatgtcttgcaactgcgggtcaagctgcggttgcggctcaagctgcaagtgcggcaagaagtaccctgacctggaggagacgagcaccgccgcgcaagccaacgtcgacctcggcgtggccccggataacaaggccgccccctacttcctccaaggcgccgttgactccggcaaggccttccagggctgcagctgcggtggcaactgcaactgcgacccctgcatctgctgatgacatcgattcagtaccatggatagtggtactatccatctacacttctggggtggtct

SEQ ID NO: 108889 - DNA, 365 bp, Zea mays
  unsure (1)..(365): unsure at all n locations
  Clone ID: MRT4577_30801C.1
gaacgaatagatgcctagcattagtagccgtgttgatggacacagcgaatatgaccattcatacaaacaacactacgggcaatcaactgagaatggcgagtggaatggcactaaattctagcatatatacagttgacactttgacagttttgtcccttcattcaaacagccaattgtcaggcaggatcaagagggaggatcgaccgaactggcagcatgaagcagcatggcgacagtcaccactaagtactcacagccaacacgtaagccgtagggggtgagcctggatgccgtacaccgatggccgncactgatatcagggggtggggctactcccatctggtctggaaaacgctacgcgccgg

SEQ ID NO: 108890 - DNA, 361 bp, Zea mays
  Clone ID: MRT4577_30802C.1
gaatcaagagtcatctctatgtctttgacattgcacggatgcagcttttgcctcgacgcataccagttgactccacactgctgcatgaccatcatagccatgtgacacggccaacagcgtggcttagtcatataaatgtgacgtaatacctcgatccaatgtccacgaacaaggattctacatacgctgtcgcctagatggctgctgtggccgaccgctgtattcactacgaaggtgaattccgtctcatcatgaacatcatcgtcaatgcactgattcccttgccgcacaaccagtctggcaatcgccctatcggctcgtcaactaccatgctgccgagcgatccggactgtgatttctc

SEQ ID NO: 108891 - DNA, 407 bp, Zea mays
  Clone ID: MRT4577_30803C.1
aattccccagaacaatagggttgacccacgcgagttcctacccgcgggcgcgagcggccgcccgggggggttttatgagacattcgaaaatctacaacggcacgcgagagaattgacaagggaaaagcaaaaacgaccaatatcaaaagggcatagacacaaaaccattacgaaatccacaagggcacgctgataatgctagcaaagcaaaccgacatgaaaagcaccaaagagagcatggaaccaaacaaagaacctaaagaggacaaaactaactggccggctaagacaaaatccgagccgaaagcccgcggaaaaaaaaaggggcagacccgatccaccccaaaggcagagcgaaaagcggcccgaagtgccacttatatacagacaaacgccaaaaacgtggg

SEQ ID NO: 108892 - DNA, 769 bp, Zea mays
  unsure (1)..(769): unsure at all n locations
  Clone ID: MRT4577_30804C.1
attcagagcgacactcctccccgcccttcgtaagtactgtaggcgccgccgtttcccccatccgttccccccggcgctccgcctccgccgcgcctcctccgtctgcgagcggcagcgcccgatcgacgaatcccgcgatggccggcggcggcggcgggttcctcgacctggagcggcacttcgccttctacggcgcgtaccacagcaacccggtcaacgtcttcatccacgcgctcttcgtctggcccatcttcctcaccgccctcctgctcctccacatcgccccgttcccgcgcgccgccgcggtcttcaccgccgtctacggggccttctacgtctccctcgaccgccgctcgggcgcgctcgccgccctcctctgcctcctctgctggggcgccagctccgccctcgccgcccgcctcggcttctccctcggatggaaggtggtattggtagctcagctgttctgttggactatgcaattcattggccatggagtttttgagaagcgggcacctgctctagttgacaatcttgtccaggctttgttgatggccccatatttcgtgcttctagagattctccacaagtttgccgcttatgaaccgtatcctggcttccatgccaatgtgcaaaagctgattgacgccaaacgcaaggagtgggcggacaagaaagcaaagaagatgtcatgaactgtgcccaagaactcctgatgcctgatgctacgnttgttgtgtaacagggtaagacgagagtgatctaccct

SEQ ID NO: 108893 - DNA, 263 bp, Zea mays
  unsure (1)..(263): unsure at all n locations
  Clone ID: MRT4577_30806C.1
ggcgacccacgcgttcttccaactagcaacatagatttattattgtgnaccaacatggcagcgggagatttttcttctatgctcctgttctaatcagtgctgctacttataccatttatctcattgcatgaagctcctatagcttactatcatcctctacttttactacttttttttttttttatatcccattactttaaccttcatattatcatttattttattttattttactttatcatcttattttctctatatttttc

SEQ ID NO: 108894 - DNA, 148 bp, Zea mays
  Clone ID: MRT4577_30808C.1
gccacgcgtccgaccacgcgtctcgatagcgctgatgttataattatcgacgggcacgtctacactattgtgactgttgtcaattcgcaactatttggtgacatcaatgttcttaagtctgtgccaattcaggtgactgacgatgtaa

SEQ ID NO: 108895 - DNA, 567 bp, Zea mays
  Clone ID: MRT4577_30809C.1
gtgttagcccgcgtgctagggtgtgtctcacgtgacacttcggccctactcctccacgaccctcgggcacgcggacagtcctcgcaaccctgtccctgttccctcccggatccgtccgggacgctggtccggctaaatacacacatactcttagtcagatccccgtagactgggtacgtacatagtaatctactactgcactcccggcgggtctctgacccgcggcgcttgacttctatagccagtaccaacgtcgccacgtatagcccgaactctggactggactgtatctactactaaacggctgggaatcgagtaaggggattgtcacattaagaccgctaatgcaaacccttaacgtgttaggatcgtgctgcggataacgtaggacaaggttcacacccgtgccgagggggacggttagtactcaatcctaatgaccatctaccgtgtgcatgtgcctgcctcgaacgcacacctgctttacacgacaatgactcccacgagtttgcttaacaggggtagagtggtcacgatccgggtacttaaggaggctaatatcaaagt

SEQ ID NO: 108896 - DNA, 1788 bp, Zea mays
  Clone ID: MRT4577_3080C.1
ccaaaagcaagcggaggttctctggccgcggctggtggccaacaagctcttccggaagacctcgggcagccacgccttcgtcgccgatttcccggccaccgatggcgacggcgatgtcgtctttggtggaacggagttcgacggcggcgggtgcagccccgaccccgacgacgcggacgccagccgctgcgtgaagcgggcgcggccgcagccgcagccgcaggagcgcaacaagaagaccctcaagtacaagctgttcgcgagcacgtggaacgtcggcggcgtggcgccaccggacgagctggacctgtcggactggctggacggcggcggcggcgacgacgacgacgggccctacgacatgtacgtgctggggttccaggaggtggtgccgctgcgcgcgcgcaacgtgctgggtgccgacaagaagcgcgtcgggatgcggtggatcgagctcacccgcgccgcgctcaaccggtcgtcgtcatcgcacgcgcagcgcgggggagggagcggcggcggatcaggctcaggcgacggcggcggcggcggcaggcagaaggtgcacccggtgcgggacggcggcggcggcggcgggctggcctgcagggactaccggtgcgtggtgagcaagcagatggtgggcgtcctgctcacggtgtgggtgcgctccgacctccgccgcttcgtccgccgcgccagcgtctcctgcgtcggctgcggcgtcatgggctgccttggcaacaagggtgccgtgtccgtccggttctggctgcatgaaacgagcttctgcttcgtgtgctgtcacctcgcgtcgggcgggcgcgacggcgacgaggcgcaccgcaacgccgacgccacggagatcctctcccggacggccttcccgcggggccaagcgctcaacttgcccttgccgcacaagattctagaccacgaccgggtgatccttctcggggacctcaactacaggatctcgctgccggaggccaagacgaggctgctggtggagcggcaggactggaagacgctgctggagaacgaccagctgcgcgccgaggtgcgccgcggcggcgcgttccagggctggagcgaggggcccatcgccttctccccgacctacaagtactgccccaactccgacgcctactacggctgcgccaccgccagcgccaccgccgacgcccgccggcacaagcggcgcgcgccggcgtggtgcgaccgcatcctgtggcgcggcgaggggatccggcaggcccggtacggccgctgcgagtcccggctgtcggaccaccgccccgtgcgcgccgtcttcacggtggaggtgggcgcgcccgcgcccgggagtaacctcaactcgctcaggagcttcttcatgtccgagaggttcgacggggctggcagcaggagccccgccgccgaccagctactccgcagggacgacgacgtcaacagcgccagattcagcgacgcgctttgagacacgcatgggatgggagggtggagatggaattgtcactccacttctccggttgcggattgtacttgcgcacagacagaagatcgtatctacaacatgctgctaagatacagagatggtttttttctttttttttaaaaaaaaatccaccctgttcccaacgttctgtaactactatacatttgtactcttgttgatccagtgagtatgattgggcctcaagtcaagtttgttgccatgggcaaccatgaatgacaacagaaatcacagagaaaactatatatattcagagacagcagaattcattt

SEQ ID NO: 108897 - DNA, 322 bp, Zea mays
  Clone ID: MRT4577_30810C.1
actcactctgactatttctcaaagcctggttcttctgattggatggagaagtatgatactgtttcaatgacactgtctccaattttaacctaatctcatttcattaaatctaatctgaatcttactctcatcccatatcctaatcatatcaattcttaatctcacattaaatttatgatacgagcaaagccaggcatgaaataatatcaattataaagtatcttccttcaccatatttatatgtattgaatttacctacattactcttatacatgtatatgttctactctacataatagtactgttctacattatagacatt

SEQ ID NO: 108898 - DNA, 340 bp, Zea mays
  Clone ID: MRT4577_30811C.1
cggacgcgtgggctcaaacagacaagaagcaagagcaaaagttcaagaaaagataaaagagttataaaatgaaagagaacaaaagcttactcaacatcggcggtagtcgcgccgtactggcacagcggaccgagtccgacctgtcgcggacgctcgtcgccccacggcccgatgccaaggcagtggtggcggggtggacctcacaggagtcaagtaggagatcaagcggcagttcgacgtgtgctggggctcaccgcgctgcagctcgccacgaaccacatcaccagcttctatgagatggttctaatgacgaagtttctgcatgtacaatcagagagga

SEQ ID NO: 108899 - DNA, 171 bp, Zea mays
  Clone ID: MRT4577_30812C.1
gaatcggcaaaggtgacaggtttcaatagcttgggtgccaatgccacatgggaccatcagttttaactatgaaaatatatcttagggggaggggagggctaggtcacctctacagtgagtgccttcattcattcggtctgtggataatcaaggctttccttggctgcattt

SEQ ID NO: 108900 - DNA, 266 bp, Zea mays
  Clone ID: MRT4577_30813C.1
atgacaatgtggcaggaacgcggcctagagcgttttttttttttatgtgtttttttattatacattggcaataccagacaggataatgggtgcattcttactgtataattgacatatatatgaatagaggaaatatggctataaggatatttctcaaaatatataaataagaagggggggagatggacacattaacacgtgaggggatgagcgaagttgatggaaagaaaataggacgagaaaagcttggggtgagtcgtgacgat

SEQ ID NO: 108901 - DNA, 401 bp, Zea mays
  Clone ID: MRT4577_30814C.1
ctcactcgtccgcggacgcgtgggagatacttggtgcagagaaggctttattcagagctctaaagacaaagcattctacacctaactcttgctatccggtatgatgcccttggtgatggtgaggacaactccattggcactgagagtcgacttaagcttgagacacggcttcaagttcttgagggtagagaacttgggaaatctgctggttccacaaaggggaagcccaagatagaagtgtatgaaaaggaccggaagaagggtactggggctttaacaactcctgctaagacatataaccctgcagctgatctggtactcacggaagaaacaccaaagaagtcagaatgggcttcaaagaagaggaaacataatgaggttggaactgaaccaatagcaga

SEQ ID NO: 108902 - DNA, 176 bp, Zea mays
  Clone ID: MRT4577_30815C.1
attgatggtgccctctcttagatcgcttatgagtcatagttcaatagggaaggggcttgttttttattcgccccaaaccaaaaccaaccgtcaccaattgaagatgcaacaacgacaacaacgcatgcggcagttagtaatgaccataatatttgatccccatgagaatacaaatg

SEQ ID NO: 108903 - DNA, 256 bp, Zea mays
  Clone ID: MRT4577_30816C.1
aaaaggggtttcacatactaaacaaggcgggccagggtgcccccatgccgcaaccaggcacacgggtcctggttgaacccaccccctgaattacctttgggactaccagcaatggaagggttgttacacccacagagcaagcctccaggaagggaattgcaagaacagattcattattcggggcttacaagagccgggaattaaagatctgttgccaaatttgtcaaaacatacaaactgcaacatggggcccctt

SEQ ID NO: 108904 - DNA, 1170 bp, Zea mays
  unsure (1)..(1170): unsure at all n locations
  Clone ID: MRT4577_30817C.1
tagttggtgctcgccttattgcacatggtggaagtttgctaaatttagccaagcagcctggtagcacaattcangatacttggtgcagagaaggctttattcagagctctaaagacaaagcattctactcctaagtatggcctcatctaccatgcatccttaattggtaaggcttctcaaaagcacaagggaaaaatctctcgttctcttgctgcaaaaactgctcttgccatccgatatgatgcgcttggcgatggtgaggacaactccattggtactgagagccgacttaagcttgagacacggcttcaagttcttgagggtagagaacttgggaaatctgctggttccacaaaggggaagcccaagatagaagtgtatgaaaaggaccggaagcagggtgctggggctttaacaactcctgctaagacatacaaccctgcagctgatctggtacttactgaagaaacaccaaagaagtcagaattggcttcaaagaagaggaaacatcatgaggttcaaactgaaccatcggcagagcttgcagagggagcagtccaggaggataggaagaagaagaaaaagaacaaggaaagcgaggaggctcctgctgctgaaggtgatggtgagaagaaaaagaaaaagaagtccaaggatgtcggggaagagcctgctgtggctgctgctgctgccacagaaggtgagaaaaagaagaagaaaaagaagtctgacgcggacggtgagggtgttacaacgcaaaccgaagagtctggtaagaaagataagaagaaaaagaagaaaaggcatgccgatgatgagtgagacattcttcggaagagaatgtgcgggtaccaaatgctgggactcagctgttctgtaaaatgggtatcacggggttagaaaacatattgagatcagtttttggggttacctggtttttttgggggacctggcttgtattcaacaattacttgctcggtctagatgatgatggaatttttaacttttgctgttgtaaccccataaatttagtatgatgattgtcatggtaactctgcaactgagagaccttccatactcaatgctgacctggacttgctttaaaaaaaaaaaaaaaaaaaaaaaaaaaaaaaaaaaaaaaaaacggacgcgtggaaaaaaaaaaaaaaa

SEQ ID NO: 108905 - DNA, 2172 bp, Zea mays
  Clone ID: MRT4577_30818C.1
cggccgggcgggggcactagcagagctaaaacccttgcggcggctacctttccctcaccccctttctcgcctcgcggcggctacctttccccccttctcgcctctcgcctcgcggccgccgcaggcgaccccttgtcgcctcgtgctgtccaccgccgaatcttccccaggttagggagggtatctgttgtttcagctcagttttaccgggggactggttgtgggcggagatgttggtgctctttgagacccccgcgggcttcgccctattcaaggtgctcgacgagggtaagctcgacaaggtcgaggatctatggaaggagttcacgacgtcggactcagcaagaaaggtggttgagctgaaggctttcaataagtttgagaacacatctgatgctctatccgcggcaacccttattattgatagcaagcctagcaagggtctgcgcaagttcttacagaaacattgtgagggtgaaacattagcggttgctgattctaagctaggaaatgctataaaagaaaagctgaaaattgactgccttcacaatagtgctgtgatggagctgatgagagggctgagaaatcagctcactgagcttataactgggttgggtgctcaagaccttggcccaatgagcttgggattgtcccacagcctgtctaggtataagctgaagttcagtcccgagaaggttgataccatgatcattcaagccattggattattggatgatcttgacaaggagcttaacacttatgccatgagagttcgtgaatggtatggctggcactttccagagctcaccaaaatagttacagataatatacagtatgccaaagttgtgaagatgatgggcaacagagccaatgcagtcaaccttgacttctctgagatattgtcagatgaagagctagaaacacagctaaaggaggcagcagtgatatccatgggaacagaagttagtgacctcgacttgtcgaatatcagagagctatgcgatcaagtgctggccctttctgagtacagagcccagctgtatgactatttaagaagcaggatgaacactattgcaccaaatttgacagcactggtgggtgaattagttggtgctcgccttattgcacatggtggaagtttgttaaatttggccaagcagcctggtagcacaattcagatacttggtgcagagaaggctttattcagagctctaaagacaaagcattctacacctaagtatggcctcatctaccatgcatccttaattggcaaggcttctcaaaagcacaagggaaaaatctctcgttctcttgctgcaaaaacagctcttgctatccggtatgatgcgcttggcgatggtgaggacaactccattggtactgagagtcgacttaagcttgagacacggcttcaagttcttgagggtagagaacttgggaaatctgctggttccacaaaggggaagcccaagatagaagtgtatgaaaaggaccggaagcagggtgctggggctttaacaactcctgctaagacatacaaccctgcagctgatctggtactcacggaagaaacaccaaagaagtcagaattggcttcaaagaagaggaaacataatgaggtggaaactgaaccattagcagagcctgcagaggaagcaatccaggaggatggtgaccaggaggatcggaagaagaagaagaaaaagaacaaggaaagcaaggaggctcctgctggtgaaggtgatggtgagaagaaaaagaaaaagaagtctaaggaggtcgaggaagagcctgttgtggctgctgcttcagaagttaagaagaagaaaaagaagtctgacgctgatggtgaggatgtcgcaatgcaaaccgaagaatcaggtaagaaagagaagaaaaagaagaaaaaggcgtgctgatgatgagtgagacattcacactggaagagaatttgcgggtaccaaactaccaaaggctgggactcagctgttctgtaaaatggatttgcgggtagaaacgatatcgacatcagtttttttggacccggcttgtattcaagtacttgctcgatcctggtgatgatggaatttaagttttgctgttgcaacctgatatattagtaaaaaaaaaaaaaaaaaactcgagactagttctctctctctctcctcgtgc

SEQ ID NO: 108906 - DNA, 317 bp, Zea mays
  Clone ID: MRT4577_30819C.1
tttgttttattttttttttttttttttttttttttttttacattttttttttggggagaagagcaaaaaaaccccgacaaaaaatgtaaagcccttaaagcccaaaaaagggaaaagggcaaaaaaacgggatttttgggcaccagggcaaaagcaaaaggacaaacacaaaaacaagctgccccacttgaaggaaacgggaccacccaaccaacatttccagaaattaacaaaacggttaaactggttattaattgacccaagcccagaataggccgcggccccaaaaaaaaaggaaaaaggggcccaaccggggc

SEQ ID NO: 108907 - DNA, 649 bp, Zea mays
  Clone ID: MRT4577_3081C.1
cggccgcgtgggctggggttccaggggggggggccgctgcgcgcgcgcaacgtgctgggcgccgacaagaagcgcgtcgggatgcggtggatcgagctcacccgcgccgcgctgaaccggtcgcactcgcagcgcagcaggggcggcggcggcggcaagcagaaggtgcacccgggggggggcgggggtggcggcgagctgggcagggagtaccggtgcgtggtgagcaagcagatggtgggcatcctgctcacggtgtgggtgcgctccgacctccgccgcttcgtccgccgccccagcgtctcctgcgtcggatgcggcgtcatgggctgcctcggcaacaagggtggcgtgtccgtccggttctggctgcacgacacgagcttctgcttcgtctgctgccacctcgcgtcgggcgggcgcgagggcgacgaggcgcaccgcaacgccgacgccatggagatcctttcccggacgaccttcccgcgggggcacgcgctcaacttgccgttgccgcagaacattctagaccacgaccgggtgatcctgctcggggacctcaactacaggatctccctgccggaggccaagacgaggctgctggtggagcgccaggactggaagacgctgctggagaacgaccagctgc

SEQ ID NO: 108908 - DNA, 623 bp, Zea mays
  Clone ID: MRT4577_30820C.1
attgggtacctcgaggccggccgggaacatgagaatcgaggagagaggcgtcttcgcactcccctatatcctcgactcaaatctttcctcacttcccccccttatcatatttgtcaccaccggcgtacactcaccgcgttcaacaacatcagtgagcgtacagcatctcgatcacatcggtcacgatggaatcatagtcttcaaaacgtgctgagagctgtgctggcccgagaatgggatttcgactgatcgccagatgacagctgagaagaccattgggagaggcgatgatgctttcagcaccttcttccgtgagagtggagctgggaagtagacgccccgtgctgctttttgtgacctgaagaccactgtaatctatgaagtgactactgtgacctacagcctagctggttgttcgtgagcatgtcatcagtggctaaaaagatgtgaccaacaacttggctcgtgggcactagaccatagactgagagatcgttgagatgtggcttgaccgcatgaactttgtgtcatatagatgaactgggctacagcgcttcctcctcttcaactctgttgtgggacgagcaagctctgggctggggactatcatcctggaacgactg

SEQ ID NO: 108909 - DNA, 426 bp, Zea mays
  unsure (1)..(426): unsure at all n locations
  Clone ID: MRT4577_30821C.1
acctantttttttttttttttttttttttttttttgtttttttttagggtgtttttcccggtttttttccctttttcccccttttttggaaaaaatttttcctttcggaattagggatgggtaaaaaaaaattcgaggctttccccccaaaatttattcgggaaaacaacaaaaaagcaaccttttaaaattttaggcttggggcgaaaaaaaatttttttgtaacttgaacaattttttttaacccttaaaaagccccaaaaaagggggaaccctttttttggaaaccccccaaagctggtccccccttccagggaaaaaaagctaattgggaataaccataaaaccccctcctttaaaaaggaaaaaaccctggatgggcccctcaacacggcacaaacaaaaaggttaaaaggcctcccaagg

SEQ ID NO: 108910 - DNA, 193 bp, Zea mays
  Clone ID: MRT4577_30822C.1
cccccttttaatatttttttaaagcaacgaaaccaaagccggggaattataaaaaaaaaggggaaacacgaccggaggccagtacaacatgtcacagaaatagctatgctgacgtgtgaatgaataaatacgtgggataatggagaggagcaatagcaggttatcctagagagaaaataggtaaaacactaat

SEQ ID NO: 108911 - DNA, 448 bp, Zea mays
  Clone ID: MRT4577_30823C.1
gggataaaatttaaccacttaaaaaacctacccaaacaaacctttagaaaaaaaaaaaaaaccgaatgatcactctcattttcaccccccaattttatcctttcccaattttcccctcaaaatacaaaaattaaaataaaaaactaattttccccacaaaacaaaaccttctcctattgttttaaaaaaaaacaccggaccatttgttaaaaacctctaaaactatgttacccatacacacgaccctttttctaaacaggcgggagagaggtttcccatctcacattttgacctccttaccgtaaacccaaattaaaaggcacccacctccttttttggttttataatggacccttttcttacaaccatttgatcttttaaacaagggacaaaaataaaactttctccttttttcttttaaccaaaaaacattctatttcaccacctt

SEQ ID NO: 108912 - DNA, 649 bp, Zea mays
  Clone ID: MRT4577_30824C.1
ggccgcttttttttttttttttttgtttttttttttttttttttttttttttttttttttttttttttttttttttttttttcttcttacaaaaaaacctggtgatgcttggaaacatttcataaaccaaagcccacaacttgagaaacgaacgcccccaattatacttccatgccaaactggaacaggaaacaggggatcttggggccaacattttccaaacagaaaaggatggacccccaaacgcgccggggggaaaaagtttcttattggcgcccaaagaaaccctttgggcagggaacgcaccgggcgttcagcaaaacggcggggaaccagaacgccggcccatgaagttccggcaggggccccaacggccggaggactgggtgatctggggaccccaaaaaagctgggagttcaagccgtccaaggtccaaaaccccacgggccccaaagggaggctccccgccgacttaaggggttggcacccctccttcatattggaaacatgctcccgccaaacctggacaggcttggccggttcccccatgagaggggggtacacattttccgcgaagtccatgatgaaacccatcaccgccttgggtcgcccttttccccctttccggggagcttgggatctgccggc

SEQ ID NO: 108913 - DNA, 342 bp, Zea mays
  unsure (1)..(342): unsure at all n locations
  Clone ID: MRT4577_30825C.1
actacccacatttttttatcccaacccacataaacgcccnggcaaaacattcaactaaacaacacttggtagctctcaaaagatcacatccgtaacagctcaaaacacctaagcagcacaggaaaaccaaggtaaaacctacaataaacctacaaatttacctccctactaaaagtttctgacttatactactacataagaggatcatttccatggcatgacgctggacaggaacggcggttggaagctgatacagcctgcagccaaaaattgatacaaaggctgaggtgggttttccgaaccaccggatgacccgctcaaagtacctcctttagaaagaag

SEQ ID NO: 108914 - DNA, 1593 bp, Zea mays
  Clone ID: MRT4577_30826C.1
atgacagtggagaaaagaatgttctcatatgagaaaaatgatgatcctcaaagagcaatcacattcagggatggaaatcaaggtttggttaaaggattggataaaattactatatctcatgaccattctatttctaatgaaaaatcacaaacccaagagaagttaaagaaattcttgagacaggctcaaaatgagttcaaattgagaatcaagaagattagaagcgacaatggaacggagttcaagaactctcaaattgaaggatttcttgaggaggagggcatcaagcttgagttctcttctccctatacacctcaacaaaacattgttttggagagaaagaatataactcttttggatatggttaggaccatgcttgaagaatacaagacatcaaatcggttttgggtgaaggcgattaacaccacttggtactccatcaaccgactctaccttcaccgaatcctcaagaaaatatcatacaaactcctcaccgacggatttttacttggttatgactcaaacacaagggcatatagagtcttcaacaagtccactagattagatgaaatttcttgtgacattgtgtttgatgagactagtggctctcaagtaaagcaagttgatcttgatgagttagatgttgaagaggctctgtacatcgcgctaaggaacatgtccattggatatgtgtgtccacaagaacccgaagagccttcacaagcacaagatcaaccatcatattccatacaagcatctccaccaactcaagatgaggaactggctcaagaagaagagtatcaagatcaagacaatgagccacctcaggaagaagtcatcgatcaaggggagatgaagttgatcaagaaaaggaggatgaacaagagattcaagatcaaagaccacatcacccaagagtccaccaagcaattcaacgaaatcaccctgtcaattccatatttgacaaagtacattcaagatattctcaagaagtttggaatgaagaatgccaaacccatcaagactcccatgggaacaaatggacatctcgacctcgacacaggaatttacactcctaaatttgggctatggtaccccaagggatctacctttgatctaatcggatattctgatgttgattatgtcggatgtaagattgataaaaagagtacatcagggacttgtcagtttctggggagatccctggtgtcttgggcttcaaagaaacaaaattcagtagctctatgcaccgccgaagccgagtatgttgctgcaggacgctgttgtgcacaattactctggatgaggcaaactcttagggactatggcgacaaattgagcaaagtccctctcctatgtgacaatgagagtgatatccgcatggcggacaatcctgttgaagacagccgcacaaagcacatagacatccggtatcacttcctgagagatcaccaacaacggggagatatcgaaattgcttatattagcacccacaaccagttagccgatatcttcaccaagcccctagatgaaaagacttttaacaagcttaggaatgaactaaatgtcttagattctcggaactttgattga

SEQ ID NO: 108915 - DNA, 249 bp, Zea mays
  Clone ID: MRT4577_30827C.1
caacgcaacatgggttttattggtgttaaaaaaaatggcgttttcatggggcattacccatcctttaacttattcaacaaccgcccggtttgggaaaaaaaaaactaacttcagggggtccttccctccggtcttttttatttgtgacatttttgtataaaaaagaacgagctgttaaaaataactagggggcgacaactatttttgaacaaagggtgtgcaaaactattcgcgtggaccacaaaaata

SEQ ID NO: 108916 - DNA, 627 bp, Zea mays
  Clone ID: MRT4577_30828C.1
gaaaaatcacaaacccaagagaccttaaagaaattcttgagacgggctcaaaatgagtttggattgagaatcaagaagattagaagcgacaatggaacggagttcaagaactctcaaattgatggatttcttgaggaagagggcatcaagcatgagttctcttctccctacacacctcaacaaaacgtttttgggagcaaattctttattcttgttaaaagaggtagaaattcaaaatttgctcctaaagcagtagaatgctttttacttggttatgacttaaacacaagggcatatagagtcttcaacaagtccactagattagttgaagtttcttgtgatattgtgtttgatgagactaatggctcgcaagtagagcaacttgatcttgatgaattagatgatgaagaggctctgtgcatcacgctaaggaacatgtccattggagatgtgtgtccacaagaacccaaagagccttcacaagcacaagatcaaccatcatcctctatacaagcatctctaccaactcaagatgaggaactggctcatgaagaagaggatgaagatcaagacaatgagccacctcaagaaggcatcgatcaagggggagatgaagctgataaataa

SEQ ID NO: 108917 - DNA, 590 bp, Zea mays
  unsure (1)..(590): unsure at all n locations
  Clone ID: MRT4577_30829C.1
aagctaacatcttgtatttaaatattatangaaacaacaaccctatttaatagttccttggtatatatacaagatcatgtccaaaacatcaagcatttgaagactagatgtagtacatggaccaacctgcaaccttactttatcagagaaatcgtcagtccacacatatttgtcattaattaccaaggcactactgagaggttagatgcccacaccgtttcaccaaatgattggttaaaaagcacggactcctgtggagctgctactcgcgtgttttgttgaggcagacggaaacggcaggtgtcatcatcaagtacagatagggcgaagaaacctacaagtccagagttcatacaaaggcaaaataaatcaattcagtaaaaacaaaaactgttgctttgacctttctacatgagttacacgaaactgcatcaatttgctaggttatcacaaaaggatagtacttgggaagaaacaacaaccgaataccagctacttcaatcttcctcggccctcgtggaacgaaggaaccctcaatcgttacactcgagcagaacttgttgtcaaaggatagagacctgcagactttc

SEQ ID NO: 108918 - DNA, 658 bp, Zea mays
  Clone ID: MRT4577_3082C.1
cggatatagcttttctatcgactgaagaccagacctccctaccgatagtaactgatgcaacttacttactcgaaagacagacacgctgcactgcactccttgtagcgactatagtggcgcctagcttttgtttccgcacttaagatcccaagctccaagggatgggatggctgagatgagttcgcataacctactccggttagttcggatgatccgatatgatggcaaaactcctacctgctatggcagcctctacgctgtggattattgcgagataacttctatctcgtacttagagcagacggagaaccccactttgaaacttcattcaattggcattcgcactcaactgctttccattttcttgaacatgggaaccggcactattcgaatcagttcgttaactcgagttacactacgaacagagtgctgccgttgattgattgcaaaagtctgattccctaatagcacttgcttgttagctgaacttatcttttctttccggcgaagggaaacatggatcagttgctgctgccgtaagaatccgtattttgggatctgcagacgcaagaggagcgtgctaatagaatcgaatactacttgcgaaacggaactcagaagacttgatcttgatattttttttttggttttttttttt

SEQ ID NO: 108919 - DNA, 389 bp, Zea mays
  Clone ID: MRT4577_30830C.1
attcggctcgagggcatgtcctactactatctatagctagcttccaacaagatttgcgcttcagactttttggaggtctacttgggtgacatttttcagtaaggtccatgagagaagtgtgtagcttgtggactaggtagaggacagcaacatcgacagtccagcaaatgacatcaaggtatgtcgaggaagattggagctttcaagtcgataggtacaagtcacaagccacagtccgagaatctgaaaagcttaagctaattgttggtacgtagggagataccccgctcttgcttctcgtttttaatttggggctagtttggaaactccatttttctaagggatttctgtttttccaagaaataataaactaatttttttttggaaaa

SEQ ID NO: 108920 - DNA, 311 bp, Zea mays
  Clone ID: MRT4577_30831C.1
ataaaaaaaaacattatggcggtttttacagggattacattacatttacattcctttccctttttagggcttgtttgggggcaatgatagggggggattttggggcccccggttttctttttccaaaggaacccttttggggcccctaaagggggaatgtggggggggaattaccaggcccaaaaaaaaacaggggaaactcgcctaccttgtttgcacataaacatttttgccccccataatgtttgggcccccaagggaaatgctaaatccaattcttacaaaaacaaaaacgggtttaaccaaaaatt

SEQ ID NO: 108921 - DNA, 231 bp, Zea mays
  Clone ID: MRT4577_30832C.1
cgatctttgtaattttatagagactccctcaactgcatccgatcccgcctccgggtgttggtgcgatcactaataagcccacacatacatggatggagatgaagaagatcatctgcaccgttctcgtcaccgactcgtccaccacattactggccttggaggcacctgctccgtccctcaccaactctctttttgtggcgcaccccctatccccattacctatcacacctc

SEQ ID NO: 108922 - DNA, 272 bp, Zea mays
  Clone ID: MRT4577_30833C.1
tttttcagggtcatatctttgtaatgtggatagagaaaagagggaaacatttaaaaccaatcctagggaaatggtttcagaaaagccctctgggcaacttggtagtcttgtattatacaggtaccagaaacttaacattttagaccaagaaaaagagaaccgtgagcgttctgcacttctgccgcctgttacagtggtcaattatgtgtttttgcattccaaaaaaaaaaaaaaaaatacaaaaaaaaaaaaaaaaaaaaaaaaaaatttaa

SEQ ID NO: 108923 - DNA, 394 bp, Zea mays
  Clone ID: MRT4577_30834C.1
ccatccaatgccaaggaattgttcaatttgcgccattcaacagctagaaatgtgatagagagaacatttgggctattgaagatgaggtgggctatattaaggaaaaaactcatattttgacttacaaaatcagattaggatcatcaatgcttgttgcatattgcacaactttgtaagggataggcaaagagatatggatgatttacttttaggccaagttgatcaagtaatatctgttgaatctcatgatgttcaaagtgaagtgagtatgattaccaatgtgcaatcatcaaatcaatggactaactttagggacaccaaagctaaccaaatgtttgatgattaccaagcaagacgtggacaatgttatggagaagggtaaaaagtcaagctc

SEQ ID NO: 108924 - DNA, 418 bp, Zea mays
  Clone ID: MRT4577_30835C.1
cacaggaaaaggcacaagttttaaaaaacatcggcagcatacccacttatatcaggcccaaaacctttttttatcaggccggagtttattatttcaaaagggaccctatttgtatctagacctttctctaacatctaattcagacccacattagcctggcccatttcccccacctggaaaaagtcctggaaaaacacatggtaggggaccactttggcccgcttttaacgtttccccatccaaagccaaatttcaggggcccccggggcgccccccttttaacaaaacccattaataaggggatggaccgcaaaaggttcgggctccaaaccaacctccaccatttaatccaaaagcttaacggttttccggacctcacccttgtttacagggcaccaaggagcccattataggggac

SEQ ID NO: 108925 - DNA, 444 bp, Zea mays
  Clone ID: MRT4577_30837C.1
gtatggtaattatggtaaccaaaaaaaaaggggggtaattttggaaaccaaaaaaataaaaaccccaaggggacctgagggccccaaaaaagcgaaggggacaaaaggcaaccaaaagccgaggggaggacaaaaaaaaaagacgggcgaacttaggccaaagggaagggaaagaaaaaaggtcatcgggcacgacttaaaaaaaaaaggacaaagaaaagggagaggtaaaagaacaggagagaggaggggcaggaacaagaaacgaaacagcggaaaggggagagtagaaacgactcaacacacgggacaaaaatagatggaccaataacacaggaggaacatagaaacagaaaaccggggggaagaacctaagaacaaaacgggggggaaagcccccgaaaagccgcaagggggaaggggcccccaagccggggtaaggcc

SEQ ID NO: 108926 - DNA, 499 bp, Zea mays
  Clone ID: MRT4577_30838C.1
acggagcataagtaaaggcaggagcaggacagaccgtgacaacgcacagccgtgactacacgctggagcctgggagaaaggacatactccaggcggggctgatggggaccagcgccagtatccatgcgaggatgcataacaagaggtctccttgcggctacagactggtgcagcagcaaccgaggaccgacaccgacagagaaagtgccattcgtctccccagcatgctctggaggtgctggcataactggggagtgataggactatacgaccaagggcccaactattccacggccaacaacaaggcggtgaaaggaccgagccggaacagcgctcagcctgagtggcatagagggaggggaccgtggccagggacggcttgaggcgcgatgactggatcttcagcctggtcgagcccccggggtggacacccagggcgggggactggtgggacttcgccgggtggacaagggagtacattcccaactgcggggggcgg

SEQ ID NO: 108927 - DNA, 2054 bp, Zea mays
  Clone ID: MRT4577_30839C.1
ccggccgggacttccatcccattcccttccagacatcgacatggagccgttttttctgttcgtagggctggcccttgttctctgcttcctcaccccgtactaccgccacttgcaatctaagaaaacgagccctttggagccgaccgaatggccaatagtcggccatctccccggcttggtcgccaacatccatcacttccacgactgggccaccggcgtcctcgccggcgtgggctacaacttcgaagcccgcgcaggtcgcaccggcgtgcggtacttcatcacctgcgacccctccaacgtgcgccacatcttcacgtccaacttcgccaactaccctaaaggcgaagagtacgccgccatcttcgacgtcctgggcggcggcatcttcaacgccgacggggagtcgtggcggcgccagcgagtgaaggcccagatgctcatgaccggccctcggtttcgagccttcacggcgcggtgcagccgcgacaaggtggagaggagcctcctgcctttcctcgcccaccacgccgccgacgacggacgaacgccgccgtgcgacctgcacgacgtgttcctgaggctgacgttcgacatgacatgcactctcgtcttcggcgtcgaccctgggtgcctggcgttcggcttgcccgtggtccccttcgcgcgcgccatggacgacgcgctggagacgcttttcctccggcacatcatccccatggcgtgctggaagctgatgcacgtactggaggtagggcaagagaggaagatggccgcggctcgaaggacgatcgacagcttcgtcgccgccaccgtcgcgaaacgcagggccgacaagctgaaaggatgtgaatgctgcgtcagtaactcgtatgacttgctgtcatccttcatctgccacgaggaggacggctcgagcgaaaacgacgacgacgtgttcttacgtgacacgacggtgaacctcctgctcgccggccgggacaccacaggcgcggctctgtcgtggttcttctacctcgtctccaagaaccctcgcgtcgagcagaaaatactggacgagctcacgcccatcgctgcttcacggcggacgaaaggtgcagaagatgctgcacacgccgccagcggcatggtgaccttcgacgcagacgagctcggcagcctggtttaccttcacgcggcgctgagcgagtgtctgaggttgtacccgtccgtcccgttcgagcacaaggtcgccgacaaggtgctggtgttcaactactccatgggcaggatggagggcgtgtggggcaaggactgcacggagttccgccccgagagatggctcaacgaggacggaaccaagctccggtacgagccgtcctacaagttcatctccttcaacgccgggccgcggacgtgcctcggcaaggagatggcgttcgtgcagatgaaggccgtggcggcggccgtgctgtggaacttcgccgtcgaggtggtgcccggacacgtcgtggagccgaagctgtccatcatacttcacatgaagaatgggctcgccgtcaaggttacgagaagggacgggacgggacggcgccgtcgccgccgtgcgtgcgtcacgccgcttgcttttctgtggtctcgtctggggccggccccccggggcgtctcgcccgcccgcctgtgtgctctgcgcggtgcgtgggccttcacgttgcatgacacgtttcaatatgcatgtggccgtacgtggcatatggtgtcttcttgcacactagctagcgcaccaatgggcatgggcctgttggggatggtatatatctttcattcatatatggtgttgctcgttactttgtacgtttctggcagtttccatccaacactttcggtctgcgtgcattcatttcatttcctggagtagttgtaaacgctggaatgctatggtaggtcaggtaggatgatcaagatcagtagaggtcgtgctagccgtgtggcgcttggacgcgtggtatgtgctggctttattatatatacattctcggtggtagagcttagtgtcaaaaaaaaaaaaaaaaaaa

SEQ ID NO: 108928 - DNA, 1146 bp, Zea mays
  Clone ID: MRT4577_3083C.1
accggtccggaattcccgggtcgacccacgcgtccgccccaagtttatccgggggttctctcaggtcgacgtcggcatgacaaccaggtcgagcccgggttcggcaccctcattagagataacgagtttctgccaaggacctccgcggtccgtccctgacaaacagatacagcccgtccattccccaatccccgtgtcgcctgtgcccctctgccacctcgccgtcggcatgacaacagggtcgaccccgggttcggccccctctcagagaaaacgaaattctaccaaggattccgttgccctgtacgcggtgcaatgctataagtgctacaaatggagtacggttccaaaagaagaatttgagacgcttcgtgaaaacttcactaaggatccatggttctgcagcagacgaccagacagctcttgtgaagacgatgctgacattgagtacgacagcagccgcatttgggttttggacaagcccaacataccaaagcctccaccagagacggagaggctagtggttatgaggggcgactacagcaaaatggacacatattatgtcatgcccaatgggaagcgtgcaaggtgtgctggtgatgtggataagtttctggaggcaaatccggagtacaaagaccgcatatctgcttcggatttcagctttgcgccacccaaggttgttgaggagactgtttctcacaaccctgcctggcaagctgccaaggccaagaagcaggagaaggcagaggcacaaaagtgaatgatactcccaacggtgcttgtgttatgtttagatgatagtccgctcaagatcatgccccatcctatctagtgtgtacttgtctatctcgactgaagtcgatgtttaggtctttttagctgatttggctctgcatgcttcgttgcaacggagcccctgcgtgtcaattcctggggaataaatgagatgttgaataagtgctgtagagtgtagacctgcttttttataattaggcctcaagtcatgcttccttaaaaaaacaaaaaaaaaaaaaaaaaaaaaaaaaaaaaaaaaaaaaaaaaaaaaaaaaaaaaaaaaaaaaaaaaaaaaaaaggaaaaaaaaaaaaaaaaaaaaaaaaaaaaaaaggggcgggcggttttaa

SEQ ID NO: 108929 - DNA, 400 bp, Zea mays
  unsure (1)..(400): unsure at all n locations
  Clone ID: MRT4577_30840C.1
aaggaatactacaaataaaggcctgggggggggtatatatactcctcgctggggagaaaaaaatccggccgggaacgggctaactaatctagctagaagtcgccgccctggttgggcttgggccaggggaggatggccctttacagggggagcttttcctccccgagcgaggagcaaggggacaaggggccccccgggcggataaaagaaaacaaaaaaagggttttgggggggttggaccccctccaagccaactgaaaggggaagggcccccaagtaccccaccccggggaataataacaagggctggggggcaccctttcnttggggaaagggtaacggaagggcttcgtgacctacttgaagggggggggggccaagcccaacaccccgggggttt

SEQ ID NO: 108930 - DNA, 1790 bp, Zea mays
  Clone ID: MRT4577_30841C.1
gccgttttttctgttcatagagcttgcccttgttctctgcttcatcactctgtactaccgccacttgcaatccaagaaaacgagccctctggagccgaccgaatggccagtagtcgggcacctccccggcttggtcgccaacatccaccgcttccacgactgggccaccggcgtcctcgccggcgtgggctgcaacttcgaagcccgcggaggccgcaccggcctgcggtacttcatcacctgcgacccctccaacgtgcgccacatcttcacgtccaacttcgccaactacccaaaaggcgaggagtacgccgcgatcttcgacgttctcggcggcggcatcttcaacgccgacggggagtcgtggcggcgccagcgggtgaaggcccagatgctcatgaccggccctcggtttcgagccttcacggcgcggtgcagtcgcgacaaggtggagaggagcctcctgccattcctcgcgcaccacgccgccgcggacgacgaggggaggccgacgccgtgcgacctgcacgacgtgttcctgaggctgacgttcgacatgacgtgcactctcgtcttcggcgtcgaccctgggtgcctggcgctcggcctgcccggggtccccttcgcgcgcgcgatggacgatgcgctggagacgctgttcctccggcacatcacccccacggcgtgctggaagctgatgagcgtgctgggagtagggcaggagaagaagatggccgcggctcggaggacgatcgactgcttcgtcgccaccaccgtcgcgaaacgcagggccgacatgctcagagaaggagaaggcgagggcgtctgcagctcgttcgacttgctgtcatccttcatctgccacgaggacgactcgagtgaaaatgacgacgacgacgacgtgttcttacgggacacgacggtgaacctcctgctcgccgggcgggacaccacgggcgcggcgctgtcgtggttcttctacctcgtctccaagaaccctcgcgtggagcagaaactactggacgaactggcgcccatcgtcgcttcacggcggagagccggcggtgctgctgcagacgcggccagcggcatggtgaccttcgacgcggacgagctcggcagcggcctggtgtatctgcacgccgccctgagcgaatgcttgaggctgtacccgtccgtgccgttcgagcacaaggtcgcggccgccgccgacgttctgccgagcgggaaggagttgaaggcgggagacaaggtgctggtgttcaactactccatgggcaggatggagggcgtgtggggcaaggactgcatggagttccgccccgagagatggctcaacgtggaagggaccaagcttcggtacgagccgtcctacaagttcatctccttcaacgccgggccgcggacgtgcctcggcaaggagatggcgttcgtgcagatgaagaccgtggccgcggccgtgctgtggaacttcgccgtcgaggtggtgcccggacacgtcgtggagccgaagctgtccatcatacttcacatgaagaatgggctcgccgtcaaggttacgagaagggacgacgggacggcgccgtcgtcgtcgtgcgtgcgtcacacggcttgcttttgagttgagacttgagagactgaccacacagtgcgtctcgctcgcctatatgtgagcactgcgtggtttatatgccaacacgttgcatgacacgtttcaatatgcatgtggccgtacgtggcaaaaaaaaaaaaaaaaaaaaaaaaaaaaactcgaaaaaggggcccggtac

SEQ ID NO: 108931 - DNA, 202 bp, Zea mays
  Clone ID: MRT4577_30842C.1
tccacgcactcgtgaactcatctctttaacatttccacaatctatggaacaacataggattagtgggcttcatcttcaaacgacgataattgctgttatggctatcagtctgcacaaccattacctagttcatagaaaaaagattctgccaaaccaacatacagcaagacccattctacatcttgaatgcaacacttattta

SEQ ID NO: 108932 - DNA, 364 bp, Zea mays
  Clone ID: MRT4577_30843C.1
ccggcccgactcgtcaaggatgcctatcttcctatggtcgtcgtcgtcgtcgtcgtcggagacgtcctcgagtctccctcccctcccccccgccgaagaggaggagcgctattgcgatggaccgagccaagctcgtgtacctcggcctccccatcctcctctcctggtccgacggggctagcctcgatcatgctctcccagcgccgccaccggagcattgcgggccaggcgacgagtagcatctccgccgaccgagtccccgacatggagaagcggaagctgatgaacctcctcctcctcggcgccatctcggtgcccacttttctttatgcccgccccctacggcggcttcttcgcccctgcc

SEQ ID NO: 108933 - DNA, 207 bp, Zea mays
  Clone ID: MRT4577_30844C.1
gccatgcggtccagcagaaccagtatcgtgatgcaaggaggaaaggacgaagtcgttgacctgcggagcactgcaatcacccatatcatgtccttggggataacaagatgctttccggagcaggtgctgataagctgcatactgaaatgagagatgaaaaggagagtcctaaaggtgatcctagaggtatattacatggccatgaca

SEQ ID NO: 108934 - DNA, 360 bp, Zea mays
  Clone ID: MRT4577_30845C.1
cggacgcgtgggccgggggccagttaaagatggtggtatggtatggtagcggcgttgtgggagatgcgtgatgggaccatggttacggaccatgatgatgacgctgcgttccatttagctctctgctgcctgcttctgtattaaagaagtggttcgatgtctcagaactgaatacgatgcaaagaggacgtcaacagacatggaaaaagggggagacagagaaagagaccatggatctcttaccccagatcgctggattcaaaatgggaggctggctctaaagaagccaatgttacgaaggagccatagaagcgccaactgactatatagtatggcctaaatgaacttgtgggccatgac

SEQ ID NO: 108935 - DNA, 186 bp, Zea mays
  Clone ID: MRT4577_30846C.1
ggagccccaaacatcctttctacttagatagatacctttccatgtggaaggttcattcagggcgtcgctcacactgccacccgggggggtgggagacactacgtttctccttggcgttaaatgagtaaactatctagcgaggtagcttgaccgcggctccattacattattactacagtacctggg

SEQ ID NO: 108936 - DNA, 532 bp, Zea mays
  Clone ID: MRT4577_30847C.1
tcgaggccggccgggcccttttctgtctgcccccacagccctcatcgcccagcctggctccgtgccccctgcgccgaccctaggctccaacgggggcgggagtcaccaccatcgcaagaagggcacgagcggaggcggtaccgggagcagcagcactaccagcaccggtagacgtacctggtctagcttctgcaatccatggacataatttagatgtggccgacgacgaacagggggtcgccctccgtccgctgtgccctccttggcggacctgcagcaaccaccaccattgctccggcattctagcccctcccctggtattctctgaacagaacaagatcctctgcagtcggccaggatgacttgtctctgcagcagccataaccaaaccgttggagggggaaaaccgcccccctccggttttggtaaaccgatggtttatcggtaaaaatgggtaaaatcgaccggtttgctcaatctaaatcaaacttatatcggtttatcgatgaaaaaaaaaaaaaaaaaagcggcc

SEQ ID NO: 108937 - DNA, 311 bp, Zea mays
  unsure (1)..(311): unsure at all n locations
  Clone ID: MRT4577_30848C.1
atcccggcacccaacatccaatggttgtgtccaaaacacagccgggggggatctacagcctgaacataaatacacacaatctaataaacaacaccagggttgaaccaattaatgaactggcaagcgaacacagggccacaagccccaaaatatgctccgaggaaaagacatgtcaccaaccataaaaagtaggnacgcagaactagctagatggggccaccgatggattttaagagctgccaaatgacccaaggggcagtatacctagcgaggaatctgaccagcggagccaagagcctaggcatgcctag

SEQ ID NO: 108938 - DNA, 446 bp, Zea mays
  Clone ID: MRT4577_30849C.1
ggaaccaaaacaagaaccgcgggggcgggccccaaacaaaaataccttccaatccaagggcataccttggtaaggaaaaaaaaaaaggggggggactaaacacaacatgggaaacacaaaagggggaccgggcgaccaaagaaaacagaaaccctgttcaccaaacgcccccctgaaaagaaaaaagttttaagaaaataaccaatagccccaaaggggtcctactgtctacaggggcacggaaattggggcccacctgtaagggggatcccttactgcgccagaggaaaacaaggggggggaaggaaccttgtggtgggtaccaaccccgagcagggggaaaaaaacctccggctgggggggggggacaaaaaccttttcctggaaacgggcccggggctggggaatacgaacctgggccggggaaagagcgcccagctgggggg

SEQ ID NO: 108939 - DNA, 1829 bp, Zea mays
  Clone ID: MRT4577_3084C.1
cggacgcgtgggtgtgccatgcatggttctgacgctgtgtgtgcgcacatcgtatcatggctataggttctgtggccgcggctggtggccaacaagctcttccggaagacctcgggcagccacgctttcgtcgccgacttcccggccgccgatgacgatgacgatatcgtctttggaacggaggccgacggcggcggcgggtgcagccccgacgcggacgccagccgctgcgtgaagcgggcgcggccccacgagcgcaacaagatcctaaagtacaggctgttcgcgagcacgtggaacgtgggcggcgtggcgccaccggacgggctggacctgtcggactggctggacggcggcgacgacgggccctacgacatgtacgtgctggggttccaggaggtggtgccgctgcgcgcgcgcaacgtgctgggcgccgacaagaagcgggtagggatgcggtgggtcgagctcatccgcgccgcgctgaaccggtcgcattcgcagcgcagcaggggcggcggctcaggcgacggcggcggcggcggcaagcagaaggtgcacccggtgcgggacggctgtggcggcgagctgggcagggagtaccggtgcgtggtgagcaagcagatggtgggcatcctgctcacggtgtgggtgcgctccgacctccgccgcttcgtccgccgccccagcgtctcctgcgtcggatgcggcgtcatgggctgcctcggcaacaaggtgagtatatatagtcctgtacttggttactcccgaatatggtggccgccccggcatctagctaagctaagctaagcaaacgatcgagaaacgaatggcagggtggcgtgtccgtccggttctggctgcacgacacgagcttctgcttcgtctgctgccacctcgcgtcgggcgggcgcgagggcgacgaggcgcaccgcaacgccgacgccacggagatcctttcccggacgacattcccgcgggggcacgcgctcaacttgccgttgccgcagaacattctagaccacgaccgggtgatcctgctcggggacctcaactacaggatctccctgccggaggccaagacgaggctgctggtggagcgccaggactggaagacgctgctggagaacgaccagctgcgcgccgaggtgtgccgcggcggcgcgttccagggctggagcgaggggcccatcggcttctctccgacgtacaagtaccaccccaactccgacgcctactacggctgcgccaccgccgcccgcggccggaacaagcggcgcgcgccggcatggtgcgaccgcgtcctgtggcgcggcgcgggcctcgcgcagacccgctacgaccgctgcgagtcccggctgtcggaccaccgccccgtccgcgccgtcttcgcggtggaggtggatgcgcccggggacctcaactcgctcaggagcttcttcatgtccgagaggttcgacagggaccagatgctgctccgcaaggatgacgtcaacagcgccagattcggcgacactctttgagacacgcgtgttgagagggtgaagttgtcagtccagttctccgactgcaattgtactacgcaggcaaaagtgtgatgcagagcagagtacatatatggatgtttttcatttctgagtcagtcagtgttcatacggtcgtatctactgcaggcagctaggaaggatacagagatggggttttatttgtctgtctgtttccaccctgttccctacgttctgtaactacgtgtgtactcttcttgatccagttagggcttgttcggttagctctcaatccatatggattgagtgagattgggtgggttt

SEQ ID NO: 108940 - DNA, 3106 bp, Zea mays
  Clone ID: MRT4577_30850C.1
atctatgagcatgcattgtggctgcttaatacctagcctgaaaaaatctggaagctcaatatacccggaggacaagcaaggcaataaaatccagtccggccggggtccgatgtccctattgggctgctctgttactctgtaagcccaaagctccgaaacagagcccaaaagactacgagctcgcggggaagacggggacttccggagagagagagagagagagagagagagagcaggaagcaggggctagacgcggatcggcgagcatgaggggcggcggcggcggcgggatgatggacgatgaagagagggtgggccatgcggagatcccgaccagtttcggtcccgagctgcgcgcctgcctccgatgccgcctcgtcaagacctacgaccagttcagggagaacggctgcgaaaactgcccgtttctagagatggacagagagcacgacaacgtcgtcaactgcaccacccccaacttcactggaattatctctctgatggaccccagtaggagctgggcagcccgttggttgagaattggcaggttcattcctgggtgctatacacttgctgtctcggaggagcttccagaagagtatcaagggatttgtcaagacaacaacgtgcagtatgtgccgcccaagcgtgtctaagtatcaagacggcaatgatggtgtcttggtgcttgccaagggaactgctcctcttatgctttgtatccgagtgctaaggcagtctatttcatgttagtgataaggctgtctatttaggtggtgaaccggcgggtgattgaatcttatccaataaccttgatgcctgttcttgaaatctgtgacaatgcggctcatgtgcttctgtcatgttctttcacatctatgtatatatgaagaaaaatgtaatagctaaaggtcgttggaccatgaaccctcggcccctgaagaccctatgtataaggctcacaacattgataatttttttcatataaaacacattcactgtaaaaaagatagtaacacaagcgtctccacggcaaataaagtctactctctagtaaaaagatttacagttccaaatgggagcaggaagcaggggctagacgcggatcggcgagcatgaggggcggcggcggcggcgggatgatggacgatgaagagagggtgggccatgcggagatcccgaccagtttcggtcccgagctgcgcgcctgcctccgatgccgcctcgtcaagacctacgaccagttcagggagaacggctgcgaaaactgcccgtttctggagatggacagagagcacaacaacgtcgtcaactgcaccacccccaacttcactggaactatctctctcatggaccctgtgcagcacgctccgcgcagaaggttgaaaatcaccatgaaaatcagtgctgccaacaggatgagcagaaagagcacactaacgttgtgcagcaggctcagcaaaaaaaatcacccgtcaattgtgccgagccggcgagcgctgctcaccacaagtttccgtggttactttaaagtaaacctgcatccttgagagcagcctcaaaatcttcttcacgttgccaattccgaacctcaggcacactgtgctggaaatagtcctcgatcttcttcatcacaacattatcggtttgaccacacagcaagttgaacacagcacctttccggccaaagcgcccagctctgccaattctgtgcaagtacacctcataatcaggttcatctcttgtaccaaatttgattggcatgtcgtagttgatgacgaggttaacctgtgcttggtcaaaacctcgagcaagaacatcagttgatataagaaccttggtgtagccatctttgaattcctgtattatcttttccctctctgattggtcaagggatccttggattgaggagcacacatagtcctccctcgtcaaagcattgtgaacattcttagtactttgctttgttctaacaaatatgataacctggccaactttctgtccaaattcaaatatcttgtcccttataacctctattttttgccgattcatcaggtacttgaactttgtactgcttaactttttccaaagtaagctcttccttcttcacaaatatctgatttccatccctaatgacctttgtaacaaaatccttcaccctatcattgaaggtcgcagaaaagagaagcacctgacaaccaccagcgcttctttgtatatccctcatcatcctttcagagtcactcctaaagccatcctcagcaagcatatgatctgcctcatcaaacacaagtatcttgatgtcccttgtggccagcttcttatgggtaatccatttgatgagcgtaccagatgtgccgataacgatctggtcagtgatcggagccatttttgagatcggcatgtagtctttttgagctggcgggattgcacaggcgcatgtaatgccagtaaacttgcccatcctcatgagaactgccttattctgctgcgcaagctccctggtggggcaaatgcagatagcctggggtatcttgtgttgcgggtcgacgcggctgagcatgccgaggacgaaacaggtggtcttgccagagccgttgtgcgcctgcgcgacgaggtccttgtagggcggcgtgaggatcatgggcagggtgatcgcctggatcttgctcgggcggctgaaccccatctcgtcgtgcagccccttaagcagctcgggcgacagcttcagatcctcgaacgtggtggccgactcgtacaccgtgccacccgaaatcacggcttggatttgcgagtcgtcggagtcatcgaggaggggcgggccctcttcgcctgcggcgtcgtccaccgacggggcgagggagagcgcctcgatctgcttggcctgctcctccaccgccggctcggtgatggaggaggaagaggacgccgcggtcgccttggccttggcctcctcctcctcttcgacgtcggcccatgacttcttctccggggacgccgccttgtcggccatcgcgccgcgcgctggcagatcgagactcgacagcaatcgggagtggtgagtggaggagaaacggagaggaagcagagagggctagtgggttcg

SEQ ID NO: 108941 - DNA, 552 bp, Zea mays
  Clone ID: MRT4577_30851C.1
ttataaaaaaaaaaaaaaaaaaaaaaaaaaaaaaaaaaaaaaaaaaaaaaaaaaaaaaaataaaaaaagaaaaaaaaatataaaaaaaaaaaaaatagaaaaaaaaataaaattttttgataaggaaaattaaaataaaataaattgaattgaaattataataacgaaaggggggggggagcgttttggggggtctgggggtgtgtgggcgttgctactcattaccctttttttttttttgggggggatattagaatgaggtccggtgcgggtcgggtttttaccaacagtggctgttggagtaaatgggggggtggccacaaatttttgttttttggggattaattttcgtttttgtgggtgtgggtagattcgagagtgggggctccacttgtcagccttctaaaaggggggcgattgggtgggttactttggtttctctccttgggcggcgtttttcccgggggggttgttttttccccgctccctttacggtttctttttaggggggctccgggcccccggaccttttaaattttttttttttttttt

SEQ ID NO: 108942 - DNA, 327 bp, Zea mays
  unsure (1)..(327): unsure at all n locations
  Clone ID: MRT4577_30852C.1
cccaaaaaccccggctttttattttttttttttacttcttctctcttttttttgggggggggggtttttctataaatcttttttcacccagcagtccaccggcctgcaggtcgatgacatccaccgatacaccgcccgagctccgctgggccccctcgccctgcccgatgacatcgcgccgctcctcacctccctccctcgtgggggggggcactncttcaacccgccagtcctgccctccacctgtgccaccatctagctagtactccttgcctcctttctatcgttgattatgtgtgttttcctccgctcctacatttaatcttg

SEQ ID NO: 108943 - DNA, 648 bp, Zea mays
  unsure (1)..(648): unsure at all n locations
  Clone ID: MRT4577_30853C.1
cctcgaggccggccgggccggngttcccggagagagagagagagagagagagagagagcaggaagcaggggctagacgcggatcggcgagcatgaggggcggcggcggcggcgggatgatggacgatgaagagagggtgggccatgcggagatcccgaccagtttcggtcccgagctgcgcgcctgcctccgatgccgcctcgtcaagacctacgaccagaattatctctctgatggaccccagtaggagctgggcagcccgttggttgagaattggcaggttcattcctgggtgctatacacttgctgtcgcggaggagcttccagaagagtatcaagggatttgtcaagacaacaacgtgcagtatgtgccgcccaagcgtgtctaagtatcaagacggcggcaatgatggtgtcttggtcctgaagcagtatagataattaggtagaagtatctgtgcttgccaagggaactgctcctcttatgctttgtatccgagtgctaaggcagtctatttcatgttagtgataaggctgtttatttaggtggtgaaccggcgggtgattgaatcttatccaataaccttgatgcctgttccaaaaaaaaaaaaaaaaaaggcccctagggcccctcgagctccaagcttt

SEQ ID NO: 108944 - DNA, 793 bp, Zea mays
  unsure (1)..(793): unsure at all n locations
  Clone ID: MRT4577_30854C.1
ggagagagagagagagagagagagagagcaggaagcaggggctagacgcggatcggcgagcatgaggggcggcggcggcggcgggatgatggacgatgaagagagggtgggccatgcggagatcccgaccagtttcggtcccgagctgcgcgcctgcctccgatgccgcctcgtcaagacctacgaccagttcagggagaacggctgcgaaaactgcccgtttctagagatggacagagagcacgacaacgtcgtcaactgcaccacccccaacttcactggaattatctctctgatggaccccagtaggagctgggcagcccgttggttgagaattgaggtgtttatgtgtcgatttgacagaaaatagatcagatttctcacatcaggcaggttcattcctgggtgctatacacttgctgtctcggaggagcttccagaagagtatcaagggatttgtcaagacaacaacgtgcagtatgtgccgcccaagcgtgtctaagtatcaagacggcggcaatgatggtgtcttggtcctgaagcagtatagataattaggtagaagtatctgtgcttgccaagggaactgctcctcttatgctttgtatccgagtgctaaggcagtctatttcatgttagtgataaggctgtttatttagggtggtgaaccggcgggtgattgaatcttatccaataaccttgatgcctgttcttgaaatctgtgacaacgcggntcatgtgcttctgtcatgttctttcacatctatgtatatatgaagaaaatgtaatagct

SEQ ID NO: 108945 - DNA, 394 bp, Zea mays
  Clone ID: MRT4577_30855C.1
ttctgttttttcttttccaacgagcgcctaccattgctcattgatggggacggagggacctgttttctggcgtactgcaatgcaagcaaaactgtctgctgctgatctgatcaacagctcgctggccaaatccgggcagcttgacactgcatggtttggtgccattacataatacagaaacatatcaagattcatttgttccatgtatcaacatatacgaagaacataggtccctgctgtcgcttcaggtcgtgttctgatggttatggatacatggctggaaactctaactacagtgatgaagactatgctaattctactgagctacaagcattggaagtgagaagaggatcataaagatatgctataaatatgcgagaaggaagtaacttgc

SEQ ID NO: 108946 - DNA, 761 bp, Zea mays
  Clone ID: MRT4577_30856C.1
gccgcccgggcaggtgtacaaacttttttttttttttttttttttttttttgcttttttttttttttttttttttttttttttcatataaaacacattcactgtaaaaaagatagtaacacaagcgtctccacggcaaataaagtctactctctagtaaaaagatttacagttccaaatggtaatgctcgtaactgcgctacaagcatattgccaaatgaacacctcttaacgaccctctgcttcatataaagctcacaacacaatagctgttctagtcttttaacataatccacaactctgctgcaaaacaatcagtgctgacaacaggatgaacataagagcacagcaacgctgtgcagcacgctcagcaaaaaaaaaatcaccggtgaaaatcagtgctgccaacaggagagcagaaagagcacaataacgttgtgcagcaggctcagcaaaaaaaatcaccggtcaattgtcccgagccggagagcgctgctcaccacaagtttccgtggttactttaaagtaaacctgcatccttgagagcagcctcaaaatcttcttcacgttgccaattccgaacctcaggcacactgtgctggaaatagtcctcgatcttcttcatcacaacattatcggtttgaccacacagcaagttgaacacagcacctttccggccaaagcgcccagctctgccaattctgtgcaagtacacctcataatcaggttcatctcttgtaccaaatttgattggcatgtcgt

SEQ ID NO: 108947 - DNA, 909 bp, Zea mays
  Clone ID: MRT4577_30857C.1
aaaagctccgaacagagcccaaaagactacgagctcgcgggccggccggggacttccggagagagagagagagagagagagagagagagagcaggaagcaggggctagacgcggatcggcgagcatgaggggcggcggcggcggcgggatgatggacgatgaagagagggtgggccatgcggagatcccgaccagtttcggtcccgagctgcgcgcctgcctccgatgccgcctcgtcaagacctacgaccagttcagggagaacggctgcgaaaactgcccgtttctagagatggacagagagcacgacaacgtcgtcaactgcaccacccccaacttcactggaattatctctctgatggaccccagtaggagctgggcagcccgttggttgagaattggcaggttcattcctgggtgctatacacttgctgtctcggaggagcttccagaagagtatcaagggatttgtcaagacaacaacgtgcagtatgtgccgcccaagcgtgtctaagtatcaagacggcggcaatgatggtgtcttggtcctgaagcagtatagataattaggtagaagtatctgtgcttgccaagggaactgctcctcttatgctttgtatccgagtgctaaggcagtctatttcatgttagtgataaggctgtttatttaggtggtgaaccggcgggtgattgaatcttatccaataaccttgatgcctgttcttgaaatctgtgacaacgcggttcatgtgcttctgtcatgttctttcacatctatgtatatatgaagaaaatgtaatagctaaaggtcgttggaccatgaaccctcggcccctgaagaccctatgtataagggactcaacatgttgaattctgtttcgggaccaagcaaaactggattgtaagtgt

SEQ ID NO: 108948 - DNA, 358 bp, Zea mays
  Clone ID: MRT4577_30858C.1
ggagcaacttgttggtcactataaactattttatttgtcccacatacagtaagtgggggctcaaattttgggggggaccagatggaaaaggacccgtttttatcaaaagaaaaattaaactggtgttttttttgcaacactattttgaacagttttttccatacccagtttcctggtgggggaatttgaatcagatttagatgccatatttcaaaatgcaaagggacaatttttttgataggcatgtccgggcttaaaattcttttaattgggaggcctttcctggcagcatttcatgggctcccattattttctcgatcacttcgccgagaaccttttttgtactgttagggacaag

SEQ ID NO: 108949 - DNA, 253 bp, Zea mays
  Clone ID: MRT4577_30859C.1
ccttgttttttttttttttacgtggctgaaagctcaagatattcttgatgcatgccatgcctgctcagagaactacactagtattgtatgctaacacaaaaccactttcaccaactccttaatgccctagactcattccctgtaccccctaaactgctcaaacgttcacaatagcgctagctttctaatatttgacttctcgggatcatcgacaagataccctgctgcctgtctaaccggcgacccataaaaa

SEQ ID NO: 108950 - DNA, 238 bp, Zea mays
  Clone ID: MRT4577_3085C.1
acgaagcacaatactataccaacaatgtcgattcaaaatatttagcctccttatgctcctcgtgctgtgtgcaattgctgctatggctaccattttctcgctatgctcgcaagctcctataatacaaccttttcctccgtatctcacacaagcgctgcctttcatataccaaaacccatacatctaacacctccggttcacctaccacctcccatgcatctaccacacccggatcacc

SEQ ID NO: 108951 - DNA, 312 bp, Zea mays
  Clone ID: MRT4577_30860C.1
attgtgaaaaacaaaaaattgttttataacccctcaagcggggggggtcgaaatttatctatcccaaaaaaatcttgggttccccccctccatacttatcattccactttctttttctccaatgcttccttcccccaagccccaaaacctcgtcctctatttgttatattttctccaccgggggatctttgcctatccttaccacaaatttaaatattctttcctccccctcagaatatgggggggcatttaatccacaaaatcattgttaattttcccccctcacttaaaaaaaaaagggggaacaaaccc

SEQ ID NO: 108952 - DNA, 145 bp, Zea mays
  Clone ID: MRT4577_30861C.1
cccacgcgtacgcatccggttcggttccttagtccagtgtcgtttctcggatcgctcgaccatcttaaacacctatctttctctcgtcccatgggatcctatgcagctgaatcagatctccaggaccatcctttacggctttacc

SEQ ID NO: 108953 - DNA, 228 bp, Zea mays
  Clone ID: MRT4577_30862C.1
tcgcccgagccagtcgtgatctatacatcctttataccttcttagttggaaggctgtggctataatagaagaaaccacatggatcactggctggatggatcacaaaccaatataggaacgtgagctgggattaccaccgatgtgagatattcctatcatacgcctactgaagaccaccccgtgatggatagttaacctaccacctgggaccgtaccacgctattggac

SEQ ID NO: 108954 - DNA, 1459 bp, Zea mays
  Clone ID: MRT4577_30863C.1
gccagcaagccagcgcacgtcggtaggcacgccacgaggccggcggggagcagtccgcatagccagcaagccagcgcacgtcggtaggcacgccaccatgccggggctcaccatcggcgacaccgtccccaacctggagctggactccacccacggcaagatccgcatccacgactacgtcggcgacggctacgccatcatcttctcccacccagccgacttcacgcccgtgtgcacaacggagatggcggcgatggcggggtacgccaaggagttcgagaagcgtggcgtgaagctgctgggcatctcgtgcgacgacgtggagtcgcacaggcagtggaccaaggacgtggaggcgtacggcgggaagcagcagcagcagcaggcgacgacgacgaaggtgacgttcccgatcctggcggacccggcgcgggacgccatccggcagctgaacatggtggaccccgacgagaaggacgcggcggggcggagcatgccgtcccgcgcgctccacgtcgtcgggcccgacaaggccgtcaagctgagcttcctgtacccggccaccacggggcggaacatggacgaggtgctgcgcgctgtcgactcgctgctcaccgccgccaagcatggcgggaaggtggccacgcccgccaactggaagcccggggagtgcgccgtcatcgcgcccggcgtctccgacgaggaggccaggaagatgttcccgcaggggttcgagaccgccgacctgccctccaagaagggctacctccgtttcaccaaggtttagctagccgacgtacggcacggacatctagctcgtctgtcagtccgcgtcgaccggggtgcgcggatcttttgtgcctgctggtggtttctctgactagtactagtatatatataggctctatgtatgtgcgtactatgccgtgccgtgttgtctcgtgtagtggtggcaaccggttcgtggcactaccgcgctagtattgtccacccatatcaatgtcctcttctgaacttagcggcgcacatgtttgtgcgtgtgtgtagcatctgctagtgcaattgcatgatgcatggccgtgcgaaaaggccctcggcgctacgacagcagccagcacggcacgtttcaaagtatgcctgatactgtacgatgtcttatagcatcttcgaaagactatttaaatagctcgccaagccaaattttggctacttaacacctgcagagactccatctgcaccagaacagacttggacgggccaatccctgcagagatccagaactgcaccgagctcagggcaatttacctgatagccaactacctgcaaggaggcatcccttcagagattggcgagctcgtgcacctcaccatcttggacctgtcaagcaatctgctgaggggcaccatacccggctcgatcggaagcctcactcacctgcgcctttctgaacctgtctact

SEQ ID NO: 108955 - DNA, 266 bp, Zea mays
  Clone ID: MRT4577_30864C.1
cagctctatggcattaatcatgtagccgttctgttgcataatgactgtctttatctctcccaggagatatttgggtttgcatttgagtatcgaacagactttccaaattccatgaaggaacatgctgtgtttgttgatttggctccaaggtttcagctgttggcagaagaaatattgcagagacaagttcaccttgatgaatataatttgaaggaggctatagatggtgctgatggatttcagaatactcatcagatgaaacaatt

SEQ ID NO: 108956 - DNA, 279 bp, Zea mays
  Clone ID: MRT4577_30865C.1
gtcctccacagtccacacgctggcacgctgccgccgaccgccgtcagcagcaacctcgagctcccaggtctctgtcggcgacaacaccttccagagagcaacggtcgtcgtcggatcgtcttccacaggcgccaccgcgagtccgcgacctcacagtcggtagtcggcaccgccgtaccacagaccacgactctctcagccgtaccacaatccacacgttgttgtagtgccgctcttcaccgtgagttcaaagctaggccaccggaacttgactgggac

SEQ ID NO: 108957 - DNA, 271 bp, Zea mays
  Clone ID: MRT4577_30866C.1
agcatttcaagtagcggctcctgaaaaacagccagatgcgcctgcgtctccatactgaaatgaaatctacagctatgttcagatagatgcctgcagtgattcataataattatggctgtagagattcaaattaattaggacgcttgacgtaaatgaagtttgcttcgtctacctagtgtggaggcgtgttacaaaaaggaactagagatatttcggaatcgtgctgtactagaaacttctaaatcctgtattatcactcaaaatatttcgg

SEQ ID NO: 108958 - DNA, 274 bp, Zea mays
  Clone ID: MRT4577_30867C.1
gagacacgaggctggaggctgcagcgctaaccctagccggcgtcggcggtggcggccagcgggaggggagctgccaaacgcctaaccctaacggctgcaggcggctgggcgcaaggcatccgtggccagcgtgccgcgcgcacgagcggacagttgcggcggcaggggcgcagggcgcgacctcggcgcggtgggcgcgggcgcaccgctgagcaggctgtagggggaggtgggattggattttttttgacggggaagttggaatactgaagtt

SEQ ID NO: 108959 - DNA, 631 bp, Zea mays
  unsure (1)..(631): unsure at all n locations
  Clone ID: MRT4577_30868C.1
ccggnnaaaaaaaaaaaaaaaaaaaaaaaaaaaaaaaaaaaaaaaaaaaaaaaaaaaaaaaaaaaaaaaaaaaaaaaaagaggggcccctccgctcttgtgcaaaaagggaaaaccgcgtttgagacgcgttaaaacccctttggggggagaaaaaccccgcaaccctctgcgctctggaaaactttggtggggaccccctccaaaagtttacacctttttttggggcacatagggacacacaacaaaaaaagcaatctgtggcgccccttactcaaaaaggggaacgcgcgcaacactgtggtgcttactcggcccagggggcgccacgggttaaacactttgaaaaaattggggctgtgctctaaaccctgtgaaaaagagaaaaagggggttctcaaagtgttgtcacagagtttaaaaaaaaattttctatatgagcccaaaaaacactacccccttttgggggggcccccgcgtatcccccagcaaaaaacacaagatccgggggtgatagtgctaaaaaatataaatgtggaacaccccctgaaaaaataggaaaacttgtgctcccaaagatctccactttttaggtggttaaaaaacacagctatgcgcgtgagaaaagaaca

SEQ ID NO: 108960 - DNA, 340 bp, Zea mays
  Clone ID: MRT4577_30869C.1
aacgtgtggaacgcgaaagacggaaagggcggggagcgcacacgtttttgacgctgccaattctgtcaatgtacgataccaaccataccacgcccagtccaggcagtccaagtcgtacgtctcgaccctccttaccattgtaccgattcgaccgcacttgctttactattttatttatcgcattccatgccatccattccatcctatatgtgatatatccgaacgaaacgctctctaggttatttacgtcatattaagcgaactcagcgcgcggcagacacaacccacacaaacaacttgcataacttcgatcgacccattcaaacccttgagattctta

SEQ ID NO: 108961 - DNA, 408 bp, Zea mays
  Clone ID: MRT4577_3086C.1
cgatacaatcgtcacaacctagtgtgatcatccgcgccgctgccttcggcctcgccgccgccggtgcgggttccctgcatgccatgtcgaattggatgcctccctcggagatctctcccttcagccggatagtgaagctgaagcccacgctcttggaatccgcgaacgtccttctggccgccctgctccgcgcgcacccgctctccagtgcgaacctgcgtgacgtccgcgcccgcgctgagctcgacctcgcgcgtgctgacatggagattggccatggcggcgacccagccgccgccgtggacctccgcctcctcctggcgctcctcgccacgcgcgacggtcgcgcgtacgacgcgttgcggctctacgcggaagcggcccgcgacgcgcctttccgaccccggg

SEQ ID NO: 108962 - DNA, 773 bp, Zea mays
  Clone ID: MRT4577_30870C.1
ggagcaggcgtgcagcatccggtctcttgtgcaacacgctaaagccctataaccacacacaatgatgcagacagccgaccgagggagccggctgcttggtaggcctgcggcgaggcgacctctgcgctcgtatggtatgaggagaaaaatacttaggctgagcacgttgcgagccgctccagaggccgtgaaggatggctaacctgaaactctacctgtcagaaccacgtgcctcatctctggagaaggagtaagctgcgttcagagtggcagggcgctaacggcgtgtagaacctctgctgtgctcgaggagcggatcaagacgcggggcgtgccatagtgaatagcgagaagtggagctggctgatattattgcttcctcttgctgactgctaatgatggattaactagcttagcttgggtgccctcgttgtcacttgtgatacatgcgtggggaggacatggctgtcctatgtatctatctggttgcgtgctccctcatggctgggctctgctgcgtgctcatacatcaccacggtcctgggagctctcttggtcggtctggtgccatggaggttggacattatatataaaggcggggcattaactacgatttccaaaggctgcaccaaactgtatgacaaagaacagacactaggctatggtaaaacataaacctccactaccgaggaatcgatccatttgaacttcttacgacaaggataagtataattatattctttgcgcctagttttaagccaaaaaatgaaaaa

SEQ ID NO: 108963 - DNA, 362 bp, Zea mays
  Clone ID: MRT4577_30871C.1
ttttcctcgtgggttaacacattattatattacatgggtgattaaaaaagggacacccgccagagaatggcaggcatgacgacaagtctagaaagtacagcaacaacaatatcatcaacacggtgctggggaagtacattccatgcgcctgtctgacggagcaaatgcgcatatgaatatttcatgcgggcagccgacacgctacgattgagtttcccggggggcacagcgacacaaatgatcggtccattggttagaaggtgcaggacaagaactgctgctcgggcggctagccggatgaactgttgtaacaaggtggctgcctccactagttcgcggatgaggttatttttggaccggga

SEQ ID NO: 108964 - DNA, 633 bp, Zea mays
  Clone ID: MRT4577_30872C.1
ggccgcgtgtttttttttttttttttctgttcatagttcggtacattttttttattttttgttagcttagttactgttttttcttttggctcgggagtggcatccaaatttaccccgaatgaacgggttacaccgacgaaagatatggacgctggcagccagctggtcaactgagatggggtcaccaagggatagattttaaggggtaatcccggggcgtgagagaaatttttactagagaaatggcagacgccgaggggggtgtgaaaacgtgcgagtccctgggggcgacccttggatgggagctgggacctcacccctaaaggcacggtattctggggttgtgcgcgctagaccgggaaccctgcggctcttcctatgcgtcgttatgagcgtgggccaatcgttgtaggaatacatgtcactgcccttggtgattgcgaggtgccaactcccctggcctttggcgggcggactccccgccagtcttcgaccattacacgaatctggtagcccgctgaactgctcccgagtgccggaatctcgcagtcccggaggtcccgaagccccgggagcgcggagcaaaggcgggtaggaagtctggcattcccccttgcttgaaggtgaaaacgg

SEQ ID NO: 108965 - DNA, 145 bp, Zea mays
  Clone ID: MRT4577_30873C.1
cccacacgtcactctatggcttacgcatcccactcccatacacacaccgacccggtggccgagggtactgattaattcccccgcacacaattctctaacatggaaaaggttaattacagcttgaatcctacaaacaaaaccattc

SEQ ID NO: 108966 - DNA, 1293 bp, Zea mays
  Clone ID: MRT4577_30874C.1
ggccctaggggccttttttttttttttttttgggaaaaataatagcgggtgcttattcttgacatgagaatgtgccagaaagatgtataatcaatgttcttcctgcagtaccccagaaaaccgatgttccaaatgagctccacacttacattttagcatcagcaaagtaccacattattttgtacttcaaaaacgcactctggcatgacaatgatcctcttggagcaaaaaaattagccaaacggtaaaaagaagaaacaatataacaacacagcagggattcacctgagtgaagtagataaatagacaggtagcttttgagctcttagcctatgagcagtttgttctcctccaagaaactgtaggtcgggacctcgaggttgaacggcgcagggcccttgcggatcctcccggatatgtcgtagtgggaaccatggcatgggcagaaccagccgccaaagtctccggcgttcggtagtgggatgcagcctaggtgagtgcacacgccaatgaccaccagccactcgggattcttcacacgctctgcatcctgctctgggtggcgcagggatgccacatccacactgttggcaagcttgatgtcgtcctccgtccggcgcctgatgaagactggctttccgcgccacttcacagtcaccgtggtccctggctcaatgctggagaggtccacctcgagtgaagcaagggcaagcacgtccttacttgctgacatgctcaggacaaacttcaatacgaggagacgcagcagtgatgcatatatgaacctcccaccactcaggacaaagtaagcaaatgcacgcttgctgggatctccaggaggatatctttcatgattgtactcatcataaaccaccttagggttaggattcttcacagcagccacagttgctgggaggtcagctaggccagcatcttggtttcctgggacaagtgtttcagtcgaagagaaaccataatttttttctttaacctttaggacagtgcccactgttgtgttctttgccaacaagaccctggcagtgacaaagaagggggagtcgatggagaaccgcgtctggctccggccgcgagccgagccgtcgtcccggtcgggggcgccagcaccggcaagggggcccctggccgccgccacggcggggcgccaggagacggaagacgagagccttcttcccgcaacccgcagcatcgtgtcgccctcttcctccggtgatggcgctcgcctccaatctaatctcggctagggttcgcgccgggaagcacggaggaagacag

SEQ ID NO: 108967 - DNA, 1131 bp, Zea mays
  unsure (1)..(1131): unsure at all n locations
  Clone ID: MRT4577_30875C.1
ggggccaaatgagctccacacttacattttagcagcagcaaagtcccacatttttttgtaaactttaaaaacgcgactttggcatgacaatgatccttttggggcaaaaaaattagccaaacggtaaaaagaagaaacattttaacagcccagcagggattcacctgggtgaagtagataaatagacaggtagcttttgagcttttagcctatgagcagtttgttctcctccaagaaactgtaggtcgggacctcgaggttgaacggcgcagggcccttgcggatcctcccggatatgtcgtagtgggaaccatggcatgggcagaaccagccgccaaagtctccagcgttcggtagtgggatgcagccgaggtgagtgcacacgccaatgaccaccagccactcaggattcttcacacgctctgcatcctgctctgggtggcgcagggatgccacatccacactgttggcaagcttgatggcgtcctccgtccggcgtctgatgaagactggctttccacgccacttcacagtcaccgtggtccctggctcaatgctggagaggtccacctcgagtgaagcaagggcaagcacgtccttgcttgctgacatgctcaggacaaacttcaatacgaggagacgcagcagtgatgcatatatgaacctcccaccactcaggacaaagtaagcaaatgcacgcttgctgggatctccaggaggatatctttcatgattgtactcatcataaaccaccttagggttaggattcttcacagcagccacagttgctggaggtcagctagaccagcaagagaaacccctgggcagtgacaaagaagggggagtcgatggagagccgcgtgtggctccggccgcgagccgagccgtagtcccggtcgggggcgccagcaccggcaagggggcccctggccgccgccacggcggggcgccaggagacggaagaagagacccttcttcccgcaagccgcagcatggtgtcaccctcttccaccggtaatgacgctcgcctacaatataatatcgggtagggttcgcgccgggaagcacggaggaagacagacagagaagttagggaaagtacncgagggaccccccgctaggaattgtttt

SEQ ID NO: 108968 - DNA, 385 bp, Zea mays
  unsure (1)..(385): unsure at all n locations
  Clone ID: MRT4577_30876C.1
aaggaaacagggaaacccatcactttatttattgcatgcatgacaaggccaaactgaattggaacaagggggggggggccacggggctggaaaatatgcccccaaaacctctcgggggggaaaaaaaaaaaaatttggggtcaaaaccacacaccagttttttatggggtggacccaaaaaaagaggcccccgatttttaaagtggggaaaaaaattttttggtggggtttttggggggggggaactggttaaaccaattgggaaactcctttatggagggggggcagatattgggggggggaaggtaaacaaagacaaaacgtttggggaaagcgggaaaccataaaaaggggnacaaaaaaaaccaagggaaaaagaggttgg

SEQ ID NO: 108969 - DNA, 1264 bp, Zea mays
  Clone ID: MRT4577_30877C.1
aaattcgggggaagtaattaatatccttcctacggtatctcagaaaactgaagttccaaatgactcccaacttacattttagtagcagcaaagtagcacattattttgtacttggaaaacgcactttggcatataacagttgaccatcaaggaattgcaatgatcctcgtggagcaaaaaaaaaaaaactagccaaactgtcataggaagaaacaatataacagcacagcagggattcacctgagtgaagtagataaacagacaggtagctttcgagctcttagcctacgagcagtttgttctcctccaagaaactgtaggtagggacctcgaggttgaagggcgcagggcccttgcggatcctcccggaaatgtcatagtgggaaccatggcatgggcagaaccagccgccaaagtctccggcattaggtagtgggatgcagccgaggtgcgtgcacacgccaatgaccaccagccactcagggttcttcacacgctctgcatcctgctctgggtggcgcagggatgccacatccacactgttggcaagcttgatgtcatcctctgtccgacgcctgatgaagactggctttccacgccacttcacggtcactgtggtccctggctcgatgctggagaggtccacctcaagtgaagcaagggcaagcacatccttgcttgctgacatgctcaggacaaacttcagtacgagaagacgcagcagtgatgcatatatgaacctcccaccactcaggacaaagtatgcaaaggcacgcttgctgggatctccaggaggatatctttcatggttgtactcatcataaaccaccttagggttaggattcttcacagcagccacagttgctgggaggtcagctaggcccgcatcttggttccttgggacaactgtttcagtagaagagaaacccctggaagcgacaaagaagggggagtcgatggagaaccgcggctggctccgtccgcgagccgagtcgtcgtcccggtcggggacgccagcgccggcgaggggacccctggctaccgccgcggcggggcgccaggagagggaagacgagagccttctccccgcaacccgcagcatcgtgtcgtcctcttcctccggccggtggtggcgctcgcctccgatctgatctcggctagggttcgcgccttggcgcacgcggcacggaggtagagactggtggtgcgggaaacgaggggttgagaaaacatttgggagcggtgggcttccggaggcccgagg

SEQ ID NO: 108970 - DNA, 291 bp, Zea mays
  Clone ID: MRT4577_30878C.1
attcaacggacacacatatccctgggcgggtttacattattttacatgatcgaacaaacccaaaaccattgttcgctcacaagcattctgacacctaaaggtcaccggcatgccctacctaacttgccggtaacaaaattggatgcctaagcccaaccgttgttgctcaccgggacccccatgtggccatcgatgttttaaaacgggccctttccccgccacaattgccctgacgataaatcttaacattttagaacattgcgaggcggcccttctttaacttcttgacct

SEQ ID NO: 108971 - DNA, 1279 bp, Zea mays
  Clone ID: MRT4577_30879C.1
ggccgcttttttttttttttttttgatatccttcctatggtatctcacaaaactgaagttccaaattactcccaacttacattttagtagcagcaaagtagcacattaatttgtacttgaaaaacgcactttggcatataacagtcgaccatcaaggaattgcaatgatcctcggggagcaaaaaaaaacactagccaaactgtcaaaggaagaaacaatataacagcacagcagggattcacctgagtgaagtagataaacagacaggtagctttcaagctcttagcctatgagcagtttgttctcctccaagaaactgtaggtagggacctctaggttgaacggcgcagggcccttgcggatcctcccggaaatgtcatagggggaaccatgacatgggcagaaccagccgccaaagtctccggcattaggtagtgggatgcagccgaggtgcgtgcacacaccaatgaccaccagccactcagggttcttcacacgctctgcatcctgctctgggtggcgcagggatgccacatccacactgttggcaagcttgatgtcatcctctgtccgacgcctgataaagactggctttccacgccacttcacggtcactgtggtccctggctcgatactggagaggtccacctcaagtgaagcaagggcaagcacatccttgcttgctgacatgctcaggacaaacttcagtacgagaagacgcagcagtgatgcatatatgaacctcccaccactcaggacaaagtatgcaaaggcacgcttgctgggatctccaggaggatatctttcatggttgtactcatcataaaccaccttagggttaggattcttcacagcagccacagttgctgggaggtcagctaggcccgcatcttggttccttgggacaactgtttcagtagaagagaaaccttctaggcgatatggtgtaactaaaaccctatggctcctggggtacacctgaacgcctaggcgcctcaacaaccatgtttcagtattcttttgcttggcataatgttgatcttgcataattatttctttaaccttcaggacagtgcccactgttgtggtctttgccaacaggaccctggaagcgacaaagaagggggagtcgatggagaaccgcggatggctccgtccgcgagccgagtcgtcgtcccggtcggggacgccagcgccggcgaggggacccctggctaccgccgcggcggggcgccaggagagggaagacgagagccttctccccgcaacccgcagcat

SEQ ID NO: 108972 - DNA, 891 bp, Zea mays
  Clone ID: MRT4577_3087C.1
attgatgttgctgccactgatttttgtacaggaaagaaatatgatctggagttcaaatcaacaaagaaatcagggcagaactttaaaactgctgatgatatgattgagatctatagccagctttgttcagagtacccacttgtctccattgaacagcctttcgataaagatgactgggagcactcaaaaaaaattaaccactctagagctgtgccaggttgcaggggatgatttgttgatgtctgatcctgaacgcattaagcgggcagttaatgagtacacttgcaacgctcttgttctcaaggcaaatcaagtgggcactgtcactgaggccatagaggttgtgaagcaggcaaaggatgctcattggggtgtgatggtgtcacataggtcgggagacactgaggattctttcattgctgacctggctgttggtgcttcagccggacagatcaaagccggtgccccctgccgtggagagtgtctcactaattacaatcagctgcttagaatcgagggagaacttggaagtgaaggcgtctatgcaggggagaattggagaacagtcaacacgagctgatctgtggtatcgtttgagttgcggggagaattggaaatattgatccgccttcgtatgtagccacttagcttttctttgttttcttgtccaattgcgtgagttcgtcctcggcaagtatatggaaatagggtggtgaaatgtaccattttttactagatgatggcaattgttgttgaacatacatatagtggatgcactggtggggtttacatcttttgttttcttcaacttggatttgtttaatttatgtatagcatgggttataaacaaaaaaaaaaaaaaaaaaaaaaaaactcgctattctctcgtgc

SEQ ID NO: 108973 - DNA, 428 bp, Zea mays
  Clone ID: MRT4577_30880C.1
ggaaggtggtttttccctaccgatcgagtacggtgcccaccattttctcggcaccggaaaatgggcggaacacgatggcacgagaaaatttacgaaaaggtagatacgatgctctagctctaatcctgcctgcatgtaaccaggcccatactaagctgtgatttctgcattctaattacaagacgctcaagtccctaatgggcaccggccttcagcaccgtattgagccaaaactccatgtcctgctccctaggccaacgacaagggcggaccggcgatgcccagattatccccgtccttggttgcaaaggaacatgcccctgaggtccgccgacaaccagaatctgaggtcaatggtcggaacctaggtgggaatgaagctgtacatctacatgtgcatgtccatctccgccttgccggagacggcg

SEQ ID NO: 108974 - DNA, 1226 bp, Zea mays
  Clone ID: MRT4577_30881C.1
ggcggcaaattttttttttttttttttgccagaaagatgtataatcaatgttcttcctgcggtaccccagaaaaccgatgttccaaatgagctccacacttacattttagcatcagcaaagtaccacattattttgtactttaaaaaacgcactttggcatgacaatgatcttcttggagcaaaaaaaatagccaaacggtaaaaagaagaaacaatataacagcacagcagggattcacctgagtgaagtagataaatagacaggtagcttttgagctcttaacctatgagcagtttgttctcctccaagaaactgtaggtcgggacctcgaggttgaacggcgcagggcccttgcggatcctcccggatatgtcgtagtgggaaccatggcatgggcagaaccagccgccaaagtctccggcgttcggtagtgggatgcagccgaggtgagtgcacacgccaatgaccaccagccactcgggattcttcacacgctctgcatcctgctctgggtggcgcagggatgccacatccacactgttggcaagcttgatgtcgtcgtccgtccggcgtctgatgaagacttcctttccaggccacttcacagtcaccgtggtccctggctcaatgctggagaggtccacctcgagtgaagcaagggcaagcacgtccttacttgctgacatgctcaggacaaacttcaatacgaggagacgcagcagtgatgcatatatgaacctcccaccactcaggacaaagtaagcaaatgcacgcttgctgggatctccaggaggatatctttcatgattgtactcatcataaaccaccttagggttaggattcttcacagcagccacagttgctgggatgtcagctaggccagcatcttggtttcctgggacaagtgtttcagtcgaagagaaacccctggcagcgacaaagaagggagagtcgatggagaaccgcgtctggctccggccgcgagccgagccgtcgtcccggtcgggggcaccagcgccggcgagggggcccctggccgccgccacggcggggcgccaggagagggaagacgagagccttcttcccgcaacccgcagcatcgtgtcgtcctcttcctccggtgatggcgctcgcctcaatctaatctcggctagggttcgcgccgggacgcacggaggaagacagacagaagagaagaagacccggcccaaatgagagacccgg

SEQ ID NO: 108975 - DNA, 405 bp, Zea mays
  Clone ID: MRT4577_30882C.1
gccactttttaccatacatacacactgaacattataggggaaggcatattctacaactggtgagcgatacttcacgaaaaaacatgatcttatgatgtgcccttacataaataacactaatgatcactacctatctggagactacaagctagaccactacatgaagatcccgccctggaccatgtctatggcacaggctgtggttgacgatcttggtcagactagtgtaacaacatacaaccctgaatcatcataaacagcgtgcgcatcatatgcttacactgctggtgatctactacaggctagtacttgcaacattaccacgtgttctacgacacattcgtgatgtcactccttatcaacccgcctaggatcttgacagacctcaacacttacaaggagcac

SEQ ID NO: 108976 - DNA, 429 bp, Zea mays
  Clone ID: MRT4577_30883C.1
ggcagcaatcagctttatttattccagggaacagggcccgagatggcaggagcaaccctgtttttggggggcggagacggcccgccctaggggaaaaactaacgacccatggccaaaaaacaaggaaagggggtttggggggcgaccataaatacaaaaaccctaaaacaagggcaagcctaaactgaaacgtccccccccaaaaggagctttttatttttggtggcggggcagggtttaacttgtttgccacaccttgtactgggggcaaaacctaaaaggggggtcgttaaacaatgggttttcctttgaccaaagctccattttaacattagccggtgcccagggcacaaaacatttgttaacctcccggggattaaaccgtttaaccaagcttagggggcccggggggtaaaccccggaattccg

SEQ ID NO: 108977 - DNA, 407 bp, Zea mays
  unsure (1)..(407): unsure at all n locations
  Clone ID: MRT4577_30884C.1
cctggcggnacaactcaccgggggggaggacgccgagttcaatgaggccttcagcctcttcgacaaggacggggatggttgcatcacgaccaaggagctgggcactgtcatgcgctcgctggggcaaaatccttttttttttttttcttcagacatgatcaacgttgtgtgtgggggggggcaacggcaccatcnatttcccanagtttctcaggggggggggtggcaagatgacgggcacggactcttgagaagagctcaaggaggccttccgtgtgtttgacaaggaccagaacggcttcatctcggccgccgagctccgccatgtcatgacaaatcttggtgagaagcttacttgtgaggagggggacgagatgatccgtgaggctgttgtcgttggtgatggc

SEQ ID NO: 108978 - DNA, 436 bp, Zea mays
  Clone ID: MRT4577_30885C.1
ggtggaggggccaaaaggaagaagaaataaaggggtgaataaaagggggaatttctttggttggaaagagaaaaaattggaaaactaacggtttggattttaaaaaagaaggggggggaaaaagtaggtcaaaaaaaggtaaaaggggagggattgggaggtaaaattaaaaccgggaaacaaaaagaggttaaggaataaacaaaagcccaagaagtaggttggtaagtaaataaccccaacaagtgaatggaaaagtaaagaaaaagaaaagttaattttaagggttggcaacaacaagggtgaattgaacttaagtttttcaattgaattagaaaataataaacccggaacacccggaggaggaggaggaaaaaaaaccaaaaccaaacaaaacaaaagaagggggtttgggcctgcatggggaacttggggg

SEQ ID NO: 108979 - DNA, 176 bp, Zea mays
  Clone ID: MRT4577_30886C.1
cccacgcgtccggtccacatcccaacagttcgtccgctagggttttaggccggtaccggggaatcccgctcctgcgcgcggcgtcgcgtacacccttcctcttggcgcgctccgatccaagagatggcggtgccgctgctgacaaaaaagatcgtgaaaaagcgggtcaagcaagt

SEQ ID NO: 108980 - DNA, 240 bp, Zea mays
  Clone ID: MRT4577_30887C.1
ataatgtttttttaatagaaaaaaaataaaataacagaaaaaggcgcacaacaaccatctgcatctagaacgatgccatccatgtctttgccatctctagattacatgtacctgatttctagaatttccatcttatcgttgccctgtagtagcaagtaacctgtacttcatttggcttcaatttgctgatggagacaggttccctgtctcaactgctagagaaaaagtaggcagatattg

SEQ ID NO: 108981 - DNA, 320 bp, Zea mays
  Clone ID: MRT4577_30888C.1
aaaaacatataaatatttataatactttataaataccataagattagttacaaaatgtattcatacaataagattggtctgttaagaacttggtgaaacataaaccattcgaagtgcaaatcttttggggaaagacagaggagggagtgctttctctttttctactatccaaatgttcaaattcaacaagccccttgtagacatcttgtggcctctcatgaaaagttcttaggtcctgatttctgaagctgagacctcggcctgcttatgtgcagcgactccatcctcaccaaattatcggcatcggcctgctcaatgat

SEQ ID NO: 108982 - DNA, 430 bp, Zea mays
  Clone ID: MRT4577_30889C.1
tggacgcccgcagggaccgggccggaaatccacgggtggcccaagccttcggatgctttaaacaccttgtttaaagagacacgtgctcggaaaagcacgacccccgctctttttgttgaccttgaacccactgtcatcgatgaggggagaactggcgcctaccaccagctgttctaccctgagcagctcatcataggggaggaggatgcagccaacaacatttcccgcggtgactacaccattggcaaggagattgttgacctctgccttgatcgcatcaagaagattgtcgacaactgcactggtgttcaggggtttctcgtcttcaacaatgtttgtggaggaacgagctctctccttggttccctcctcctagagcgcctgtctgttgactactgcaagaaatacaagcttgggtgcactgagtgcc

SEQ ID NO: 108983 - DNA, 286 bp, Zea mays
  Clone ID: MRT4577_3088C.1
atcagagcacgcgaaagtggtgcagcgaaggttaagccacgacacgcatccggccagctcccgagctgcgctgctctgctgtagctctcgagtcgacgactccttacttcccaccgaggtgagagacatacgcctggctcctgcctgctcgacggacccaaagcatcgcctcctcttgctacccctctgctcaatcggctcgtccggcgggcgcttagcgccctacacccgtcagccaccctactgcgacgccgcgttctccccttcttccgacgtcgctggctct

SEQ ID NO: 108984 - DNA, 287 bp, Zea mays
  Clone ID: MRT4577_30890C.1
cgtattacgccggctctgacctcgcatggcctcattatcatgcgcggccctgctcttgtgttacctagatggctctcttgacgtaagggagctttgattaaccgagcttcatgctcgtcatcgttctctataggggagctggtaatgctacatttgtgaacaggcatctcactggagtactttgacaccaattatgaaccaaccattggtgtggaagttcatccgtctcatttcaccactatctgtggtaagattaggttctacggctggaataccgcagggtaaga

SEQ ID NO: 108985 - DNA, 1472 bp, Zea mays
  unsure (1)..(1472): unsure at all n locations
  Clone ID: MRT4577_30891C.1
gtacttcctcgagangccggccgggaaaaaaaaaatgcacgagatcaaaaccggccgggaccttccggccgcccattccgatccgatccccggcgggccacctaccaccggtcagccccatcaatctctgaggcagcgtcagccatcaggcctccctcgtcgatctccccgccgccgccgctgctaataccagataatggaggccggcgccgccgctgctgccactgccatctaccctctgcaccgatgcaaaaccatacacctggtgaggcatgcccaaggtgtccacaacgtggaaggcgacacggatcacagcgcctacatgaaacccgacttcttcgacgcgcgcatcactcccttgggctggaaccaggttgacctcctgcgagagcatgtgaaggaatctgggcttgcggaaaagattgagctggttatttgttctcctttgtcgaggaccatgcagactgcagtgggagtttttggtggcgaaagctgcagtaatggtgtgagtgtgcctccactgatggtggagaatgctggacgtccggcagtttcaagtttgaactgcccaccatttcttgctgttgaggcctgcagggagcgcttgggtgtccatccttgtgacaagaggaggagcatcacagagtaccgtgctctcttccctgccattgatttttcgctgatagagagtgacgaagatgttctctgggtaccagatgtcagagaaacctttgagtcactcgcagaaaggggtatgaagttcattgactggctatggacaagagaagagagagagatagccatcgtcacccatagcggtttattaagccataccttgcgcatgtacagcaaagagtgccatccaacagtaacacaagaagtgagcaagtactttgcaaactgcgagctccggtctttggtactggttgacaggagtatgcttggttcagatggccccagttacaacaactaccctggcaaaatgaaaatcccagccggacttgatctgcccagcgatgacaagaagcaacctcttcagaaccagagcggctgagcaggcctgtcttggggcttgtttggtgttcaccaccactgattccttttcttttgtcatcctattttgaaacttccctagctgtattcagtccattttttgtgaactattctgagagtactattctgaacttcccatttgtggttgttgagcaccatttgtggtactggacacggccggacggtccaacctgcggacggttcgtctatagacgtggacggaccgtgattagattagatcaggcgtaattaacctcttttccgtacatatttatctatctaaactcgcggattctgttggcgaaaacaaaacctcatcagaaaaaaaacagtggcgaacccaccaggggggccggagtgggcctggcacccccaatggttcaaccaagtcagattaataatgtatcctatagtctatt

SEQ ID NO: 108986 - DNA, 577 bp, Zea mays
  unsure (1)..(577): unsure at all n locations
  Clone ID: MRT4577_30892C.1
aatagactataggatacattattaatctgacttggttgaaccattgggggtgccaggcccactccggcccccctggtggcttcgccactgcggccgtgtacagtaccacaaatggtgttcaacaaccacaaatgggaagttcagaatagtactctcagaatagttcacaaaaaacggactgaatgcagctagggaagtttcaaaataggatgacaaaagaaaaggaatcagtggtggtgaacaccaaacaagccccaagacaggcctgctcagccgctcaggttctgaagaggttgcttcttgtcatcgctggacagatcaagtccggctgggattttcattttgccagggtagttgttgtaactggggccatctgaaccaagcatactcctgtcaaccagtaccaaagaccggagctcgcagtttgcaaagtacttgctcacttcttgtgttactgttggatggcactctttgctgtacatgcgcaaggtatggcttaataaaccgctatgggtgacgatggctatctctctctcttctcttgnccatagccagtcaatgaacttcataccccttt

SEQ ID NO: 108987 - DNA, 1867 bp, Zea mays
  Clone ID: MRT4577_30893C.1
cattgggcgatccccggccggccacctaccaccggtcagccccatcaaactctgaggcagcgtcagccatcaggcctccctcgtcgatctccccgccgccgccgctgctaataccataatggaggccggcgccgccgctgctgccactgccatctaccctctgcaccgatgcaaaaccatacacctggttccctacaccttttctaccctgcctgcctgcctgatttgctcctcttcgcatccatatgcatcctctctcactctctctcacacacacacacaccaattttcgcatgtacatgaacatcaccatcacattacgcaggtgaggcatgcccaaggtgtccacaacgtggaaggcgacacggatcacagcgcctacatgaaacccgacttcttcgacgcgcgcatcactcccttgggctggaaccaggttgacctcctgcgagagcatgtgaaggaatctgggcttgcggaaaagattgagctggttatttgttctcctttgtcgaggaccatgcagactgcagtgggagtttttggtggcgaaagctgcagtaatggtgtgagtgtgcctccactgatggtggagaatgctggacgtccggcagtttcaagtttgaactgcccaccatttcttgctgttgaggcctgcagggagcgcttgggtgtccatccttgtgacaagaggaggagcatcacagagtaccgtgctctcttccctgccattgatttttcgctgatagagagtgacgaagatgttctctgggtaccagatgtcagagaaacctttgagtcactcgcagaaaggggtatgaagttcattgactggctatggacaagagaagagagagagatagccatcgtcacccatagcggtttattaagccataccttgcgcatgtacagcaaagagtgccatccaacagtaacacaagaagtgagcaagtactttgcaaactgcgagctccggtctttggtactggttgacaggaggtcagtactgcacctgcagacgcacccttttgttttggctccaacttaggatcactaaaaagaaatgcatcttgtaagagtgctcacagtcacagtgattatgcatgcagtatgcttggttcagatggccccagttacaactactaccctggcaaaatgaaaatcccagccggacttgatctgcccagcgatgacaagaagcaacctcttcagaaccagagcggctgagcaggcctgtcttggggcttgtttggtgttcaccaccactgattccttttcttttgtcatcctattttgaaacttccctagctgtattcagtccattttttgtgaactattctgagagtactattctgaacttcccatttgtggttgttgagcaccatttatggtactagacacggccggacggtccaacttgcgagacgtggacggaccgtgattagatcagggcagacgtaattaaccccttttccacgcatatttatctatctaaactcgcggattcctgttggagaacccttaggaatgggtctgagagtactattatgaacttcccatttgcggctattaggattttgatactcttttcctttagggctagtttaaaaaattaaatcttcctactgtggctgcagcgcctacaccctcacagctgccacctgatggaggcgtggtgcactatttttagcatataatccgacggtttgttccgcgacccatgtaacccctccgtgccgctctcctgctccccgagccatgtaatttatctgtaacttcctttctgctccatggcggatgattaatggaataattgggtgggggtcctctcctcccttagacagacaaaaaaaaaaaaaaaaaagcggcc

SEQ ID NO: 108988 - DNA, 365 bp, Zea mays
  unsure (1)..(365): unsure at all n locations
  Clone ID: MRT4577_30894C.1
aggggctgagtcttcccgcaagcaatttaggtgttcgaccttgctgactacaacntgggaggtggagattttcactgtgctccccctccgggtggcatgccatctttgtgagacattgactgcaagaccataccttggagtggagcgttgacacaatcgataatgtcaaagccaatatccagacaaggagggcattccacggaccacatcgcctgtctttgtgcaagcgctgaggatggtcgtccctcccgactacaacatccaaaggagagcaccctcacctgtgctcccttgcaggtggatgcagatcttcttaaaccttgactgtaagaccataacctggagttgagagctctgacaccatc

SEQ ID NO: 108989 - DNA, 306 bp, Zea mays
  Clone ID: MRT4577_30895C.1
gggagaaaattaacagaggtttttatttaacactggcccgggaccatgcaaccttagtacacgaagggtctacactataaaagggagtgcgcaatcatgcacccaacaatgagcaataccagcgatttttgcttttgaaccgaaatgcatgcaaggcgtgaagatataccacgtatccactgggggtgcactgtgagacccagatacccccccacgagagggttaaaaaggccggacgactccagggcggacggcattttgggccaaatgtaggggctgaggagccaggaggagctgcctttaagc

SEQ ID NO: 108990 - DNA, 174 bp, Zea mays
  Clone ID: MRT4577_30896C.1
aacacttctacacacaattcgcaaatggcttgtttacgatcggacacaaaggcataaagggcatcgtttcccattattgatggaccacactctctcgaggtgggaagcgaaataaaaggtggtcttttctaaaccaccggaccgagtgtagtgtagctctagcttcgcacgccc

SEQ ID NO: 108991 - DNA, 154 bp, Zea mays
  Clone ID: MRT4577_30897C.1
gacagactagcaacaaactaagcgcctccagattgcagaactggacaccatgaaagtgcggatcataggcctcgctctcctggcgctcgctgtgagcgccgcctccagtacaagcgagtgctcgcaggtgtcagacaccacccgttcatctacc

SEQ ID NO: 108992 - DNA, 1175 bp, Zea mays
  Clone ID: MRT4577_30898C.1
caggagtgtatatatataaactgatacacatgattttgctctgtattccccaccagataaatgttgcttctggtccaagctgcaggccgctgaagcagaagataccgtgaggtagcatagagagagagaaagaggaagggaagccggtgtcggtcgccaggcatgtcgccgccgctcctgtcgaggctgcggctggtgacggtggacgtgacgggcaccctgatcgcgtacaggggccagctgggcgactactactgcatggcggcgaattaagcacgccaagatgccgtgcccggactacggccgcgtgcacgagggcttcaagctcgcctaccccgacatgggcaggatgcacccgtgcttcggccacgccgccgccatgcccgccgccgcgtggtggaggatgtgcgtcagggactccttcgaattcgtcagggccggctacgactacgacgacgagacgttcgacaggatattccggcggatctactccacgttcggctccgccgcgccgtacgcggtgttcccgtacgtacgcgcggcgcttcctccggtggctgcgcgcgggaggagggcctcgtcgtcggcatcgtcagcaacgccgagcaccggtacagggagggacgtcgtcctgccggcgctggggctcaaccaggggtcggagtgggacttcggggtgttctcgggcgtcgtcggcgtggagaagccggacccgaggatctacgaggcggcgctgcggcaggcggccggcgggggcgggggcgtggcgcccggggaggcgctccacatcggcgacagcatgcgcaaggactacgcacgccccggcgcggagcgctggcggcggtccggcgcgcccgtgctcccggacctcgttgccgcgcaggagtggctcgccgggggggcacggtcacagggaggaattgaagggcagctagcacctggacgtccggtcttgctcgctcgatcgagcaagtgcctgggacaacagacacgcatcggcgccattattcctgctctcggaataacagaatgccccgatatagatgtcgtcgtgtaatcgagatgaaccaaacaactctagctcctagagatccggagtttctggagcgggcaagagcaatgcagcatggggtgtcatcgtgcctcatcaaccagattttcagaacagctggacc

SEQ ID NO: 108993 - DNA, 378 bp, Zea mays
  Clone ID: MRT4577_30899C.1
cgccggcccgatggccgccagctccggcgaccactctgccagtggcgacgtgggatgcgcaagtggtgagtgctccacaccctttgtaagcgcgccgtccagccccgcccgcgacccgtccttctccgctgtcggttgcttttacagcgcgccggcgagccccggcactgcggatgagtatggattccaattcgacttcgacttctcctcgcgttgcccgtctcccgccgcggcggcgatgtcctccgccgacgagctcttccaaaacggtcagatccgaccaatgcggctagcgtccttcctgctccgcccgcaggtgctcccgcctctcaacggaggcgtccccgccggcaacccgccgccacagccgccttcgcg

SEQ ID NO: 108994 - DNA, 330 bp, Zea mays
  unsure (1)..(330): unsure at all n locations
  Clone ID: MRT4577_3089C.1
gctcggcgattcccaggccccgcgagaaatgtcgaagcagatctgagataaggattcctcctccccgaggaggaaggatgaccgctcaccgaagacaagaggagnaaggatgctgacaagttcaatgggcgctgctccaagcanttgtanaccctctgcgtcttcaatgctgagaaggcccaccaggcgaagcaatgtcttcccctacgtttgaccggcgaggagccctgattggatacatggcaacgccggcctggacatacccgagcttctttatcaggagcgagagcatgctacgtatgtacttttggaacctaaggtattatacct

SEQ ID NO: 108995 - DNA, 453 bp, Zea mays
  Clone ID: MRT4577_308C.1
atggggtcatcgaccccatcgacggtggttgtggaggaatggaggaagatgataaacggcggcggcggccagaagaggcgcaacccaaatatcattcgctttcaacaccacattgagtccgaccccaagttcttcgacaagttgtggcgtgcctccatttctactacttcaaccttggtaggatttgaggaagcaatggaagaactacatgctaaggtgtacaagggactctctattgatcagttgaggcaacaatgcaatataagaatcttacctgatatgatgcttgatcacaatgatcactcccttgttgggtgccagaagaacacctacaggtattcaaccacggatgggaagccataccagattcttgtgttcctgtcatatcccactgaaacaggtttgaagagaagcgctcgacgtggcgcaggtctgtcagattctatggtgtag

SEQ ID NO: 108996 - DNA, 248 bp, Zea mays
  Clone ID: MRT4577_30900C.1
ttgggctggataagataggattggatccccaattgcgttcgccacttccctgcgtccgggcgggcggcaaaaaaactggagggtcacagcggccgcatgcccccgtgttagctgaagggctttgccatggcggataaggggtgactcaagcggctcctgaatgagtcccacgccctctgcaaggaggggggtggggagattgtttataaccacctgcccagcttcatactggagtggcactatgtact

SEQ ID NO: 108997 - DNA, 268 bp, Zea mays
  Clone ID: MRT4577_30901C.1
cgcatattttatcgatggctatgccggtgtagactgcggtgtgcatcgcgcgcaacgtgctctggctgctggacgcttgggtctggacgtgcgtgctcgccgccgatggcgccgcccgccttctccggtcggtcacgcactgatcgatcgatcgtcccccgccgccgattcacggccgtatgtgtctagatgcaaaacgaaagatatcatctgctccacccatatgacctcgtgagtcgatcgtccccttaatattatacagggctcg

SEQ ID NO: 108998 - DNA, 341 bp, Zea mays
  Clone ID: MRT4577_30902C.1
gcaggctcgcttcgcttgcgcctccccccttccccgccgtcgccgtcgccgccgccgccggagccatgtccggctcggcgttgcaggcggtggagccccgcccagcggcagccgcgacgactgccgcggcttctccggccgccacggctcagcccgcggcggtggcattttttaggggagcgagagggtgtggcggcccagcgcgtgcatcggggccggaggcaacgatggaacacgtgctgctggcgctgcgggagacggaggcggaacgggaagcgcggatccgcggcgtcttcggcttcttcgacgccgcggggcagggccacctcgagcacgcgcag

SEQ ID NO: 108999 - DNA, 370 bp, Zea mays
  Clone ID: MRT4577_30903C.1
tttgttttttttttttttcatattggaactattcaaagtgtgtgcttgttcgacatgattgattgcctttgaggcaaagcacaaggggcggtgccttcaaaaataaatgtttctacaaaaccccctttggaaaagaggtggaaaagacttggcatactttcatttgtgaataacttggcccgaaaaacccgggactaaaatcggggggttgggcttcccacccagggggaaatggggaattctaaggggggccacatctgctaaggcatggaaaaacgacttcgggcccttaaaccaccgggggggttaacccttgggtgagagctcaaaacaccgacaaaataacaggggccaaaaaaaaacaaggacc

SEQ ID NO: 109000 - DNA, 418 bp, Zea mays
  Clone ID: MRT4577_30904C.1
cgacttctcgtcggtgtccatctggtcccgcgaccgcttgtgatcgatgatccctacatgggtctcaactctggagaaaccagcttgcacaatttggggaccctatgccctctcctttaggagggctgcccctgtaggagaccaatgaacattgggtcttactagaatggggctgcattgcattaatgtggcgctctgaaactaattaatactttgaattttgagattgaatcatacacaggggtggtacttgcttttggttatgagggatctagtcattctggtcggactaaccggcgacagaccgggtcctctcgcgcttgctcggcaaccagtgcggcaaccactccttcgtgtgccatgcgccagtcctcgtgttcagggtcgcctcaggctgaccgacgggtgcagctctgga

SEQ ID NO: 109001 - DNA, 580 bp, Zea mays
  Clone ID: MRT4577_30905C.1
accgggcccccaaattcatagggccccctagccactagacgctagcattttttctgttaaatttatctattctagacacaaatatgcaaagagcgatgcactatcaatcagtctcgtttaaattgttaaaaaaaaaaaaaaaagggcggccgccctttttttttttttttgacagcgttattaatatcaggagcatgtaaaaactatagggaaaacatgtccatatactgtggcaggtatgcaaagtaaatatatgacccggtgtcgattctctgacaggtgtgccgtcgaacgcaacgcaacggtgtgcaacctaacgcactgcgaacgcccgagaggtccctgtaaaatgtttgatggacccaatcagtggtttggaggcaccaaaatgcctcaacctataaacgcccgacggggcgtctccaggaacggtccattccagcgtcgcaaagcttctcgggctcagcttcgacggtctcgaccacttgaagcgtagtgaccagtcgtcgtcgtcgtaggcaggaacccagctgttgctgccgtccagcttctcaacgagcgcgaacgtgccgtccgtgag

SEQ ID NO: 109002 - DNA, 2950 bp, Zea mays
  Clone ID: MRT4577_30906C.1
gccggccgggccggcagcggagctgcacaaggtggacgccatcccagtcctacgactacgaggcgcccccgctctcggaattttcagcgggtcgcgtcgcgttccgtgcggggtgtcgcagtgccgaggtataaatggcggtcagtcactgcggccgcagcagcaactgaatcatccgaggaaggagggtggagggattttgccgatcacggcctgctcaatttgtcagtttattgagacatccaacttgcatgagttgatcaacaagcccatctctggttcctgatggaggcatcatcttccttgcgcttccaagtttctggttttagtttgtccaagatatggctatgcctttttctggtactcgctcttcagaactgcagcccagcactttcagattcaccatatttggtcggtatggggagctatgacataacagggccagcagcagacgttaacatgatgggatatgcaaatgctgagcagattgcatcaggaattcactttaggctaaaggcccgtgcctttatcgttgctgagcctaacggcaagcgtgtcgtgtttgtaaatcttgatgcttgcatggcatcacagcttgttactataaaggtgcttgaaaggcttaaagcaaggtatggagatctttataatgagaataatgtggctatcagtggaatccatacgcatgctggtcctggtggttatctgcagtatgtagtttatattgttacatcacttgggtttgttcgccaatcatttgatgtgattgtcaatggaatcgagcaatgcattgttgaagctcacaacaatctccaccctgggaaaatctatgtgaacaaaggtgacctccttgatgccggtgtgaatcgcagcccaagtgcatatctaaataacccccgctgaagagagaggcaagtataagtacaatgttgataaagaaatgaccctcatcaagtttgtacatgacgagtctggtccgattgggagtttcaattggtttgcaactcatggaacatctatgagtcgtacaaattctttgataagtggtgataacaaaggagcagccgcgcgtttcatggaagattgggcagaacaaaatggcattccaaaacaggcagctcatgtaaatcacgatggtttggaatctttacacatgacctctcgacttccgagaagagtctccccaataattcctgaaccaaatgagataactgatgacttagtacaattggcgtcatcctacgaagcctcaggtggacggcgattatcaagttcaagtatcaccaagcgtatcagaagtacccaacagaacagacctaaatttgtttctgcattctgccagtcaaattgtggtgatgttagtccaaatgtcctgggaactttctgtatagacactggccttccttgtgacttcaatcacagcacatgcaatgggaagaatgaattatgctatggacgagggccaggatatcctgatgaatttgaaagtactcgtatcattggcaataggcaatttcaaaaggctgtagatctttttagttcagcttctgaagaaatacaaggcaaaattgactacaggcatacttacctagatttctcacaacttgaagtgaatgtccgtacaagcacaggaggtcagcaagttgtgaaaacatgcccagcagccatggggtttgcctttgctgctggaactacagatggtcctggagcttttgactttaaacaaggagatgtcaagggaaaccctttctggagattagtaagaaacttacttaagacaccagggaaggagcaagtcgaatgtcaagcaccaaaacctatcttgctagacactggtgaaatgaaggaaccatatgattgggcgcctgcaattcttccaattcagatcataagaatcggccagctggctatcttgtgtgttcctggagaattcacaacaatggctggcaggaggctacgtgatgccgtcaaagctgtacttacaagtgacaacagtggtgaatttaataacattcatgttgttcttgcggggctaacaaatacatattcgcagtatattacaacttttgaagaatatgagatccaaagatacgagggagcatcgacgttgtatggcccccacacgttgagcgcctacattcaggagttccagaaacttgctacagccatggtggcaaacaaagaggtcccgacaaattttcagcccccagacatgttggacaagcaaataggactcctcccaggcgttgtgttcgactccacacctcctggggtggagttcggagatgtcagctcagacgtccccgcaagctcaactttcaggaagggcagtgtcgtgaacgctacattctactcggcgtgcccgaggaatgaccttctcacggacggcacgttcgcgctcgttgagaagctggacggcagcaacagctgggttcctgcctacgacgacgacgactggtcactacgcttcaagtggtcgagaccgtcgaagctgagcccgagaagctttgcgacgctggaatggaccgttcctggagacgccccgtcgggcgtttataggttgaggcattttggtgcctccaaaccactgattgggtccatcaaacattttacagggacctctcgggcgttcgcagtgcgttaggttgcacaccgttgcgttgcgttgcgttcgacggcacacctgtcagagaatcgacaccgggtcatatatttactttgcatacctgccacagtatatggacatgttttccctatagtttttacatgctcctgatattaataacgctgtccatcgcccgttctgtttggtcatgacaaatacccaaatcgccatatagctacagactcgatgtgtgtgaaatttctatatattaaagcaggaaagaaatctgttctcagattcataaaaaaaaaaaaaaaaaaaaaaaaattaaaattaatggatttc

SEQ ID NO: 109003 - DNA, 566 bp, Zea mays
  unsure (1)..(566): unsure at all n locations
  Clone ID: MRT4577_30907C.1
gacgctacttcagacttaaggattcaagacattatctttggtgagagaggcacccagcgtttttagcataacgaaccatatgaagcacccaagggggcatgctgggactgagtataattatggcagccaccggtaaagtggacctgagaggacaatgctaataaagatgctgagggtgctgccaacaacgtagataaatacaaacacaagcacataccacctacttgctcatgagaggggaatgatgacatcatcaacctctatgaaaacaccttattcaatacatatctgaaccacaaactgtcagcattatttttctaatgcaaaacattacaaactggtgatcattgtgacatatgacgacanaaaactgatgaaactctctggaagattaaatgactgttaatgcaaaacttactcaaagactgactatgcttgaaccaaagcaggctaaatattataaacagaactacctaagccatcaaggctgtgagttatactgtactttaattgaactggaagctgactgacatggatcctgcagaaaacatgcttgaatacttgat

SEQ ID NO: 109004 - DNA, 460 bp, Zea mays
  unsure (1)..(460): unsure at all n locations
  Clone ID: MRT4577_30908C.1
aagcctgtaccagggtngtcctgaggaacttcactgtggggtctcgtagtgtctttgtcgttctagcattctcaaactagccctcaccatggcagccttttccttccatttggttccctatttatattggttatttaaggtgcttttacagcatgcatgagagagagagagagagagatgtaaactgtagtatttgtgtatgtgtaagagggagtatatagatagattttgtttaaattaaatgttatcaaacatgattattttttaaaatttcaaattattagtgtgtgtatatatatcccttattgaacacaaactatgatcagttgtggtgtggtatctcgtgaccagngttcgaaccctaggaaactcaaaaaatttatgcagtgtggagttgtttttttttgcgggttccacgctgggcagcgcgggttttctctgggcccggtcgtttttgctg

SEQ ID NO: 109005 - DNA, 252 bp, Zea mays
  Clone ID: MRT4577_30909C.1
aattcccgggcggacccactcattcgatttactctgttccttaccttcgtttgagttcgtggtacttgatcctgttagtggtctgggtagactagatccgagggagggactgtttattcccatttaagtgtggactagcctctaatgcatgacctatgcacttatgttggaataatttctacagttctcttacatctggtattgaatctagtaccatctctttattaatcaatatactatatataccattct

SEQ ID NO: 109006 - DNA, 387 bp, Zea mays
  Clone ID: MRT4577_3090C.1
atagctgcagcgacgtaactcggaatcggctctagcgggaagtgtggccgtccttgtcattagtggtcatatgaaaatggcccagagaaggagatgattctttcaagggacacaggcagcttctctccttgtcctctggggaggtgctgacccctcagaaaccccttcccccaacttgaccccaggctgaacagaccactgcatctcactgggccagcagcccccccagcccccagccttggtggggaccaagcagcctttcccgtcccctcctcgacccgtacagttgagagccaggggctggtgtgtgggagctgctacctggcagtttctcgaagggtcaccgagcctctggtgggacactgggcaggaatgctctcatcacga

SEQ ID NO: 109007 - DNA, 526 bp, Zea mays
  Clone ID: MRT4577_30910C.1
aaaagcggcatatataataataagaaacattaagatgaatagaaatcaaatcttattttcttattagtgtttaataatatccttttttttagtaggttatttcagagtattgttttttacttattgaatattgcatttttgcaattcattgatattgcaataatttatattgaaaagatgatagctaatttattggctaattcgaattagtatgtagaattcgtataattataactgttgaagccttaaattcaagtctcttggctttctaagatcagaggaggaaaagaatgaaggtgtgggcgggaaggaggaggcaaggccccctcaatgtgtattcgactactcattacggaaccaccgattgatccgattagacttcccgcggggtagcacggggaacttgctgaatcaactccttggaatcggaggcctgactgagggtcaatcctatggtaacctcaacctaggaatgcctgtttcacttccttgacagagccaactgagatgctctgtctcgatgtgg

SEQ ID NO: 109008 - DNA, 2963 bp, Zea mays
  Clone ID: MRT4577_30911C.1
agcagtggtaacaacgcagagtactttttttttttttttttttttttttttttggtatctatggattgatcacaagccgaaacatggttagagctctaatatgtcttgaacttatactgaattcaattaatctaaatctcgtaacattttctgatctatttgatagtcgccaattaaaaggagacattttcgcaatttttgttatagcccttgcggctgctgaagcagctattggactatccattctttcttccatccatcgtaacaggaaatcaactcgtatcaatcaatccaattttttgaataattagacatagaatcccctaaacaaaggggcatatataataataagaaacattaagatgaatagaaatctaatcttattttcttattagtgtttaataatatcctttttttgagtaggttatttcagagtattgttttttacttattgaatattgcatttttgcaattcattgatattgcaatttgaatattgcaataatttatattgaaaagatgatagccaatttattggctaattcgaattagtatgtagaattcgtataattataactgttgaagccttaaattcaagtctcttggctcttttcacgctttctcacaaacagattacgaaatatattgcattatttgttaaagtttggataaaccattgcttcgtctggtgtctacaatacatctaatttatatagtactaatttcatttttaccagatcgaaaatttttatgttgaaaaggaaaatttagagatccaatgtcacattctgtaaaaatttatgatacatgtataggatgcactcaatgtgtacgagcttgcccaacagatgtattagaaatgataccttgggatggatgtaaagccaagcaaattgcttccgcgccgagaaccgaagattgtgtgggttgtaagagatgcgaatccgcctgtccaacggatttttttaagtgtccgcgtttatttagggcctgaaacaacccgcagcatggctctatcttattgatacgttacaaaaaactccacttgaatcgtctgattcctctttaccgaagaagcctgtgctcgaaataatcgagcatgggcttttctggtcaaaacgtatcttgtctttattactttatcatgagttattttccttggttaacaatacttgttgttttgccgatatttgcaggttcattaattttctttttacctcataaaggaaataaaatcgttaggtggtatactatagctatttgtttattagaattccttctaatgacttatgcattctgttatcatttccaattggaggatcctttaatccaattaaaggaggattctaaatggatagatgttttcgatttccactggagattgggaatcgatggactttcattaggatctattttattgacaggatttatcactactttagctactttagcggcttggccggttactcggaattcgcaattattctatttcctgatgctagcaatgtatagcggtcaaataggattattttcttcacgagaccttttacttttttttatcatgtgggagttagaattaattcctgtttacttacttttatccatgtgggggggaaagaggcgtctgtattcagctaccaagtttattttgtatactgcaggcggttccatttttttcttaattggagttctgggtatgggattatatggttccaatgaacccggattagatttagaaagattgattaatcaatcataccctacaacattggaaatactactgtattttggcttccttattgcttatgctgtcaaattgccgattatacctttacatacgtggttaccagatacccatggggaagcgcattacagtacatgtatgcttttagccggaattctattaaagatgggagcatacggattgattcgggtcaatatggaattgttaccgcatgctcattatctattttccccttggttggtaataataggagcggtgcaaataatctatgcagcttcaacttctcttggtcaacgaaatttcaaaaaaagaatagcctactcctccgtatctcacatgggtttcataattataggaattggttccataaccaacattggactaaatggagctattttacaaatattatctcatggatttatcggtgctacactttttttcttggcgggaacggcttgtgatagaatgcgtcttgtttatctcgaagaactggggggaatatctatcccaatgccaaaaatttttaccatgtttagtagcttttcaatggcttctcttgccttgccgggaatgagcggttttgttgcagaattagtagtatttttttggactaattactagtcctaaatttatgttaatgccaaaaatgctaattacttttgtaatggcaataggaatgatattaactcctatttatttattatctatgttacgccagatgttctatggatacaagctatttcatgttccaaacaaaaattttgtagattctggaccacgagaactctttcttttaatctgtatctttttaccagtaataggaattggtatttatccagatttggttctctcgctatccgttgatagggtagaggttctattatccaattattatactaaataggattttctttttttaaccagtccgctctatattccagagtggaaaaataaaaaattcagaaaaaagtaaaaaagtctaattagatctatctcgaatttttgagaaccccttgaacgtcttttcaaagggttctcaaatcaaactaaaaaggaaaaaaaccgaaggttttatgttatgtaattatttagatggtaatgtaaatgaaccgtaactatgtaaacctattcctaacagattgataccaaaatagcagatccaaattataagaaatcctatcgaagctacaagtgcggaattcgtacctgcccgggcggc

SEQ ID NO: 109009 - DNA, 464 bp, Zea mays
  Clone ID: MRT4577_30912C.1
ggggaaataaaaacgcgggagaagaggggtaaaaattaacctatggtttaacccccgggattaccggcctaaaaccccaccccgtggccagcgggaaaaaaacccccggggggggacccccgccgctttaaccggcccccaaaaaacaatcgcccaacctttgcaggttctggggtaaccgggacccgggggtcgggccccccccaaacaaaagcaacccgggcctgggttttaaagggggggcgagggggaaaatcaaaggcctgaagttcccggccggggggccggattttcccccgggaacgcctggacaaaccccctctttggttatctggcctatgaccacccaaaaaactccctatacccacaggcccttggggcccccgggtataacaaaggtcaagccctgaaacaaaacctcatattttggtgcgttggtaaagggcgggaataacaaccggggg

SEQ ID NO: 109010 - DNA, 341 bp, Zea mays
  Clone ID: MRT4577_30913C.1
agagcgattgtgaaccaaggcctatgcgatgttcaacatagcagagagctccaatctcacagcttgactccttacctgaatacaagcttgacacttcttttggagtaacagttcaaaaagccatgcgggatgctgtatatcaacgaagagcttacacacagatgctaattgcgtaaaagctagaagttggaacgcagtttgcactatggaaacatatggaccacagtttacttcgtttcaaggtcactttaaagacttacacaaaagataacatttctatccggtcaccatcaaaggaaacatgggggcataagatgcaggtccatgttctgaagtgcata

SEQ ID NO: 109011 - DNA, 375 bp, Zea mays
  Clone ID: MRT4577_30914C.1
aattaccggatcgagcacgcgtacccttgaccctaacctctctcacattaaactttgtcttcatgaacacttacacatgggcctccagcgcaactttctacattcaggccgtctacaatacccaaaccaataatcagccccatctaaactcttagatctaactctaatcttcatacaatctagctacatcccttcttcacaactactctacctaacatcattcccactaaacatgtaccagcaaacccaattaagatctacaatataatacctaatctacaacatctgcaccatcctactaattctcaacaccaatgtgtagaaaccctactatcataccagacaaaaccttatgactaccttacatacttttac

SEQ ID NO: 109012 - DNA, 386 bp, Zea mays
  Clone ID: MRT4577_30915C.1
cccaacggggaccggggtttcaaataaaagcaaataaactttggtccgggaccattccacccgaaggggacccaaaaaccccccggaaaaacccctggccccacaaagcaaccatatggctttggataaataaggctggggcattgcccaccccccaccatcgccagccccccagggaaaggcctgatcaaaagccacccctaaatcttggtgaaggcaactatggcccacctctgtacttcctcgtaaacgggcccaccccacaaatagtcctaaaaaaaagggttaacaaaaacaaggtcggcaacaatggccatcatgatttgcagttttttgaaaccatatccaactggaacaagcttggatgccccccaaaacaacccttc

SEQ ID NO: 109013 - DNA, 217 bp, Zea mays
  Clone ID: MRT4577_30916C.1
ccccagagaaaatccaaaattggagcaaaaaaaggggcggcaaatccccaggcggacaggcatgggaccaaaaagaggggggggggggaacagaaaggcctaaaacccagggctgggttcaaacggctgggcctttccccaaaacagcatcccaacataaacaattggggggcaaaaacccaggctaagggggggccattccgggcgcggggggcgc

SEQ ID NO: 109014 - DNA, 340 bp, Zea mays
  Clone ID: MRT4577_30917C.1
aaccagcaaaaaatgcccggggggggaataaaagcggggcaggtaaacaaaggttttggggtggtaaacaggaggcctcccacgaaagttctacaacatcccccaaaactggggggaaaaccacagggaaaccttaggctagccccggaaagaaaggaaacaagggcccaaaggggggggggcccaaaccacccttatttggttggggggggccccccggccacgaattccccctcctaaaaaaaagggggaaccggggacgggggggtctgggaccccaaaaggttaagggtggttccaatttggggggaccccaatttatcaatgcccctacccgggg

SEQ ID NO: 109015 - DNA, 420 bp, Zea mays
  Clone ID: MRT4577_30918C.1
aaaaaaaaaccgataacaataggggggggggggggggccaaagggggggggcaagcggctaaggtaaatccatgagcccggggcgggggggccgacaaagaaaaaacggaccgggccccaaaggcgtcccaaggggccctaaaaagagtggggtaagggcttggaaaaatcatgggcacaggtgccgggggggggaacggggaatccgcccacgatccccgagggaaaccagctttgactataagggggaaagtcagggggggggtaagagggagctaactcactttactgggggaaaatttactgcccgcttaacagccgaaaaaactggcccgcaagcttaataaatgaaaccgccggcgcccaagggggggcgcccccccaattgagggccaggggggaaacccccctcaccagggg

SEQ ID NO: 109016 - DNA, 533 bp, Zea mays
  Clone ID: MRT4577_30919C.1
ggaaacaagcaattttgttaaagttttaaaattgggagacatttccggccttgcaccgcaaaaggcaacaaaagctcccccaaacaggggccaacccattttggatgcaaaaagcagcccccctgaaaaaaaaaattttattttttttcctcccagtttccccccgggcacaaggcttttttttatgactaaaaaacggcaaaccccttggggggggggggggatataataaaaaccctgaaattggaacctccagggccccaaacacaaacacggggcccccaagggggggccaaagaggaaagcacccttggccctccctgcaggggcccctttttgggggggggaggggcgggaggaaatccgattttttcccaagaacccggccccggttgtgggaaaatttttccttcccggccagtttggaaaccttgccgtgggaagggaccccgaccggtaatttagggaggggccccggggggtcctgctccaggccctcgtttgagaacaggccccaaaatttttgggagacc

SEQ ID NO: 109017 - DNA, 315 bp, Zea mays
  Clone ID: MRT4577_3091C.1
cccacgcgtccgcctactcgtggtggccttgtaaggactgctcctgtgcgtggagttcggcttgacctcgtgcaagtttcaacaggtaatattggctatggctaggttctatgaagactgagcatgtgccatttgggagaaaaagtacgttctacttgctagtatgcaagtcttattttgttgaaactgatgtcaattgtccttctgctacacatatcatcatttaggttatgtctgtagtctgtacttgtgtctgtatctggcctcatatataacatccttgttagatgtcatacagaagaatcatgttgcaat

SEQ ID NO: 109018 - DNA, 756 bp, Zea mays
  unsure (1)..(756): unsure at all n locations
  Clone ID: MRT4577_30920C.1
gggtacctcgagccggccgggaagttctctcgccggcctgtttggagcctgtttccgcgggtcggcgtctccctcgaatcggcaaaacaccaggggaacgctcccccgagtcgcgaccccgggcaagtttccccacgggcggggcgacgaaatcaccgctctgctccgacgtccagctctactcgcgagcaggacatcaccgcgcgtccaccatctctggcttgctgtcctccgcgcgtcatctccatccctggcttgagaattgcattggagcaattgacggaacccatgtacctatcaccattgcagaagataaggctcctccttaccgaaataggaaagggtcactttcacaaaacgtgatgttggcatgtgaggtgaatgtggcgatgaagagatgggcttacagtgtgttaagtggaagcaacacatgaagcggacatggagaaggaagctggcatgacactaaaacgcataaagttgacttgtgacgttcatgttttagatgtcttattctactgccaaacttcctagtactccatttttatactatattgtctatctgtacgtgtgaatggagatgatgatattatgtgatgtgatgatggatggattagcttcgttgaatattagatgatattatgtgatgatgatattaaacgggcattgtagtattgatacatgcttcatatttctggatttttagtgatgttttattgtttatgagttttcgananaaaaaaaaaaaaagcgggc

SEQ ID NO: 109019 - DNA, 1532 bp, Zea mays
  unsure (1)..(1532): unsure at all n locations
  Clone ID: MRT4577_30921C.1
aaaaaaaaaaaaaaaaaaaaaaaaaaaaaaaaaaacaccaggggaacgctcccccgagtcgcgaccccgggcaagtttccccacggacggggcgacgaaatcaccgctctgctccgacgtccagctctgctcgcgagcaggacatcaccgtgcgtccaccatctctggcttgctgtcctccgcgcgtcatctccatccctggcttgagatatgggttcttgggaagagctagctaggcagtttttgttggaggaagaagacgatgaggagtttttctttattcttctctctgctatacttccattcctctctgaagagaaaaggtctatccatacctcctctctctctggtgcccaaaaggttaaggagattcttgaagggcatgagagttggtgcaagtccgagtttcgaatggagccagaaatatttagagccacatcagaattccttagaagagagggtttgttacgtgatacacgaggagttaacgtcgaagagcagcttgggatgtttatgtatatgatctcccacaatgccagtaaccaaatgcttcaaaaggctttccaacatagtggagagactatccatcgaaaaatatcagaagttttcgatatagttcccactctaactcagcgattcgtgaagcttcccaattctatccagacacatccaaaaattataactgattctaggttcatgccctttttcagaattgcattggagcaattgacggaacccatgtacctatcaccattgcagaagataaggctcctccttaccgaaataggaaagggtcactttcacaanacgtgatggcccggccccggcgggctctggattcaatccttctctggaatgaaaacctgtcaaccgaacatggccggacggggcatccgaccgcgacgaatctctggcctcccaccgccgccgctacgaatctctagcctcccactgccgccgcgacgtccagctctgctctgctccgacgcccagctctggcttgccgtcctccgcgcgtactccgcgctactggatctctggcttgctcgtaccggatctctggtgtgtacaggatcgcaggacatccactgctcgtcctccgcgctactggatctctggcttgccgtcctcagcgcgtcgtccccatctctggcttgagtgtgttaagtggaagcaacacatgaagcggatatggagaaggaagctggtatgaaactaaaacgcattaagttgacatgtggcgtgcatgttttagatgtcttattctactgccaaacttcctaatactccatttttatattataatgtctatctgtacgtgtgaatggagataatgatattatgtgatgtgatgatggatagattagcttcggaatgcaaaaaaaaaaaaaaaaaagaggtattcaaactttgcgacactacagatattaaagtggtagtatctctttccggaagcctgcatgcggtcaatcaagccagttcttgcaaatcaaactttgcgacacttcacgcactccttaagcttttctatg

SEQ ID NO: 109020 - DNA, 273 bp, Zea mays
  Clone ID: MRT4577_30922C.1
gggtcaaaacaccccaccccaaaggcacaaattattcaacctatacataaccaaccatacccattccttcccaaagacttccccaaatatttttttcacaacttgtctactactttttcacccaacacatacccaccttcatacataaactctccccaaagaaaaaccccctcccacgaaaacacccaaaaaccccaccaaccgttaaaaacacccccccaatttaccccccacaaaacttaatcccccggaacctcacttaaaatcttaaaa

SEQ ID NO: 109021 - DNA, 235 bp, Zea mays
  unsure (1)..(235): unsure at all n locations
  Clone ID: MRT4577_30923C.1
acacgctctgtggccaagtccgggatgcccggtggaggccactctaacgagttccggggagcccgaggtgatgcagggctacgngcgtgcgccccgacgccgaggtgctnnacgcgatcgacacggcagttcgccagaagcatctgaaggtggtggctgaagctgtactgggtctacgccgggggggaaggtttgtgtctccgtgnaggatcttaagatctatttcttaatgatg

SEQ ID NO: 109022 - DNA, 794 bp, Zea mays
  unsure (1)..(794): unsure at all n locations
  Clone ID: MRT4577_30924C.1
ctcgctccacaggaacatcgggatcacagtcttcgctctcggcactctgcaggtacttcatatcataactcacacgcttcactgttttcacccagctggtgcatggaaactccgacgcccgccgccgcccccgctgatcgtcnttcttcttcttcttcttccaccgttcgctagatcttggcgctgttcctgcggccgaagaaggaccacaagtaccgggtgtactggaacgtgtaccaccactcggtggggtacaccgtcatcgtgctgggcatcgtcaacatcttcaagggcatgaacatcctgggcgtggagcaacggtggcggacagcctacatcgccgccgtctgcgtgctgctcatcgccgccgccgcgctggaggccgtcacgtggggcgtcgtcctcaggcgccgcaaggccgagagcaagaccttcaacagcgcatccaacggccacctgccacattccgtgtgactgtgtgagtgtgcaatgtgcatgagaagaaaaaaaaagttttgttttctggagttcctctagctctggctctggctcgcatgtacgtacgtacgtatgtatgtatttatttatcggcatactatcgctagtggcgtgtgtgactacgggcagacgatagtaggtttagagtttgctggggttttgcattggcctgccggctgttgtatgtccgttttggacggttttctgtaactctgcatacgtcgcgctggagtctgagctgtagcgatcatgtagtactgtatgttggcattttgtttatgtatgtattccttttt

SEQ ID NO: 109023 - DNA, 340 bp, Zea mays
  Clone ID: MRT4577_30925C.1
ctctaacccaatcattacttaccaagttctgtcctattcatatctagggctatccttcaaatacattcctattcatcatcaaattccaattcataactccattcatcgtctatctcatcttctacactatctcaatcaaaacacttttgatcaccataaaactattttaataccttataaacttcaaaatgaacctttacttacctaccaaactattcattattattctcatatcgctaataaaatctacatgttaaatatttcaaaacttcaaactcaagaacttattacacttcataaagctcatcttataactttatacaacccatacataatatca

SEQ ID NO: 109024 - DNA, 171 bp, Zea mays
  Clone ID: MRT4577_30926C.1
tagaacccccacagccaggaccaagctcccagtagtagattctatgtatcgtacacatgtaacggttcgagggatatatgtgcagagcgtagcttcttctgagtgttattaatatatgcacctaagggatggtggctgggaggactttgggtatggcgtctcgaatggtgt

SEQ ID NO: 109025 - DNA, 574 bp, Zea mays
  unsure (1)..(574): unsure at all n locations
  Clone ID: MRT4577_30927C.1
cggncgcgtgggttttaaaatcaggttatccaagaaaagagggaaagcagtcatgctttaccttgcaattcggcacgaggcatgaactccaatttgactgttaagagcagaaataatatggctgatggggagcctcagaaagagaaactaattgttgaaacttacattccagctgatcctgggccgtatcctcaagataaacctaaacagaactcagtgaggttcacaccaactcagatcggtgctataatatctggtattcaacctgggttgacgatggttgttggtcctcctggtacgggaaaaacagatactgctgtgcagatattaaatgttctatatcacaactgtccttcacaaagaacactgattataacccactccaatcaggctttgaatgatttatttgagaagataatgcagagggatgtgcctgctaggtaccttctccttggtcagggtgagcaagaattggccactgatcttgattagtcgtcaaggtcgtgtcaacgctatgctggtccggcggctagagctgctcggtgaagtttctaaattggcgagatctcttcgt

SEQ ID NO: 109026 - DNA, 304 bp, Zea mays
  Clone ID: MRT4577_30928C.1
ggcccacaaaaaaaccacccctttttccaaccaacgtttgttttaaaaataaaaaaaaaaaccttttgccttttttcttgggggaaaccccaaaaataaaccccagaccctttccatttggaaacaaatcgaataatttggggggcaatttggaaaccaaataaaactttcccccgaagggtgggtttgacttccccaaaggggcccttggaccccctgtccttaacggggcttcccaggccaaaagccataattcccccgggaattttcaacagccccttaacaatgccaaaagccccaaaaa

SEQ ID NO: 109027 - DNA, 753 bp, Zea mays
  Clone ID: MRT4577_30929C.1
ttgggtacctcgaggccgggtcggaagccaccccatatggcgctgctcgccgccgcggcacgccgccaccaccgcctgctcctccgcacccgctttctcgccaccacttcctccacataccctctccctcccgaccccgtcccagaccccgaccccgaccccatcacccccgcgccgtcccccgtccgcactcccccggacgagcagttcgcggcgtgggtgacgcggctgcgcccgggctttaccgcgtccgatctcgccgcggctatcaccgccgaggaggacccggacctcgcgctcgcgctcttccgatgggccgcgctgcgcccggggttccggcacgcgcccgaatcctacctcgccgcgctcaccgcggcctcgtctggccgccgccccgccgcggccgaggccctcgtccacgacgtcttcgcgggggcctgcgcgcctgacctcaggctcttcaacgcctgcctccgcttctgctgcgcgcgccgcagcctgttccagctcgccttcgacatgttcaacaagatgcgcgccatgcccgccgccgcagggtgccgcccggacgtcgagacctacacgctcctcctcaccgccgtcgtccgccgcgtgcgccgcccgccggcgtcgatggtttacctccacgccgtccggtccctctaccgccagatgaaggcctctggcgtggttccggacaccttcctgctcaacctcatcatcaaggcctacgcgcggtgggtggaggcaaag

SEQ ID NO: 109028 - DNA, 206 bp, Zea mays
  unsure (1)..(206): unsure at all n locations
  Clone ID: MRT4577_3092C.1
gggggnnnnccgatgggtacctcgagccggccgggccgggatcttgctcctaactggccgccagacatctgtacctccgcagcggcccctgaagttagcgagagcgggactagtgctactcacagttacgaaagccgccactggcacccgagagggaagtaaagctcagcacttcgaggcgttctgcggatgctgaacagcaccgc

SEQ ID NO: 109029 - DNA, 131 bp, Zea mays
  Clone ID: MRT4577_30930C.1
ttctctcgtacgcccacccgtccgtatactggggggaatttttaaacacctacgcggtctgtattggaaccctccaaactatctctctacaggaacactcatgaattctcactcgtgaatgagtaacggca

SEQ ID NO: 109030 - DNA, 342 bp, Zea mays
  Clone ID: MRT4577_30931C.1
cattcgtcaagaacaaggacaaagtttagccagacactacactagtttaccttaattaaaagctgaaacctcaacagaaaacatgaattgacacaggtaccgtgtgttctttacatggtcaccctgatccacaaagttgtactacaagagtccctgcacgactgatagcatttacgtgcatgattacacatcaggcagggcggtccagcattattccagctacaaaatcccaagcaccatgtcggtagcagtgacttgatcaagccagtgtgatcgaagtaagaatattgctgggtgtctgagtggtcataaagaaaccctttcttttcttttctttctttt

SEQ ID NO: 109031 - DNA, 820 bp, Zea mays
  unsure (1)..(820): unsure at all n locations
  Clone ID: MRT4577_30932C.1
ctcgaggccggccggacttgttgtttgagcagtctcccacacagccatggcgtttgaagcgcttgttggttctggaacactctcttgagtgttgcattcctgtcggttgccatttttgccactgcatttctgtacgccgtccggagaccatcacttcccaaaaacgcgcctccactggccaccgaagcatggccaatcatcggatctatgcagtttttcacccaaagatgggacttcttccaaaggcagatggcacactcgcctacgggtaatttcagcttctacgcgggtgacaaaccagtcattggcatgtcaggcgacgagcctcgacgcatcttcttcgactctaagcaactgggtttcgtggaaggatatggagctctgcttggcggaagtccaacagtcaacaaacagcagaacaaccctctttcggagcctgagagctcgtccgatggctttggcaactacttttccaagcgtttgattgctatgttgaaaggtccagtattggctcaaggtcttccgcaacttctcgaagacgtacgtgctagcattaaagatcttgccgcaaaagaaacgaagacgatagacccattcgacaacatctaccggcttgtattccagcttaccatgcgcaccgtggcttgtgtcgaaattgctagcgatcatgaaatgctcaggaaggtgctgggtcttttcgaaacgattgagagtacggcaacacccctctccatcatgtacagctggatgccttggncatctaagttccgtcgcacatattctggcgcgaaactgtacatgatctttcaagatatcatcg

SEQ ID NO: 109032 - DNA, 411 bp, Zea mays
  Clone ID: MRT4577_30933C.1
cacgccgatcacaattttccttgcactaggtacttgctcataattactagttcatcagcaaacaacaaacaatgtgcaccgaggctagcagtgcctcctagctctggccatggcagacatcgtcgtggcgccgtgcacggcccagaactcgccgcacgactacgtggacccgcacaacgcggcgcgcgccgacgtgcgcgccccgccggtgtcctgggacgacaccgtgcaccgcgtacccccatagctacgcggcgcaaagccagggcgactgcaaattgatccactacggcgggccctacggggacaacctcttctggggctccgacggcgccgactggcccacgtccgacgccacgcactcctgtctgtccaagaatcatcaccaccaccacgacaccaacagctgcg

SEQ ID NO: 109033 - DNA, 292 bp, Zea mays
  Clone ID: MRT4577_30934C.1
ggaaataacaagattaggaagcttgtagagaggcaaattatcggattagatgctacctacaagcctgaaaagctgaccttatctggcttattttctgatgagaagaggaaagagctatctgcaagggcgagagaagctataaagcacaaatctgagcacagatgtacctagtagaactcacatcgaatgatactgtttatcagattgtaattactgatacttccgagctccaccctcagggaaaggtgattgattggatgcctgaagatgtccaaggcattggatttttttc

SEQ ID NO: 109034 - DNA, 176 bp, Zea mays
  Clone ID: MRT4577_30935C.1
cctatctactttgggtgcaaacaaaaagagcaacaaaattatgtaatgaaaagtagcactgattattgttacatgacgaaggtggagcattcctgggggctagattatagacagaccccctgattttacacaacgaatcgcaagaagcgcttgctttgtatatacttaaacagaaa

SEQ ID NO: 109035 - DNA, 376 bp, Zea mays
  Clone ID: MRT4577_30936C.1
gcaaaacaagaagcaaccgtaagcagaaaagagcatgcccagatcatgacaggaagcggatcccactgaggaggaacggaagctggtgctgcacatgtacgagctgggtcgactgcttacacaatgcaccttagcaagggtttactaaccgagggacctgagggcctgtgcccgcacatgccacagttgcatcgtacacatcaaagtgatcgacaaggcgcgtctgcggtgtacggaagggatggtggagcacatgtgaccagtgatcatgcatcatggccacggtgctgaaccataacgaggtgggcattcagaaggtgctcgtcagtcgctgccgactattcttggtcatggactacacgcgcagcggggagct

SEQ ID NO: 109036 - DNA, 308 bp, Zea mays
  Clone ID: MRT4577_30937C.1
cacaaagctccttcaggcttccggcggcggtccggggcccctgccccggcggggggttcggccggacggcgtccggggcagaccagactctgcaagtggggagaccacccccgcaagccactccctagcgagccctgaagttgtgtccacgaagagggagctgaaacaaatgcggggctatgaagtgttttaaaaatccattcttcgcagtgtggccaccacaccgccctgagccctcccacggcccatcgtcccgggtgggccgggatgatgccccagtgcggccggtgctcatctccgcccccggg

SEQ ID NO: 109037 - DNA, 6024 bp, Zea mays
  Clone ID: MRT4577_30938C.1
atggctagtaacaacaatgtgcacattgggaagccaccgcactttgatggaaacaattatgattattggaaaataacaatgtcaatgcatcttcgagcaatggttgtaaaagtttggccaattattagggttggatttcttctgttgaaggaagatcaaccctccattagtgataatgttaatattcacacatcgaatcttggtatgaatgtcttttattatgctcttgatataaattagtgcaattgtatcctaaatctcacaaccgctccttatatttgggtaaaattattggaaattcatgaaggaacttcatttttgcagattgccaaactatatgtgtgaaaaggggggtttgagcattttattatgaaagaagaggagagtgtatccgatatgttcaatcggttgtatgagatagtaaaagaactcaaaggacttggtttttatgtaccggatgtggatttctcgggcaaattccttagatcctttccggagaaatatgagactattgtgacaatgctagtaaggagtgatctatctacaacttctccaaccgaagtattgggagaaattctcactcaagatatatttaagaagtcacaagccgatgctttaagtttggcaaagaaggtgaaaaatgaatctattgctctcaaagccaaggcctcaaaggcaattgaaaaagaagatagcaatgatgaagaaaatgaaagtgagagtgatggtgacatggctttatttgtaaggaaattcaataaattcatgaagatgaaaagaggtcaacctagaagaggtcaaacatctagaagaaatgctttcaatgatagaaaatgttttgagtgtggggaacccggtcacattgccatgaattgcccaagcaagaagaagaagggcaaagatgaaagtgacaagaagaaaaagaaatactataacaagaagaaagatggcaaagcctacttagttgaatgggactcggatgatagctcggatgatgatgatgatgacacctcatccaagcttaatgccggaattgccatcaaggaagctccctcactcttctcatcccccccttggcccctggccaaggggggtgcctaggtaaaaatcatcaccgatttaaatgatataaaagatgatgatgatatcgatgatgttgatgatgatggctattcatatgatgatcttgttagaatgttaggtgaggccgatgactacatgcacaaagaaaaagaaaaatttaagaccttgaaggaattgtataaaaacctccaagtgtcttttgaggagctcaagacctctcacaatgacctcaaagaaaattgtgagaagcttgcggatgctcaaaaatcatctattgtgcatgaagttgaggtggtcactaaggatgttggagtcacttgtgacttacttgatagtcttacaagtgaaccactacctactaactctatttgtgataaatgcaaaatttctctcaatgataacattgctcttgatgaatcaaaaattattgttgagaatgaagtgttagtggatagaataaatactctaactcatgacctagaaaaggcatatggtggtaagactaaattggatttcatattgggaagtcaacgatgctctcttaaccgtgaaggtcttggatatgttcccaagaaaggaaagaatgcttttgtaaagcaaaagacattgtttgtgaaagaatgtgacaaagtgtgtcacaagtgtcacaaaaagggacatgttaagaaaaattgtcccaagttcaaacatgtatcctccacttgttttgagcattgttatgttctttctcataatgcaaaaggtgttcatgctaaatttgttggtacttcaattgttggaaacaaaaagaaagctatttgggtgccaaagaccttggtcactaacatccaaggacccaagcaagtttgggtaaactacaaggcgggagggaatcattgggtgttggatagtggatgtactcaacacatgaccggggatatgaagatgtttacccaaatgagtgaggaagattgctcaaattatgatagtatcacatttggagataatcgtaaaggaaaggttaaaggtttgggtaaaattgctatctcaaatgatcattctatatcaaatgtgctattggttgagtatttgaattttaatttactttccgtagctcaattatgtgatttaggattttgttgcaatttcacggttgaagatgttattatctctagtgttgatggtagcaatcttaaatttaaaggttttagacatgaaaatctttatcttgttgatttctcatctaatgaggcaaagctcacaacttgcctattttcaaaagcttcactaggttggttatggcatagaagacttggtcatgttgggatgaagcaactcaatcggttaaccaagcatgacttagttcgaggcttaaaagatgtgaagtttgaaaagaacaaattgtgtagctcttgtcaagccgacaaatccaatgtgtttgaaacattcaagtcatttgctatattggctcaaaatcaatttgatttcgacatcaaaaaggttagaagtgataatgggtcagaattcaaaaatgcaagaattgatcaatattgtgatgacaagggtatcaaacatgaattctcttccaaatataccccggaacaaaatggtattgttgaaaggaagaatagaactcttattgacatggctaggtctatgttagcggaatatagtatatcggattcttattgggccgaggcaataaataccgcttgtcattcatcaaatagactatattgtcacaagctcttgaagaaaactccatatgaattgctcattggtagaaagccaaatatctcatattttagggtattcggttgcaaatgttatattttgagaaaggggagccgactttctaaatttgagaagaaatgtgatgagggttttcttcttggatattcatcaaatagtaaggcttatagagtcttcaacaaaactcatggtattattgaggaagcatatgatgttgaattcgatgaaacaaatgggtctcaagatgagagtgaaaatctcgatgatgttgggggaactcaattgatagatgcaatgaaaacaatggccattggtgaaataaaaccaaaggaagatgatgatgaaaatagcgtggttgtcattccttcatcctcaactataaatgaggaagatcaccaaggccaacaactcaatgaaaccatggatactcatgatcaaggtacttcaagaccttcggttcctcctaatgcttcaacaagcaattatcaaacggtatcaagaattcatcattccattgtgaaggatcacccggttgatcaaattgtgggtgatattagtaagggtgttcaaactcgctctcgtatagcttcattttgtgaacatttctcttttgtatcttgtatggaacctaaccgtgtagatgaagctctacttgatgttgattgggtgaatgcaatgcatgaagaattaaataacttcgctcgaaatgaagtttgggagcttgttgagagaccaaagaaccacaatgttattggtacaaaatgggtgtttcgcaataagcacaatgaagatggtgtggtagtaagaaacaaggcaagattagttgcacaaggatatactcaaattgaaggattggattttggggagacatttgctcccgtagcaagattagaagcaatccggattctacttgcttatgcttgtgcacacaatatcaagctctaccaaatggatgtaaagagtgccttcctaaatggtaagattagtgaactagtgtatgttgaacaacctcccggttttgaggaccccaaaagacctaaccatgtgttcaagctttctaaagctctctatgggcttaagcaagctccacgcgcttggtatgaaaggcttagggatttcttgctttccaaagacttcaaaattgggaaggttgacactactctattcactaaaagaattggcaaagatttatttgtttgtcaaatctacgttgatgatattatttttggatctactaatgaattattttgtgaggagttcggaaaaataatgtcaaaagaatttgaaatgtctatgataggagaattgagcttctttcttggccttcaaatcaaacaattgaaagatggaatttttataagtcaatcaaaatatttgaaggacatgctcaagaagtttggtttagaaaatgctaagcctatcaagactccaatggcaacaaatggtcatctagacttagatgaaggaggtactatggttgatcaaaaactttatcgttcaataattggtagtttgctttatattaccgcatctaggcccgatgttatgtttagtgtatgcatgtgtgctcgatttcaagcttctcctagagagattcacttgaaggccgctaaaagaattctgagatatttgaagtatactcccaatattggtctatgtggttttggtggtctccgcaagaaacttgcaggtcgctttaaatccaagcgccctcgtggcaatgatgatgactataccccaaccactgattcagaggcccaatcctcagctgggggcactgaatccatggatgctgaagattttcctcatgttcatcccgattatcccattgatatccaaggatggacttatccaaagcggagattttctatggctgagtattgctctagacggactgtgaaccagtacactctgccatctgatacaaatattcagtttttccacactcagctgcagtttgatgtcttttggggcaccctggtggataccaattttcataagcatcaggtgattgattggtccttcttgctaagtcaatctgtcatggagggtctgatccccaagtttgaaacatgtggactatatcagtttatgggacaacgcacagatttcaatgaaatggctgttaagcaattcctggctacctctgagattgatattgaagaagaatctatcacctggatgactggcttcaagcgctattctgcttcttttgctgactttgccgctgccaacagtctggactatggcaccatctctgctgggatggatctttatactgaagataattttgaggattttgtgcagttttatgagctagccaggctcggtatacccaggaggtttggagagacagcaggactcagacatcatcctgctgtcatcaacaagattgccagagtcaccattcttcccaagagtggtgataagagtaaaattcgagataagttctggaacataatccagcacatcatgaatggtgaagtcatgaacatagttcttttcatgatgaggcagcttaatgatttgaaaatggacaagaatcaaaatttggcatatgctccatacattatggctctcatcaaatccaagacaagatttgagggcccttgcgagattgttcacaccccattcaggccttttaagaatgagatagggtttctcaccaggccactcactcccttcccagatgatgaggaagaccctggctatgagggtggagcagctcctaatgttgagggacagcagatgcctcctcctccacctcctcctcagcctcagcactattgggagcctgctccaggatactttgatccttattttcacaatatgcagcaagagctggagactcatattgatactcgctttgatggcctgatgtcacatgtggatcaccgcctcgatgacatgcagtctcgctttgacagtaactgggatgcactcaactctgaattttctgagtttcgtgatcaaattcacactaatgtcactgatcccatcatgtccaggctgaataatatgcaacagagttttcaagataacatgggtgctctctccagtcagtttgataatctttctacaaatgacaacatgcatgatataagtcagaggcagcagcagctccagcaggattttggccagttctcctccctgtttgacaccttcagcactcattactacaacatgcatcctccgccgagtgatcagtga

SEQ ID NO: 109038 - DNA, 4746 bp, Zea mays
  Clone ID: MRT4577_30939C.1
atggttctctcaatggatgctcaatttgatgtgactcaagaatggcttgatagggtgaagatagcaaggaaagggcttcgaggaactaagcgaaggcaactttcagatatcgatgatgttgatgatgatggctattcatatgatgatcttgttagaatgttaggtgaggccgatgactacatgcacaaagaaaaagaaaattttaagaccttgaaggaattgtataaaaacctccaagtgtcttttgaggagctcaagacctctcacaatgacctcaaagaaaattgtgagaagcttgcggatgctcaaaaatcatctattgtgcatgaagttgaggtggtcactaaggatgttggagtcacttgtgacttacttgatagtcttacaagtgaaccactacctactaactctatttgtgataaatgcaaaatttctctcaatgataacattgctcttgatgaatcaaaaattattgttgagaatggagtgttagtagatagaataaatactctaactcatgacctagaaaaggcatatggtggtaagactaaattggatttcatattgggaagtcaacgatgctctcttaaccgtgaaggtcttggatatgttcccaagaaaggaaagaatgcttttgtaaagcaaaagacattgtttgtgaaagaatgtgacaaagtgtgtcacaagtgtcacaaaaagggacacgttaagaaaaattgtcccaagttcaaaaatgtatcctccacttgttttgagcattgttatgttctttctcataatgcaaaaggtgttcatactaaatttgttggtacttcaattgttggaaacaaaaagaaagctatttgggtaccaaagaccttggtcactaacatccaaggacccaagcaagtttgggtaaactacaaggcgggagggaatcattgggtgttggatagtggatgtactcaacacatgaccggggatatgaaaatgtttacccaaatgagtgaggaagattgctcaaattatgatagtatcacatttggagataatcgtaaaggaaaggttaaaggtttgggtaaaattgctatctcaaatgatcattctatatcaaatgtgctattggttgagtctttgaattttaatttactttccgtagctcaattatgtgatttaggattttgttgcaatttcacggttgaagatgttattatctctagtgttgatggtagcaatcttaagtttaaaggttttagacatgaaaatctttatcttgttgatttctcatctaatgaggcaaagctcacaacttgcctattttcaaaagcttcactaggttggttatggcatagaagacttggtcatgttgggatgaagcaactcaatcggttaaccaagcatgacttagttcgaggcttaaaagatgtgaagtttgaaaagaacaaattgtgtagctcttgtcaagccgacaaatccaatgtgtttgaaacattcaagtcatttgctatattggctcaaaatcaatttgatttcgacatcaaaaaggttagaagtgataatgggtcggaattcaaaaatgcaagaattgatcaatattgtgatgacaagggtatcaaacatgaattctcttccaaatataccccggaacaaaacggtattgttgaaagaaagaatagaactcttattgatatggcaaggtctatgttagcggaatatagtatatcggattcttattgggccgaggcaataaataccgcttgtcattcatcaaatagactatattgtcacaagctattgaagaaaactccatatgaattgctcattggtagaaagccaaatatctcatattttagggtattcggttgcaaatgttatattttgagaaaggggagccggctctctaaatttgagaagaaatgtgatgagggttttcttcttggatattcatcaaatagtaaggcttatagagtcttcaacaaaactcatggtattattgaggaagcatatgatgttgaattcgatgaaacaagtgggtctcaagatgagagtgataatctcgatgatgttgggggaactcaattgataaatgcaatgaaaacaatgtccattggtgaaataaaaccaaaggaagatgatgatgaaaatagtgtggttgccattccttcatccacaactataaatgaggaagatcaccaaagccaacaactcaatgaaaccatggatactcatgatcaaggtacttcaagaccttcggttcctcctaatgcttcaacaagcaattatcaaacggtatcaagaattcatcattctattgtgaaggatcacccggttgatcaaattgtgggtgatattagtaagggtgttcaaactcgctctcgcatagcttcgttttgtgaacatttctcttttgtatcttgtatggaacctaaccgtgtagatgaagctctacttgatgttgattgggtgaatgcaatgcatgaagaattaaataacttcgctcgaaatgaagtttgggagcttgttgagagaccaaagaaccacaatgttattggtacaaaatgggtgtttcgcaacaagcacaatgaatatggtgtggtagtaagaaacaaggcaagattagttgcacaaggatatactcaaattgaaggattggattttggggagacattcgctcccgtagcaagattagaagcaatccggattctacttgcttatgcttgtgcacataatatcaagctctaccaaatggatgtaaagagtgccttcctaaatggtaagattagtgaactagtgtatgttgaacaacctcccggttttgaggaccccaaaagacctaaccatgtgttcaagctttctaaagctctctatgggcttaagcaagctccacgcgcttggtatgaaaggcttagggatttcttgctttccaaagacttcaaaattgggaaggttgacactaccctattcactaaaagaattggcaaagacttatttgtttgtcaaatctacgttgatgatattatttttgaatctactaatgaattattttgtgaggagttcggaagaatgatgtcaaaagaatttgaaatgtctatgataggagaattgagcttctttcttggccttcaaatcaaacaattgaaagatggaatttttataagtcaatcaaaatatttgaaggacatgcttaagaagtttggtttagaaaatgctaagcctatcaagactccaatggcaacaaatggtcatctagacttagatgaaggagcttcacctagagagattcacttgaaggccgctaaaagaattctaagatatttgaagtatactcccaatattggtctatgtggttttggtggtctccgcaagaaacttgcaggtcgctttaaatccaagcgccctcgtggaaatgatgatgactatacaccaaccactgattcagaggcccaatcctcagctgggggcactgaatccatggatgctgaagattttcctcatgttcatcccgattatcccattgatacccaaggatggacatatccaaagcggagattttctatggctgagtactgctctagacggactgtgaaccatcaatcagtcatggagggtctcatccctaagtttgaaacatgtggattatatcagtttatggggcaacgcaccgatttcaatgaaatggctgttaagcaattcctggctacctcggagattgatattgaagaagaatctatcacctggatgactggcttcaagcgctattctgcttcttttgctgactttgccgctgccaacagtctggactatggcaccatttctgctgggctggatctttatactgaagataattttgaggattttgtgcaattttatgagccagccaggctcggaatacccaggaggtttggagagacagcaggactcagacatcatcctgctgtaatcaacaagattgccagagtcaccattcttcccaagagtggtgataagagtaaaatacgagataagttctggaacatcatccagcacatcatgaatggtgaagtcatgaatattgttcttttcatgatgaggcagcttaatgatttgaaaatggacaagaatcaaaatctagcatatgctccttacattatggctctcgtcaaatccaagacaagatttgagggcccatgcgagattgttcacacaccattcaggccttttaagaatgagatagggtttctcaccaggccactcactcccttcccagatgatgaggaagaccctggctatgagggtggagcagctcctaatgttgagggcgcacagatgcctcctcctcctcctcctcctcagcctcagcagtattgggagcctgctctaggatactttgatccttattttcacaatatgcagcaggggcttgagactcatattgatactcgttttgagggcttgatgacacatgtggatcaccgcctcgatgacatgcagtctcgctttgacagtaactgggatgcgctcaactcggagttttctgagtttcgtgatcaaattcacactaatgtcactgatcccatcatgtccaggttgaataatatgcaacagagttttcaagataacatgggtgctctctccagtcaatttgacaatctttctacaaatgacaacatgcatgatataagtcagcggcagcagcagctccagcaggattttggccagttctcctccctgtttgacaccttcagcactcactactacaacatgcatcctccgcctagtgatcagtga

SEQ ID NO: 109039 - DNA, 1191 bp, Zea mays
  Clone ID: MRT4577_3093C.1
acaaacaaattggtttatggtttccacaaaaatattcaggggaaatacatcaagatggtacaaaatgtcattatggacctaatgggtacaatgatatagcaaaaaatataacttatgtctcaaatccctgaaaatcatcaactgcttaaaaaaacagcaaaattgtctatggtgtaatcagtgcaacaaaatccacacggaatgctcaatgagcgaaggcaggatgatatccagtggctccatcttactgcctctgatgatgcaagaaagcaatctcccgtgctaaattgaggatttgaggtgacagaaaatcaatgtgctctaggaatatttgctattggttgggaattaaactgggtcacatggttggcatgtcaagcactttaaggacgtccccgaactcaaaatcatgagtctctttgttgaagcgctccacgagtctgtatctcacatcattcaggtagaacgagtgagcagtctctagaagagtctttgcctctgaatcggttagtttgctggtaaaaacaacatctcctcgaataagcacagtgtccttggtctcagcaaactctgtgtaatgagtgactgtgtagtaaggacttgcttgtgtgcctcgtgctttatagtcttcaagtcctgtaaataccatgtatggcatctggacttgcatgaacatagtagtgtatccacttcccttccacaacggaataacaaagtgacggcatgaagctgatctttgttccaagagatggtaaagttttgctttcatagatgcacctatatgaccccttcctaaatgatagtcatcccatgcggcgacgaggtggtcgggggagaggcccttggcgcgttcgatgtcgaggatggatcccagcggcttcggcttcagcggggtgaacccgctcgcgaactgggagtaacccctccgcggcggccacctggtgagttcgaccggcgccgcggttcgcaccggaggctgcagcgacggtcgggtggtccaaccgccatgggatactgccaggccgcggagggaggaggaggtggtggagagggaggcggaggcggcggtgtaggaggagcgcagaagtcgtagcgaaatccgctgcatcgccggagcacggaggtcgtagcggtgaaaaggattttgggctgggccggccctgtgacttgagaaaagcaagcgagtaggag

SEQ ID NO: 109040 - DNA, 243 bp, Zea mays
  unsure (1)..(243): unsure at all n locations
  Clone ID: MRT4577_30940C.1
gcggcccacacccacgcaaccctctaggaccagctcgcacacttgacgccgaaaccacaccgggtactatacaaattttttcggctccgtacactcnatccaatgaaatagggacctccacacataatacaatcaacccaacaacgcctgcaatgacaacaacagataatcgtactgcataaaacacaccaaccagcaccgcaaaatgtacatgggcttcttctgataccaagcattgattaa

SEQ ID NO: 109041 - DNA, 660 bp, Zea mays
  unsure (1)..(660): unsure at all n locations
  Clone ID: MRT4577_30941C.1
ccgggctnnctggcttgggttggcaatgnagcgaggggcgcgcggnaacaacgcgccagttnnncttcggcgccgtcgaccaaagcggcagcgggagccagcaccgcgacctaccgggnaccggcggcggcggcggcatcggncgtggcgcccgggccagtctcgtcaaccacggggatcnnctggacgagaacgnntcctggcgcnntggtgttccggtaccctcaactgtgcgaccccaaggggcgctgtgcaccgtnngtcctgcgtcagcaggcggctttgcgggccgtcgcgngagcgcgtgcctgtggacgggaggcctctgcgtctcgcgggccgcccgcggatggggtggcctcgctggcgggcggncggcgccgcccccggggcgccgtcgtgggcgngctggccggcgctggccaagctgcnntcctcttctgctgcgggcggncggcggcgggccgtgcggggnccacttcacgnggcgtgtccctgcttattccaagacgtcactagccggagcttccttgtcgcgccggttgccgggtgcgaccctgctctaccgtgtcggaccccttgcgagcacgccgttccacggcgtcctactacgacgtgggtcgcctaccgtggcgtgttnccggggattcacgcgctccc

SEQ ID NO: 109042 - DNA, 315 bp, Zea mays
  Clone ID: MRT4577_30942C.1
ccgagtagcacctccaagtcctgagttcgattcccctcgggagcgaattttcaggcttggttaaaaaattcccctcgttatgctccatccgctctcgggttacaatgtcatgtgcgccacccttcggttgggccgttccagagtggacagttgacgccggcccgttagtgatgggggccagggttcagggatttctcgtccgggaccattgtttcggtaatatcgggagggcgggctttccctacggccgagtttttcatttacgttacatttcgtaaaccaaacgacgccttagttttataataataaattgtc

SEQ ID NO: 109043 - DNA, 4534 bp, Zea mays
  Clone ID: MRT4577_30943C.1
atgaagatgaagaggggtcaacctagaagaggccatacatcaagaagacatgctttcaatgatagaaaatgttttgagtgtggggaacccggtcacatcgccatgaattgccctaacaagaataagaatggcacagatggagatgataagaagaagaataaattctacaacaggaagaaagatggcagagcctacctagttgaatgggatttggataatagctcggatgatgatgatgatgacacctcatccaaacttaatgccggaatggccatcaatgaagccccttcacttttctcatcccctcattgtctcatggcaaagggagatgctaagaatgttgggtgaggccgatgactacatgcacaaagaaaaagaaaaatttaagaccttgaaggaattgtataaaaacctccaagtgtcttttgaggagctcaagacctctcacaatgacctaaaagaaaattgtgagaagcttgtggatgctcaaaaatcgtctattgtgcatgaagttatggtggtcactaaggatgttggagtcacttgtgacttacttgatagtcttacaagtgaaccactacctactaactctatttgtgataaatgcaaaatttctctcaatgataatattgctcttgatgaatcaaaaattgttgttgagaataaagtgttagtagatagagtaaatactctaactcatgacctagaaaaggcatatggtggaaaggctaaattggatttcatattgggaagtcaacggtgctcacttaaccgtgaaggtcttggatatgttcccaagaaaggaaataatgcttttataaagcaaaatacattgtttgtgaaagaatgtgacaaagtgtgtcacaagtgtcacaagaagggacatgttaagaaaaattgtcctaagctcaaaaatgtatcctccacttgttttgagcattgttatgttctttctcataatgcaaaaggtgttcatgctaaatttattggtacttcaattgttggaaacaaaaagaaagctatttgggtgccaaagaccttggtcactaacatccaaggacccaagcaagtttgggtgaactacaaggcgggagggaatcattgggtgttagatagtggatgcactcaacacatgaccagagatatgaaaatgttcacccaaatgagtgaggaagattgctcaaattatgatagtatcacgtttggagataatcgcaaaggaaaggttaaaggtttgggtaaaattgctatttcaaatgatcattccatatcaaatgtgctcttggttgagtctttaaattttaatttactttccgtagctcaattatgtgatttgggatttaattgcaatttcacggttgaagatgttattatctctagtgttgatggtagcaatcttaagtttaaaggttttagacatgaaaatctttatcttgttgatttctcatctaatgaggcaaagctcacaacttgcttattctcgaaagcttcactagacaaatctaatgtgtttgaaacattcaagtcatttgctatattggctcaaaatcaatttgatttcgacataaaaaatgttagaagtgataatgggtcggaattcaaaatgcaagaattgatgaatattgtgatgacaagggtattaaacatgaattctcttccaaatataccccagaacaaaatggtattgttgaaagaaagaatagaactctcattgatggctaggtctatgttagcggaatataatatatcggattcttattgggccgaggcaataaatactgcttgtcattcatcaaatagactatattatcacaagcttttgaagaaaactccatatgaattgctcattggtagaaagccaaatatctcatattttagggtattcggttgcaaatgttatattttgagaaagggaagccggctttctaaatttgagaagaaatgtgatgagggttttcttcttgaatattcatcaaatagtaaagcttatagagtcttcaacaaaactcatggtattattgaagaagcatatgatgttgaattcgataaaacaaatgggtctcaagatgagagtgataatcttgatgatgttggtggaactcaattgataaatgcaatgaaaacaatggccattggtgaaataaagccaaaggaagatgatgatgaaaatagtgtggttgtcattccttcatcttcaactctaaatgaggaagatcaccaaagccaacaacatgatgaaactatggatactcatgatcaaggtacttcaagacattcggttcctcctaatgcttcaactagcaattatcaaaccgtatcaagaattcatcattctattgtgaaggatcgcccggttgatcaaattgttggtgatattagtaagggtgttcaaactcgctctcgcatagcttcattttgtgaacatttctcttttgtatcttgtatggaacctaaccgtgtagatgaagctctacttgatgttgattgggtgaatgcaatgcatgaagaattaactaacttcgctcgaaatgaagtttgggagcttgttgagagaccaaagaaccacaatgttattggtacgaaatgggtgtttcacaacaagcacaatgaagatggtgtggtagtaagaaacaaggcaagattagttgcacaaggatatactcaaattgagggattggattttggggagacatttgctcccgtggcaagattagaagcaatccggattcttcttgcttatgcttctgcacataatatcaagctctaccaaatggatgtaaagagtgcttttctaaatggtaagattagtgaactagtgtatgttgaacaacctcccggttttgaggaccccaaaagacctaaccatgtgttcaagctttctaaagctctctatgggcttaagcaagctccacgcgcttggtatgaaaggcttagggatttcttgctttccaaagacttcaaaattgggaaggttgacactactctattcactaaaagaattgggaaacacttatttgtttgtcaaatctatgttgatgatattatttttggatctactaatgaattattttgtgaggaattcggaaaaatgatgtcaaaagaatttgaaatgtctatgataggagaatttagcttcttccttggccttcaaatcaaacaattgaaagatggaatttttataagtcaatcaaaatatttgaaggacatgctcaagaagtttggtttagaaaatgcaaagcctaccaagactccaatggaaacaaatggtcatctagacttagatgaaggaggtcgctttaaatcaaagcgccctcatggagatgatgctgattatacaccaaccactgattcagaggcccaatcctcagctgggggcactgaatctatggatactgaagactttcctcatatccatcccgactatcccattgacaccacaggatggacatatccaaagcggaggttttctatggctgagtactactcaaggcggactgtgaaccaatacactctgccatctgacaccaatgttcaatttttccacactcagctgcagtttgatgttttttggggcaccttggtggatacaaattttcataaacatcaagtgattgattggtctttcatgctaggacaatcagtcatggaggatctgatccctaagtttgagacgtgtggactgtatcagtttatgtggcaacgaacagacttcagtgaaatggctgtcaagcaattcctggccacctcagagattgatatagaagaagaatccatcacttggatgactggattcaagcgatattctgcatcttttgctgactttgccactgccaacagtctggattatggcaccatttcagctgagctggatctctatactgaggataattttgaggattttgtgcaattctatgagccagcaaggctaggaatacccaggaggtttggagagacagcaggactcaggcatcatcctgctgtaatcaataagattgtcagagtcactattcttcccaagagtggtgttaagagcaaaataagagacaaattctggaacattatccagcacatcatgaatggtgaggtcatgaatattgttcttttcatgatgagacagctcaatgatttgaaaatggataagattcagaatttagcatatgctccttatattatggctctcatcaaagccaagacaagatttgaggggccctgtgagattgttcacacaccgtttagaccctttaagaatgagatagggtttctcaccaggccactcactcccttcccagatgatgaggaagaccctggctataatgcaggagcagctcctgatgttgaggccgagcagatgcctcctcctccacctcctcctcagcctcagcagtattggcagcctggtccaggctactttgatccctattttcacaatatgcagcaggggcttcagacccatattgatactcgctttgagggcatgatgacacatgtggatcaccgcctcgatgacatgcaatctcgctttgacagtaactag

SEQ ID NO: 109044 - DNA, 2646 bp, Zea mays
  Clone ID: MRT4577_30944C.1
atggcaacctacttccatgtagctttgtctaggccagcccggacttggctcatgaaccaagccccaggatccatctgctcctgggaagagctttgtgcacgggcggaggcaagaagaaaaaagagaaacaagaactgcggccacgaaaggctgcagttcgctgtttcggttgttgctgccgctgccgggagccaaggcgagcgcagcaagcgcccacggccccagggaagcagtggtggcacatgcccagtgcaccccaacagccgccaccgtgccgccgactaccgtgagattatcaaactcgcaaggcgcgtcagcgagcggcgcgagcagtcctccaaggacgactcgccgtcccaccgccggccaggtcagaagggagctgacagaaaggccgcggctgcggagggacgagacctcggctaccagtcgcctgagggggacctaaaggacgttttcaccagagattctgactccagcgacgatggtgaccgtcgcaagaagctgtatgtaatgtacgacagaagctgggagctcatctcccgcaggagtgtcaagtccctgcggtgggaggttctttcaacggtcccaggggtccccaagaccgctccacaccaacggtggaggggcaccaccatctccttcggggcatccgactgccccaacaacatggcgggggccggcgtgctgccgctcatcaccgcccctattgtcgccaacatcataacgctcccggttacatttgggacggaagaaaacttccgcacggaaaacgtccagttcgacgtcacggaggtcaacctcccttttaacgccatcattggaaggccggtcttgtaccggttcatggccattgcccatcacgggtacttggtcctcaagatgtcgtcccccgttgggatcctcaccgtgcggggcgaccgcaccgccgcactagcagccgtcgagaagctacacactctggcggccaagatcgctcggccggacgatggaggaagaggcccatcggtccctagtgccagggcaccctccaaggcgccgaaagtacagccgtccggggcagacggtggacccgcgaagaccgtccaggagccgtcgcatatgcctgggatccccagggaggtgattgagcaccagctaaaggtctacccggacgccaagccggttcatcaccccgtgtggctggccaacccagtcatcgtgccaaaggcaaacgggaaacttcggatgtgcattgactacaccagcctgaataaggcatgtcccaaggacccgtatccactgccgcgtatagatcagatcgtggactctacctcggggtgcgacctcttgtccttcttggacgcctactttggtttccatcaaatccggatggctaaggaggacaggaggcataccacttttgtgacagtagatggactatactgttatgttgtaatgccctacggtctgagaaacgccttgccaacatttgttcaggcgatgagtaagaccttcggggacctgatccgagacaaggtggagatctacgtcgatgacatcatggtcaagactagggagggatcgactatagtggaagacccgaccctggttttcagcaagctgcgggcaacccgcaccaagctaaacccagagaaatgcatcttcggtgtctccgcagggaagttgctggggttcctggtttcatactggggcattgaagctaacccagagaaaatcaaggctattgaggtaatgaggcctcccgcccatattaaggacatccagaagcttacggggtcactagcagcccttagccgcttcatttcgaggttggctgagagggcgctgccctttttcaagctcctgtggaaatcaagcccgtttgcctggattgaagaggtggaacaagccttcagagaattgaagcagcacctagcttccctgccaatcctggttgctccggagccaggggaaccactatacttgtacattgcggcagctgcagaagcaataagcatggtgttagtcgccgaaagggcggcacaagaagggcagaaacctggaaacttaggaccagctacagagacccggactgtccagaagccggtctactacgtcagcgaggtcctccatgaagcaaaggctaggtacctcgagacgcacaagctcctctacgctgtgttggtcgcatccaggaagctgcgtcactatttccaagcacacaaggttgtggtggtgacctcttttccgttaagagccatcctctacaacccaaacgccactggcaacatcgccaagtgggcggcagagctcgccgagttccagctggacttcgaaacccgccacgccatcaaaagtcaggtcctggccggcttcatcgtagagtggactccacccccgtgtgcccctgggggcccggaccctgctccggaccccacacctgcggagcgcaggggtccgatcttcaccgagccccactggacgcttttcttcgacggatccgcccgccaacagagtgctggcgcgggagtggtcctcactgacccaggcggagaccagctgcggtatgtggtgtgtcttgagttcaaggccaccaacaacatggcggagtatgaggcgctgatctttggcctatccgcggccctatccctgggggtcctctag

SEQ ID NO: 109045 - DNA, 886 bp, Zea mays
  Clone ID: MRT4577_30945C.1
ttacatgggtgctctctccagtcagtttgataatctttctacaactgacaacatgcatgatatcagtcagaggcagcagcagctccagcaggactttgaccagttctcctccctgtttgacaccttccgcactcattattaccacatgcatcctccgccgagtgatcagtaaggcctctcctttgtggcaattgatgccaaagggggagagaagtgatgagaagttgtcaggcgtctccttcagggggagttggtggttctatgtggacactaagaccatgcatatgcattttatcttttttgtgccgttttagtttatgtcttatgcatttggaacttggttcgatctattaactctatgtcgtatgtctgtggattattatctgtaatattctgtgggatgaactatgttttagttcaaattactctgtgtgtggttaatcgagatgtgattataattgctgcgctcactctacgaatcatcgcttgtatgtctcgataaccatgtttgtaggaaagtctccatcaagctctaatatattatgtgtgttatatcttcaacttcaaataatcctgcacacacttagggggagcccttcttgcatactgagtttctattgggatttatctatcttttggacagaacttcaattcaagataagtcctatgaaactcatctccaaaatctattttataccttaggtatgagagagatttggagaaactaaacttctctttaatatactatgtgggtgttgtcatcaattaccaaaaagggggagattgtgaatcatctaggcccctctagtaatgttttggtaattaatgacaactacttgtggactaacgattcttggagaaataagatgcagggttgggccacata

SEQ ID NO: 109046 - DNA, 2874 bp, Zea mays
  Clone ID: MRT4577_30946C.1
atggcaacctacttccatgtagctttgtctaggccagcccggacttggctcatgaaccaagccccaggatccatctgctcctgggaagagctttgtgcacggttcgtggcaaacttcgcttgcgcttaccagcggcacggtgtggaggcacacctccatgcagtaagacaagaacccggggagaccctccgagtgttcatttcctgcttcaccaagctgacaaatgcgccagagccaccgagggccgtgcatgacactcggtaccacaggccaaggttaccaagatgggcaactcggatttcgttacccagggcggaggcaagaagaaaaaagagaaacaagaactgcggccacgaaaggctgcagttcgctgtttcggttgttgctgccgctgccgggagccaaggcgagcgcagcaagcgcccacggccccagggaagcagtggtggcacatgcccagtgcaccccaacagccgccaccgtgccgccgactaccgtgagattatcaaactcgcaaggcgcgtcagcgagcggcgcgagcagtcctccaaggacgactcgccgtcccaccgccggccaggtcagaagggagctgacagaaaggccgcggctgcggagggacgagacctcggctaccagtcgcctgagggggacctaaaggacgttttcaccagagattctgactccagcgacgatggtgaccgtcgcaagaagctgtatgtaatgtacgacagaagctgggagctcatctcccgcaggagtgtcaagtccctgcggtgggaggttctttcaacggtcccaggggtccccaagaccgctccacaccaacggtggaggggcaccaccatctccttcggggcatccgactgccccaacaacatggcgggggccggcgtgctgccgctcatcaccgcccctattgtcgccaacatgtggctacatcacgtgttgatcgatggaggggccgacctcaatgtcatcagccatgcagcgttcagacagctgcagttcgacgtcacggaggtcaacctcccttttaacgccatcattggaaggccggtcttgtaccggttcatggccattgcccatcacgggtacttggtcctcaagatgtcgtcccccgttgggatcctcaccgtgcggggcgaccgcaccgccgcactagcagccgtcgagaagctacacactctggcggccaagatcgctcggccggacgatggaggaagaggcccatcggtccctagtgccagggcaccctccaaggcgccgaaagtacagccgtccggggcagacggtggacccgcgaagaccgtccaggagccgtcgcatatgcctgggatccccagggaggtgattgagcaccagctaaaggtctacccggacgccaagccggttcatcaccccgtgtggctggccaacccagtcatcgtgccaaaggcaaacgggaaacttcggatgtgcattgactacaccagcctgaataaggcatgtcccaaggacccgtatccactgccgcgtatagatcagatcgtggactctacctcggggtgcgacctcttgtccttcttggacgcctactttggtttccatcaaatccggatggctaaggaggacaggaggcataccacttttgtgacagtagatggactatactgttatgttgtaatgccctacggtctgagaaacgccttgccaacatttgttcaggcgatgagtaagaccttcggggacctgatccgagacaaggtggagatctacgtcgatgacatcatggtcaagactagggagggatcgactatagtggaagacccgaccctggttttcagcaagctgcgggcaacccgcaccaagctaaacccagagaaatgcatcttcggtgtctccgcagggaagttgctggggttcctggtttcatactggggcattgaagctaacccagagaaaatcaaggctattgaggtaatgaggcctcccgcccatattaaggacatccagaagcttacggggtcactagcagcccttagccgcttcatttcgaggttggctgagagggcgctgccctttttcaagctcctgtggaaatcaagcccgtttgcctggattgaagaggtggaacaagccttcagagaattgaagcagcacctagcttccctgccaatcctggttgctccggagccaggggaaccactatacttgtacattgcggcagctgcagaagcaataagcatggtgttagtcgccgaaagggcggcacaagaagggcagaaacctggaaacttaggaccagctacagagacccggactgtccagaagccggtctactacgtcagcgaggtcctccatgaagcaaaggctaggtacctcgagacgcacaagctcctctacgctgtgttggtcgcatccaggaagctgcgtcactatttccaagcacacaaggttgtggtggtgacctcttttccgttaagagccatcctctacaacccaaacgccactggcaacatcgccaagtgggcggcagagctcgccgagttccagctggacttcgaaacccgccacgccatcaaaagtcaggtcctggccggcttcatcgtagagtggactccacccccgtgtgcccctgggggcccggaccctgctccggaccccacacctgcggagcgcaggggtccgatcttcaccgagccccactggacgcttttcttcgacggatccgcccgccaacagagtgctggcgcgggagtggtcctcactgacccaggcggagaccagctgcggtatgtggtgtgtcttgagttcaaggccaccaacaacatggcggagtatgaggcgctgatctttggcctatccgcggccctatccctgggggtcctctag

SEQ ID NO: 109047 - DNA, 1043 bp, Zea mays
  Clone ID: MRT4577_30947C.1
aattcggcacgagggatgattatacaccgaccactgattcagaggcccaatcctcagctgggggcactgaatccatggatgctgaagattttcttcatgttcatccagattatcccattgatatccaaggatggacttatcccaagcggcgattttctatggctgagtactgctctagacggactgtgaaccaatatgctctgccatcagataccaatattcagtttttccacactcagctgcagtttgatgtcttttggggcaccctggtggataccaactttcataagcatcaggtgattgattggtccttcttgctcagtcaatcagtcatggagggtcttatccccaaatttgaaacatgtgggttatatcagtcagaggcagcagcagctccagcaggactttggccagttctcctccctgtttgacaccttcagcactcattattacaacatgcatcctccgccgagtgatcagtaaagcctctcctttgtggcaattgatgccaaagggggagagaagtgatgagaagtttatattctttgtatcctttttggagatttatgacatagggggagaaattgtgcattaaagcttacctttagtcttatgtaactaagtgttagaagacttttaaaaaggggagaaataattaacaaaaaaagggaagtcataagaaaaacataagatgaagaaagttgataagtgcattccatgtcatgagcatcacgtttattttatgacacactgcaccctatgaatagtatgatataagttgtctatactttgacctaaatatgtgcttttggcatttgagtacaaaagtgttattttctgaaatgcacatatttagggggaggaaactatatcataggatttaaaatcttatttatcaaatcttatgtaagctttaaatgtgttgtcatcaatcaccaaaaagggggagattgaaagtgcattcatcccttttttgagttttggtgatttggataacaacacatttaaaggtctaacgagtttgctaagtgttgaacaggaaa

SEQ ID NO: 109048 - DNA, 3240 bp, Zea mays
  Clone ID: MRT4577_30948C.1
atgggccgctccttcagtagtacagcggcgcctgttcggcctgctgcgctcgcggcgccgcccctcctcctcttcctcttgctcgggctcctgggagctgcggctgccaatgtcggggactcctgctccacgagcgcggactgcggcgccggccagtggtgcttcgactgcgagccccagctctccggctcccactgcgtccgctccgccgccaccaaccccttccagctcattaacaactcgttgccgttcaacaagtacgcctacctcacgacgcacaacgcgtacgccatcgtcggggagccctcgcacaccgggatcccgcgcgtcaccttcgacaaccaggaggacacgaacggagtccgggcgctgatgctcgacacgtacgacttcaagggagacgtgtggctgtgccattcgagcggagggaaatgcaacgacttcaccgcgttcgaacctgcactggacactttcaaggagatcgaggcgttccttgcagcaaacccgtccgaaatcgtcacgctgatcctagaggactacgtccacgcgccgaacgggctgacgaacgtgttcaacgcgtctggcctgctcaagtactggttcccggtgtcgaggatgccgccgagcggccaggactggcctctcgtcagcgacatggtcgcgaccaaccagcgcctcctggtgttcacctccgtcagctccaaacagagcgcggaaggcatcgcttaccagtggaacttcatggtcgagaacaactacggtgatgacgggatggatgccgggaaatgctcgaaccgtgccgagtctgctcctctcaacgacaacaccaagtcgctggtcctcatgaactacttcccgtcgctccctgtcaagtttacagcgtgcctgcagcactcccagagccttgttgacatggtgagtacgtgctacggcgccgcggggaaccgatgggctaattttgtcgcggttgattactacaagagaagcgacggaggcggggccttccaggccacggacttgctcaatggtagactgttatgcgggtgccaggacatcagggcatgctcgcaagcattccctaagagcacgtacaacggcattgaatatgttgtccctgagcagccacataagcaacaattaaataaaaaaaatccaacgtggacgctaattaaggagaagagaggcattcggttgtcttttcgtgaggagacaacttcagctcgtgctctaatgtcaagagacgtcaaaaccgtctattcaccccctttagccaatgtcctagatcctacaagtggtattggagccgaggactccattgtttgtggtctaatcatcccggagtggaacaaaatggctagtaacaacaatgtgcatattgggaagccaccacattttgataggaataactacaattattggaaaataagaatgtcaatgcatcttagagcaatgggtggaaaaatttggccaattgtcaaggatagatttgttgtgttgaaagaagatgaaccatccattagtgataatgaaaatattcttacaaatgatcaagccatgaatgtattttatgatgctcttgatataaatgagttcaaccgtatcaagaatctcacaaccgctcatgagatttggattaagctaatggaaattcatgaaggaactacaattgtgaagagtgccaagctatatgtgtgcaaaggaaaatttgagcaattcattatgaaagaagatgaaagtgtatccgatatgttcaaccggttaaatgagatagtgaatgaactcaagggacttggttttaatgtactggatgtggatttcactcataagttccttagatctcttccggagaagtatgagaccattgtgaccatgttagtaagaagtgatctatctacaacttctccaaccgaagtattgggggaaattcttactcaagatatattcaagaaatctcaagccgatgctataagtttggcaaagaaagtgaataatgaatcaattgccctcaaagctaaagcttctaaggcaattgaaaaagaagatagtgatgatgaaaaaaatgaaagtgagagtgatggagatatggctctatttgtaaagaaattcaacaaattcatgaagatgaagagaggtcaatctagaagaagccaaacatcaagaagaaatgctttcaatgatagaaaatgttttgagtgtggggaacccggtcacattgccatgaattgccctaataagaagaagaagggcaaagatgaagatgataagaagaagaagaaattctacaacaagaagaaggatggcaaagcctacctagtagaatgggattcggatgatagctcggatgatgatgatgacgacacctcatccaagcttaatgccggaattgccatcaaggaagctccttcacttttctcatcccctcattgtctcatggcaaatggagatgctaaggtaaaaatcttcaccgatttaaatggtataaatgatgatgatgatgttgatgatgatggctattcatatgatgatcttgttagaatgttaggtgaggtcaatgactacatgcacaaagaaaaagaaaaatttaagactttgaaggaattgtatataaacctccaagtgtcttttgaggagctcaagacctctcacaacgatctaaaagagaattgtgagaagcttgcggaagctcaaaactcatctattgtgcatgaagttgtggtggtcaccgaggatgttggagtcacttgtgacttacttgatagtcctacaagtgaaccactacctactaactctatttgtgataaatgcaaaatttctcttataaatgataatattgctcttgatgaatcacaaatcattattgagaatgaagtgttagtagatagagtaaatgctctaacttatgatctagagaaggcatatggtggaaaggctaaattggatttcatattgggaagtcaacgatgctcacttaaccgtgagggtcttggatatgttcccaagaaaggaaagaatgcttttgtaaagcaaaagacattgtttgtgaaagaatgtgacaaagtgtgtcacaagtgtcacaagaagggacatattaagaaaaattgtcctaagctcaagaatgtatcctccacttgttttgagcattgttatgttctttctcataatgcaaaaggtgttcatgctaaatttgttggtacttcaattgttggcaacaagaagaaagctatttgggtgccaatgtaa

SEQ ID NO: 109049 - DNA, 955 bp, Zea mays
  Clone ID: MRT4577_30949C.1
ttgggtacctcgaggccggccgggacccttcgtcttcgtcgtccctatccctgcctgcccagcgactccaattaagtttgcaccgcgagcatgggaggaggagccaccaacctacctccgggcttccatttcttcccttcagacgaagacctcgtcgtccatttcctccgccgcaaagccgccaacctcccgtgccgccccgacatcgtcccgacgatcctcctgcaccgctacgacccgtgggagctcaacggcacggcgctgcaggctgggaaccagtggtacttcttcagtagccacgcccacgcccacgcccacgccgcggcggggcagaccagaacatctccgtccgggtactggaaccccgccggcgccgatgaaacagtagtactagcgagcagcggccgtgtcgttggcctcaagaagacgctcgtcttctgcaccggagagcctttcagagggttcagaacgaactgggtcatgcatgagtaccaccttcaggacgggccggccgggtgcaatgtcggcgggagcagcggcgccaccaccccaagtagctccagcagctccggcagcagcaggagatcgcagaggaagagagttcactcgagcacggagtcaataaacagctgggtgatatgtagagtgttcgaatcaagctgcggttcgcaagtgagcttccatgacgagggcacagagctttcgtgcttggatgaggtgttcttgtcgctagatgactacgacgaagtgagcttgccaaataattagaaccctagctagcgcgcaggccatttgattagtaccctgtgatggtgacgtcgccgtctgcgtaagcttaagtggttgcaagttgcattgtgcatgatgcagatggcctgatgataggcatcgagcttaagccggtctctatccaaaatcattatatattaccctggtatcgatcgattatcatgca

SEQ ID NO: 109050 - DNA, 196 bp, Zea mays
  Clone ID: MRT4577_3094C.1
taatactggtattattatagtagtactagtacagtagtatcaggcatggcgtgcatcagaactggctgtgatagtagcaacgtgatgctcgtgcctgtaataagaacaagcaggagatgtttgcctgtgctgcttgtgcctgtgatgtaccggtgttgttatcagtgttataagtacttgggtcactggtttgtgc

SEQ ID NO: 109051 - DNA, 108 bp, Zea mays
  Clone ID: MRT4577_30950C.1
ccgacgcggatgccgcaagatgactgcagtcactgtaccagacgtcaaccagcatgagttcgtcagagctctggcagccttcctgaaaaactccgagaatctgaaagt

SEQ ID NO: 109052 - DNA, 405 bp, Zea mays
  Clone ID: MRT4577_30951C.1
aaaaaaagcaaatttaatttccattaagaccggggacaacctttacaggggcgggaatgcaagaaaaacaatcaggttccccagcaacggaaaactctttatccctaagattctaaaaacaagcccaaggggcccaagaggcctttgccccccggaaggggaaccaagagaggcccaggtcctacaagcggggccaaagcaacaaccaccccccctggggggaggggggctcgcctcgttaaggccctttcccccctgatgcggcgcccgagctggatgtccttgggcataaaggggacccccttggcggggatggcccaaaggttagtgtcctcaaagagccccacaagggaggccttgggggcctcctgcaacgccccaacgggggaggactggaagcggaaa

SEQ ID NO: 109053 - DNA, 423 bp, Zea mays
  Clone ID: MRT4577_30952C.1
tcattgcttgcctcatggctagacaggacgggaggggtcatagcgcgtggtccacactttactccagctatccgtcaacataaacggatatcaggagctgagcgatggacacgagcatgaggcaaggagccattcaggagcagctggctgaggcacaagaggcacaacagagggcgaatgcagcgagaggtgctcacccaacatggcgtacgcaaaccaaagaggaggcataaagggaaatagccatacaccgtgcccaaatggaggctgaggaccagaggcaggtcacagtgcgcagtggcgactctggtgcgaacggaaagcgtgtcgaggaagagacaacagagaaaccaggacagctaaaccagcagggtgcatgcatctacccagatgtctataatagctagtgaggcatgtcagcac

SEQ ID NO: 109054 - DNA, 771 bp, Zea mays
  Clone ID: MRT4577_30953C.1
atgactggattcaagcgctattctgcctcttttgctgactttgccactgccaacagtctggattatgacaccatttcagctggactggatctctacactgaggataattttgaggactttgtgcaattctatgagccagcaaggctgggaatacccaggaggtttggcgagacagcaggactcagacatcatcctgctgtgatcaacaagattgccagagtcactattcttcccaagagtggggataagagcaaaatacgggacaaattctggaacattatccaccacatcatgaacggtgaggtaatgaatgttgttcttttcatgatgagacaactcaatgatttgaaaatggacaagaaccaaaatttagcatatgctccttatattatggctctcatcaaagccaagacaagatttgaggggccttgcgagattgttcacacaccgttcagaccttttaagaatgagatagggtttctcaccaggccactcactcccttccccgataatgaggaagaccctggctatgatgcaggagcagctcctgatgttgaggccgagcagatgcctcctcctccacctcctcctcagcctcagcagtattggcagcctggtccaggctactttgatccatattttcacactatgcagcaggggcttgagacctatattgatactcgctttgagggcatgatgacacatatggatcaccgcctagatgacatgcagtctcgctttgttgggatgcgctcaactctgagtttctga

SEQ ID NO: 109055 - DNA, 6030 bp, Zea mays
  Clone ID: MRT4577_30954C.1
atggctagtaacaacaatgtgcacattgggaagccaccgcactttgatggaaacaattatgattattggaaaataagaatgtcaatgcatcttagagcaatgggtggaacaatttggccaattgttagagatggatttgttgtattaaaggaagatgaaccatctgttagtgataatgagaatatcctcacaaatgatcaagccatgaatgtcttttatgatgctcttgatataaatgagttcaatcgtatcaagaatctcacaaccgctcatgagatttgggtaaaactaatggaaattcgtgaaggaactacaattgtgaagagtgccaaactatatgtgtgcaaagggaagtttgagcaatttattatgaaagaagatgagagtgtatccgatatgttcgatcgattgaatgagattgtaaatgaactcaaaggacttggttttaatgtaccggatgtggatttcacacacaagttccttagatcacttccggagaaatatgagactattgtgacaatgctagtaaggagtgatctatctacaacctctccaaccgaagtattgggagaaattctcactcaagatatatttaagaagtcacaagccgatgctttaagtttggcaaagaaggtgaaaaatgaatctattgctctcaaagccaaggcctcaaaggcaattgaaaaggaagatagcaatgatgaagaaaatgaaagtgagagtgatggtgacatggctttatttgtaaggaaattcaataaattcatgaagatgaaaagaggtcaacctagaagaggtcaaacatctagaagaaatgctttcaatgatagaaaatgttttgagtgtggggaacccggtcacattgccatgaattgtccaagcaagaagaagaagggcaaagatgaaagtgacaagaagaaaaagaaatactataacaagaagaaagatggcaaagcctacttagttgaatgggactcggatgatagctcggatgatgatgatgatgacacctcatccaagcttaatgccggaattgccatcaaggaagctccctcactcttctcatccccccattgcctcatggcaaagggagatgctaaggtaaaaatcatcaccgatttaaatgatataaatgatgatgatgatatcgatgatgttgatgatgatggctattcatatgatgatcttgttagaatgttaagtgaggccgatgactacatgcacaaagaaaaagaaaaatttaaggccttgaaggaattgtataaaaacctccaagtgtcttttgaggagctcaagacctctcacaatgacctcaaagaaaattgtgagaagcttgcggatgctcaaaaatcatctattgtgcatgaagttgaggtggtcactaaggatgttggagtcacttgtgacttacttgatagtcttacaagtgaaccactacctactaactctatttgtgataaatgcaaaatttctctcaatgataatattgctcttgatgaatcaaaaattattgttgagaatgaagtgttagtggatagaataaatactctaactcatgacctagaaaaggcatatggtggtaagaagaaattggatttcatattgggaagtcaacgatgctctcttaaccgtgaaggtcttggatatgttcccaagaaaggaaagaatgcttttgtaaagcaaaagacattgtttgtgaaagaatgtgacaaagtgtgtcacaagtgtcacaaaaagggacatgttaagaaaaattgtcccaagttcaaacatgtatcctccacttgttttgagcattgttatgttctttctcataatgcaaaaggtgttcatgctaaatttgttggtacttcaattgttggaaacaaaaagaaagctatttgggtgccaaagaccttggtcactaacatccaaggacccaagcaagtttgggtaaactacaaggcgggagggaatcattgggtgttggatagtggatgtactcaacacatgaccggggatatgaagatgtttacccaaatgagtgaggaagattgctcaaattatgatagtatcacatttggagataatcgtaaaggaaaggttaaagttgaagatgttattatctctagtgttgatggtagcaatcttaaatttaaaggttttagacatgaaaatctttatcttgttgatttctcatctaatgaggcaaagctcacaacttgcttattttcaaaagcttcactaggttggttatggcatagaagacttggtcatgttgggatgaagcaactcaatcggctaaccaagcatgacttagttcgaggcttaaaagatgtgaagtttgaaaagaacaaattgtgtagctcttgtcaagccgacaaatccaatgtgtttgaaacattcaagtcatttgctatattggctcaaaatcaatttgactttgacatcaaaaaggttagaagtgataatgggtcggaattcaaaaatgcaagaattgatcaatattgtgatgacaagggtatcaaacatgaattctcttccaaatataccccggaacaaaacggtattgttgaaagaaagaatagaactcttattgatatggcaaggtctatgttagcggaatataatatatcagattcttattgggccgaggcaataaataccgcttgtcattcatcaaatagactatattgtcacaagctcttgaagaaaactccatatgaattgctcattggtagaaagccaaatatctcatattttagggtattcggttgcaaatgttatattttgagaaagggaagccggctttctaaatttgagaagaaatgtgatgagggttttcttcttggatattcatcaaatagtaaggcttatagagtcttcaacaaaactcatggtattattgaggaagcatatgatgttgaattcgatgaaacgaatgggtctcaagatgagaatgataacctcgatgatgttgggggaactcaattgataaatgcaatgaaaataatggccattggtgaaataaaaccaaaagaagatgatgatgaaaatagtgtggttgtcattccctcatcttcaactataaatgaggaagatcaccaaagccaacaactcaatgaaaccattgatactcatgatcaaggtacttcaagacctccaattcctcctaatgcttcaacaagcaattatcaaacggtatcaagaattcatcattccattgtgaaggatcacccggttgatcaaattgtgggtgatattagtaagggtgttcaaactcgctctcgcatagcttcgttttgtgaacatttctcttttgtatcttgtgtggaacctaaccgtgtagatgaagctctacttaatgttgattgggtgaatgcaatgcatgaagaattaaataacttcgctcgaaatgaagtttgggagcttgttgagagaccaaagaaccacaatgttattggtacaaaatgggtatttcgcaacaagcacaatgaagatggtgtggtagtaagaaacaaggcaagattagttgcacaaggatatactcaaattgaaggattggattttggggagacatttgctcccgtagcaagattagaagcaatccggattctacttgcttatgcttgtgcacacaatatcaagctctaccaaatggatgtaaagagcgccttcctaaatggtaagattagtgaactagtgtatgttgaacaacctcccggttttgaggaccccaaaagacctaaccatgtgttcaagctttctaaagctctctatgggcttaagcaagctcctcgcgcttggtatgaaaggcttagggatttcttgctttccaaagacttcaaaattgggaaggttgacactactctattcactaaaagaattggcaaagatttatttgtttgtcaaatctatgttgatgatattatttttggatctactaatgaattattttgtgaggagttcggaaaaatgatgtcaaaagaatttgaaatgtctatgataggagaattgagcttctttcttggccttcaaatcaaacaattgaaagatggaatttttataagtcaatcaaaatatttgaaggacatgctcaagaagtttggtttagaaaatgctaagcctatcaagactccaatggcaacaaatggtcatctagacttagatgaaggagttgcgtgcggacagtccgacagcttgcagcaacattccctcaacgtgtcttcatcacgtggttttggtggtctccgcaagaaacttgcaggtcgctttaaatccaagcgccctcgtggcaatgatgatgactatacaccgaccactgattcagaggcccaatcctcagctgggggcactgaatccatggatgctgaagattttcttcatgttcaccctgattatcccattgatatccaaggatggacttaccccaagcggagattttctatggctgagtactgctctagacggactgtgaaccagtatgctctgccatcagatacaaatattcagtttttccacactcagctgcagtttgatgtcttttggggcaccctggtggataccaactttcataagcatcaggtgattgattggtccttcttgctcagtcaatcagtcatggagggtctcattcccaaatttgaaacatgtgggttgtatcagtttatggggcagcgcactgatttcaatgaaatggcagttaagcaattcttggctacctccgagattgatattgcagaagaatctatcacatggatgactggcttcaagcggtattctgcttcttttgctgactttgccgctgccaacagtctgaactatggcaccatttctgctggggtggatctttatactgaagataattttgaggattttgtgcagttttatgagcccgccaggctcggtatacccaggaggtttggagaaacagcaggactcagacatcatcctgctgtcatcaacaagattgccagagtcaccattcttcccaagagtggtgataagagcaaaattcgcgataagttctggaacataatccagcacatcatgaatggtgaagtcatgaacattgttcttttcatgatgaggcagcttaatgatttaaagatggacaagaatcaaaacttggcttatgctccctacattatggctctcataaaatccaagacaagatttgagggcccatgtgagattgttcacactccattcaggccttttaagaatgagatagggttcctcaccaggccactcactccattcccagatgatgaggaagaccctggctatgcgggtggagcagctcctaatgttgaggaacagcagatgcctcctcctccacctcctcctcagcctcagcactattgggagcctgctccaggatattttgatccttattttcacaatatgcagcaagggctggagactcatattgatgctcgctttgatggcctgatgtcacatgtggatcaccgccttgatgacatgcagtctcgctttgacagcaactgggatgcgctcaactctgaattttctgactttcgtgatcaaattcacactaatgtcactgatcccatcatgtcaaggctcaataatatgcaacaaagctttcaagataacatgagtgctctctccagtcagtttgacaatctttctacaactgacaacatgcatgatataagtcagaggcagcagcagctccagcaggactttggccagttctcctccctgtttgacaccttcagcactcattattaccacatgcatcctccgccgagtgatcagtaaggcctctcctttgtggcaattgatgccaaagggggagagaagtgatgagaagttgtcaggcgtctccttcagggggagttggttctatgtggacactaagaccatgcatatgcattttattttttttttgtgccgttttagtttatgtcttatgcatttggaacttggttcgatctattaactctatgtcgtatgtctgtggattattatctgtaatattctgtgggatgaactatgttttagttcaaattactctgtgtgtgg

SEQ ID NO: 109056 - DNA, 2644 bp, Zea mays
  Clone ID: MRT4577_30955C.1
ggggggggttactttgaacattcattcatttctatttattttacttatataaacgggaacaaattacaaatgtaccttcggcttgaaggaaaggaagggttcaagcgtggtgccaatgccaagtcagcgtgaacaggacgggagtactggtcatctatttataggcacgggacgcagcccatgtaaaattacattaatgccctttgcttttattaataactctataggaattcttcgagggctaattatgccctttacatttggtagtaattctatagtaatccaccgaggtctgaatagccttttcatctttaagtcggtttccttttctgctaccacgccgaagctttcctgctcacatcttcggcgctatatcaaccttcgtattatttgggcttctcctactgtgatatcgactcgagtccaaagatacctgttcacacattatactccagaaacactgttaaatcttgtttttgaggaccttcggaagccgaaggcccccaacagtgttattatctctagtgttgatgatagcaatattaagtttaaaggttttagatatgaaaatctttaccttgttgatttctcatctagtgaggcaaagctcacaacttgcttattctctaaggcttcactaggttggttatggcatagaagacttggtcgtgttggaatgaagcaactcaatcgtttaaccaaacatgatttagtctgttggttgaaagatgtgaaatttgagaagaacaaattgtgtagctcttgtcaagccgggaagcaagtggcaaatactcatccaaataaaagtcaaatctctactcatcgacctttggaattacttaacattgatttatttgggccaacatcgtttgtgagtattggcggtaattcctattgtcttgtgattgtgaatgattattctagattcacttgggtttactttcttcgggataaatctaatgtgtttgaaacattcaagtcatttgctatattggctcaaaaccaatttgattttgatatcaagaaagttagaagtgataatgggtcagaattaaaaaatgcaagaattgatgaatattgtgatgacaagggtattaaagatgaattctcttccaaatatactccggaacaaaatggtattgttgaaagaaagaataggactctcattgatatggctaggtctatgttagccaaatataatgtgtcggattcttattgggccgaagcaataatcaccgcatgtcactcatcaaataggctatattgtcacaagcttttgaagaaaactccctatgagttgctcattggtagaaagccaaatatatcatattttagggtattcgattgcaaatcctatattttgagaaagggaagccggctctctaaatttgagaagaaatgtgatgagggttttctacttggatattcatcaaataataaggcttatagagttttcaacaagactcatggtattattgaagaagcatatgatgttgagtttgatgaaacaaatgggtctcaagatgaaagcaataatattgatgatgttggtggaactcaattgaaaaatgctatgaaaacaatggccattggtgaaataaagccaaaggaagatgatgatgaaaatagtgtggttgtcattccatcctcttcaaccctaaatgaagaagatcaccaaagccaacaaaatgatgaaactatggatactcatgatcaagatacttcaagtcattcggttcctcctcatgcttcaactagcaattatcaaacggtatcaagaattcatcattctattgtgaaggatcacccggttgatcaaattgtgggtgatattagtaagggtgttcaaactcgctctcgtatagcttcattttgtgaacatttctcttttgtatcatgtatggaacctaactgtgtagatgaagctctacttgatgttgattgggtgaatgcaatgcatgaagaattaaataatttcactcgaaatgaagtttgggagcttgttgagagaccaaagaaccacaatgttattggtacaaaatgggtgtttcgcaacaagcacaatgaagatggattagtagtaaggaacaaggcaagattagttgcacaagggtatactcaaatagaaggattggattttggtgagacatttgctcccgtggcaagattagaagcaattcggatccttcttgcttatgcttgtgcttataatatcaagctctaccaaatggatgtaaagagtgcctttctaaatggtaagattagtgaactagtgtatgttgaacaacctctcggttttgaggaccacaaaagacctaaccacgtgttcaagctttctaaagctctctatgggcttaagcaagccccacgcgcttggtacgaaaggcttagggatttcttgctttccagagactttaaaattgggaaggttgacactaccctattcactaaaagaattggtaaagatttatttgtttgtcaaatttatgttgatgatattatttttggatctactaatgaattgttttgtaaggaatttggaaaaatgatgtcaaaagaatttgaaatgtctatgataggagaattgagcttctttcttggtcttcaaatcaaacaattgaaagatggaatctttataagctaa

SEQ ID NO: 109057 - DNA, 784 bp, Zea mays
  unsure (1)..(784): unsure at all n locations
  Clone ID: MRT4577_30956C.1
ccggccgggatcactctctctctacttgtcaatagattattaatcttaatatttacaaacaactctttaattctttacttaaagcatcaaaaaatacctatatcatactactcaataaaatcatccttactcctcttgttgcaggtggaaaaggctctgattgtccaaactgcgacatccagattattcatatgctgttgctctacaatctgccagaccaattcatcataacaaccttcactcttccaacaaccacttattccctgtactttaaacgacacctccatctcttgcaactacgatgacaactcccactccattacctttgccctcaataccataaacaaaggagatgctcctttacgccacatcttttccacgacaaagcgcgtgcaccgatataatgggcatggatcagcgcatgatgcgataccatacgtcgcatcagcctctctgcacccgctgctaggacaacaagtgttccatctctgaggacaacttcctcaagtacgatgaccgtgacaacttcatcgcctgccctcagaccgatggatcttacaccgtctttaccagcgctggtgtcaacaaccctnctggtaacaaggactgtgtctctgtcacctttgcncgtcagcgaggtcagcaaagcccgtcggctgccttttactcccagcagggccagtaaattctgagctctgagntccaaaagggattctgtctagactgccttctacaccttcctttgtggagaaatctttcgatcttgttataacgattccatgca

SEQ ID NO: 109058 - DNA, 357 bp, Zea mays
  Clone ID: MRT4577_30957C.1
attcctggacaactagtttattttttttaaaaaacgcataggggaactagcgacccgccatcacattagaccaacggtgccaacgacgctcacggcctaaagcgctaatatccgagcccctacagtggtaccggtgcaacaagtcaaatactagggcaccacctctaagccctggcaaggcccccatatgaaaactcgagaagccaccgcagttccacagataatctgcgcctatctagacccccttgtgcagccccctccataattagttgcaggccaagccacttttctcaattgtacaccaggatcatgttggtatctggggccaggccaacgcaagccctcatgaggttctcc

SEQ ID NO: 109059 - DNA, 183 bp, Zea mays
  Clone ID: MRT4577_30958C.1
ctgggttttgtttttttacatattatacattattatttagagcacagagaaaaaagttcgtgagcaaattacagttaaggactcccgcattttcatataacatacccaaggacagagaggaaaactttaacattgaactggacgcaagctcttttgcaatgggggggagcacggaggacacaa

SEQ ID NO: 109060 - DNA, 425 bp, Zea mays
  unsure (1)..(425): unsure at all n locations
  Clone ID: MRT4577_30959C.1
tttttttttttttttttttttttcttttttttttttttttttttttttttttttttttttttttttttttttttttttttttttttttgtttttttttttttttttgggccctttttggaacttaaaaaaaaatccacccaatgggggggcaaaaaccccaaaaaaaaaggtcgggaaaaacaaccggtaaaaaccccaaacaaaaaagcccaaagaaaaaaccccaacaaaaaaaaggaactattggcccactttcttttaggccaaccaggccaaaaaaaggggaaggcatgaaacacccctaaatgggtattggggaagcccgaaaaaaggaaacccccaaaattcggggggggcccggaacccgtgcccgggnggncncccgggnaggtaccccccccgccctgaaataaacgagggggtt

SEQ ID NO: 109061 - DNA, 347 bp, Zea mays
  Clone ID: MRT4577_3095C.1
gtgacaaaagatttaaaaaataatcaaaacttataccacagcccgatcatgaagccacaacgttctagacaactggaaccatctacaatgtacaccgcaccggtgctaaactttgacgactagagaatacaaccctcaacctgcggtgggatgctcaaataacttacaagccgcccaaaatgatatatggccctggcacaacgagcagactgtccttgagagaagactgcttgcacaaccaagacgtctacaactggcctcgacgaacatggtcaaggtgacaaggtattcaagatgctatccaacaagaatgaatgtgtcctacactttggctaaggctgcaaaac

SEQ ID NO: 109062 - DNA, 308 bp, Zea mays
  Clone ID: MRT4577_30960C.1
atattataaaaaatccaatttttttttttaaggggcaactacatatacgggggccaacacattaagacagaaggatttttttcaggttcaaagagcaatcaattatttgtaaaacccaatccactcttaaaaggattggatcggattcttttacaaacaacccaagatttgatggttgatgacccattttttcacaaacggacggtcccacacatttctttggagtagtacaaattatttgccggtcacctaatgatcaatcctcattgatcagtgcttgtgcttcttgggcttttttactatcatta

SEQ ID NO: 109063 - DNA, 544 bp, Zea mays
  Clone ID: MRT4577_30961C.1
aattcggcacgaggactcttctttcagaactgtacactgtgtaaggcctactgtatctttcagaaaattggaagcctcaattcactttcagacactgtaaggcctacctaatcgttgtttttcgtatgcaaaccttgactttgaacaacttgtgtctgtttgaaaacttcttaaatcactgcaccaaacccactttcagtaattgaactggccctttttcctctagaaattaagtataattttgagcacaaatacaattcaaaatataacattaccaccaataaaattataacatatttcttttggtcacaaatgtaaggcatctacgtctgtcctaagtcaaaaaaagttaacttcttgattaacaatatattatatgaaactcaagcttattatattataaaatcaatttttctttgcagatacaccagaacactttttttaacataggaacgcttattttactaagaagacaagcatattataaacctagtttttataattaattctggtaagaaaatatttttgctgtaactctatataa

SEQ ID NO: 109064 - DNA, 343 bp, Zea mays
  Clone ID: MRT4577_30962C.1
cagaacttaatttcttgcgcccacagccaatgttttttcaactcaatcgtggtttaagcgtggtgctgcacacatggacgccagcgtagcaggtagaacggcaaataaaggggcgcctgcgcgcaaggttgtcgcccccaggaagaaatcggtgtcgagaatcattaaggccgcactgcaatgtctcatacgacggatcgggcgctacctcaagaagggtgaggcactcacagctcagttggcactcaggcctatgtgtatcttggcaacgtgctagaatacctggccactcatgtgcttgagctcgccgggaacgcggtgaaagacaacaagaagacgcgca

SEQ ID NO: 109065 - DNA, 187 bp, Zea mays
  Clone ID: MRT4577_30963C.1
gctggaggtgctttcggagcagcagttcgtcgactgtgaccacgagtgtgattcatcggagcctgactcatgtcattcgggttccaatggtgcgctaatgacgacggcattcagttatctccacaaggccggtcgcctgagagtgacaacgattacccttacactgggagtgatagcctatgcaagt

SEQ ID NO: 109066 - DNA, 734 bp, Zea mays
  unsure (1)..(734): unsure at all n locations
  Clone ID: MRT4577_30964C.1
accatgccccagcccacgctcgcccgctggccccggcctgtgcacagacgcgtgcccctgtccccgcctgcctcttctccgcccatctcgcctcgggcaccgccatcctagcaccgcacatcccgccccgggcaccgctgctattggccgttggcagccttctgccccgcatcctccgcgtcgaacaccagatacggccatcgctccacctctgtccatctcacgccaatgcccactggcgtcctcgttcctccgtgctggggagcggcggagagctttccaccttgtcttaggaacctctggcttccttccccctgccggcgatcggtggagattcgttgttctgacatcgtctcccgctgctggcgagctgaggtccagtgtggcccccgccgctgattgccgaagccgggggcttgagcgcagcgcgagagggggagggcgagctgaggtggcgacaaattctcccacgccgtcacccgcgcccgctgtcttgggaaggcacancatggagaaaggttggggtggctggtggctggtgtctccaagatgactgatcctggggagcgggtcggctacgaagcccgagaggaagagctgngacgatccaactcacactacggctgcaccgtccatgacaaagtctaaggccaaggtggacaaggttaccatcctcaggactcanacattttgggctggtgttgtattatcgttcaaatgaaagatcttctaag

SEQ ID NO: 109067 - DNA, 732 bp, Zea mays
  Clone ID: MRT4577_30965C.1
cacgactctcggcaacggatatctcggctctcgcatcgatgaagaacgtagcgaaatgcgatacctggtgtgaattgcagaatcccgcgaaccatcgagtctttgaacgcaagttgcgcccgaggccactcggccgagggcacgcctgcctgggcgtcacgcagtgccttgcccgcctcgccgtaatcctgccctaaaataaaaatccgtagctccagcttcgccggaatcccgcccgccggtccgccgtccgtccccgctcgccggaccatttccccgcgcgagatgttggtcccgtggggcggggtcgggtgctgcctcagcgccgcggcgctctatctcctcgggaggagcagcgggaagggatgcggaggtgctgcgatcggtggcgaggacgggcagcctgaaggatttggctgctatcttggacactgcaagtaaagtcctgccacttgtagtggcagtttctgggcgagttagttcagatacaccacttatatgccagcaaagtggtatgagaggtgtaatagtcgaggaaacggcagagcaacacttcctgaagcacaatgatgctggatcctggattcaagattctgctgtgatgctttctgttagcaaagaggttccatggtacctggatgatggcactgggcgtgtctatgttgttggcgctcgttctgcggcagggttaattttaactgttgccagttgaagtttttgaggagtcagggc

SEQ ID NO: 109068 - DNA, 656 bp, Zea mays
  Clone ID: MRT4577_30966C.1
ccggccgggactgtacggccgccggactaaggggagcatcctctgaactgcgcggacttagacagtgtgcagactcggcgtacgacgtcggcggtggcgatcatccaccaagacgacagcgaccttctgcgcgccggcggcatgtctgtgatccgcaagatcatgcggatacaaatcacagccgacgcggagtgttatcttgttgcggctctttgcccgcagggcgaccctctggcgtgtctacacgtggcggctggacgcaccgcatgacacgctgtacgtgcacgcacggtggtaatttttccgtacctggaggatctccgggaccatctacgttatctcactgaactagctggcggagaatgccgaacgtgcctcatgatcacgtctagcgccatggtctatcaggaaaacttgatgacggcagctacggacgcaccgaccccaacatgaacctggagctagtgatccagaactgccgcctggtgccctgaccagaagctcttgctcgaccgcttcaagcatctctatagcctgtgccgaccctgtaaggaggtctcgtgcctcgggatcatggagagcaccatcaacgacttgctctagaccgagggctacatgctctgggacggcgactctagtatcaagacgctctacta

SEQ ID NO: 109069 - DNA, 235 bp, Zea mays
  unsure (1)..(235): unsure at all n locations
  Clone ID: MRT4577_30967C.1
tggaantttgggatgatttatgtggatgtggatgtgagggtggatgtgtgggtgaagttggagaatgaagagttagttaagtaattaggtggggggggagtaatggtattgggactagggataaattatgagttaaattgagtggtgattgagtgtgaaatgataagataaaaaggagtaagtgagttaatgattgagagagtgtgaggatgaataagtaggttgggttgtatgg

SEQ ID NO: 109070 - DNA, 397 bp, Zea mays
  Clone ID: MRT4577_30968C.1
ctcatgttattcttgtttcttatttttttagggttttgcctccacctgcggctgggggaaccacttttttggggggccgaacccccggaaaaaccgcgccccccaacacaggggcccccccccccccggcgggtttgtttgccccgttaacatgggggcggccactgccaaggacccccaaacggccccagaaggggccccacttgggaaccccggccaaggcccgggggacccggggccccccccccccctggggggagacaccggggggcgcctccgggccaaagttacccccccccgcaaggggggggccaaaaggggggggccccccccggggggggggcccccgccccccctaaggtgaaaggaacaccgcccgggaaaatctccccggggg

SEQ ID NO: 109071 - DNA, 181 bp, Zea mays
  Clone ID: MRT4577_30969C.1
tctttcattcaacggcatatttcggatatttttacacctaaggtgaattcactatccttcgttttacaacttcgtaactgacaaaaccctatcattacccaacttaaccaccttccatcacattcatcttcctacaccttacttaatacctaatattcccacacctatcaactcttccaac

SEQ ID NO: 109072 - DNA, 321 bp, Zea mays
  Clone ID: MRT4577_3096C.1
gcagggggacttttccaatccatttccacactcaaaagttgcaacaagtccaaggggaaaaagatgttcccgacaatgttaactcaagagagaggccaccctagaacaacttaaatggtgcaggggacaactcctgctgaagtccaagactaatgatcctttttactcaataagatcatcatcgtcatcaggaagaggtggtgcagctgctgcagcaagctcaccttcatgctgctggtggttaaccacgctggtggttacttccggggggtgattaaaaaccacttctacaaaaggaagggtggggggaccaaccagctt

SEQ ID NO: 109073 - DNA, 313 bp, Zea mays
  unsure (1)..(313): unsure at all n locations
  Clone ID: MRT4577_30970C.1
tcttcctttcactccttccaaaaaantcttcttatcaaaaattcatatgtacaacacccttagaggagggatcttatactgggagaggtggaacatcaacttcacaaacctccccagcatccaatcttcatttctaactcttgacaccaaacccaggccattaatcccaatctatcttcaatttttcacatacaacatcctacatcgctacacgaccaacattatcacataaattcataccctactccattcaatacttattcaatatatcattatctacaacttaatacctaattcctaatctcacactatt

SEQ ID NO: 109074 - DNA, 208 bp, Zea mays
  Clone ID: MRT4577_30971C.1
tcggaagtcatgccctttctgatcccttcttctctttgacctcgcttggcatgaacttaggggggtcatgctgaatatccataaccaacagacgttatcttcttcaccacacgtgtgcgatctcgaaattgccagagacatcaaaggaaaacatgaatatgttgatcttgaatcctaccagcagcttcagaatgccaagagcaggtca

SEQ ID NO: 109075 - DNA, 961 bp, Zea mays
  Clone ID: MRT4577_30972C.1
ggaattccagagatatgctgaacttgtcatggcacatcttgttgaagaaattaatgattctgactatttttcagatggcgttccaaaggaaatgatgcgtgttgatgatgtactagtcaggatagcaaacatatcccttattgaggagaagatggctgccacaggaccaggaaaaattacaaacatttttcctaattacttgctctatgagttccaaggcttatctggtggaagaatatggaaagcggagcatgatctactgttactgagaggcatactgaagcatggatatgcaaggtgaactgttgcgggaattgcccaatcttgagccaatatctaccaatgaattggtttctgagggcacagctggtcagttacaagttccccatctctacaataagatgtgtggagtgcttgagagagtggtgcttatgcgatcagttccttctttggagacaagtctgcatcttctagtttggccaatagccttcatcagtttgaaattgtgtgtgagaatgttattgaggccttgcgaccacaacagaatggtactgctagtgccatcaaagaggaagtggtagatccagccaccaaagcagcagcagctcctcagcaagattcgaatgggcagtcttcgacagccaaggcggacatggaaatcgatggttgatttgtaggtgccagagtggtaggaaagggaattcccgctaatcactatgtatactgtggtcagaatgtatgctacatattgtaacattaaggaaagcacctccaggcctgagtgttactgctaacgcgtttggttttctaattgtccttgtagtatgcatacacattcggaactagacacatgcttcatgcagccattttgtgaggttatgtgtgctcgaaccggtgatcactgtcccgttcatacatcctgttgtactgtaccgtgcctgtctaatgatggttgatggct

SEQ ID NO: 109076 - DNA, 2434 bp, Zea mays
  Clone ID: MRT4577_30973C.1
gacttgctggaggactatttaagttacaggaaatggacttatgaacgcatcgatggcaagataagtggcgctgataggcagatacggatagatcgcttcaacgctaagaattcaactaggttttgctttcttctttctactagagctggtggtaattcggcacgcttggcaactgcagatactgtaatcatctatgacagtgattggaacccacatgcggatttgcaagctatggcaagagctcatcgcttaggacagactagtaaggtgatgatatacaggcttgttagccgaggtacaattgaggagcgaatgatgcagcttacaaaaaagaagattttattggagcacttagttgttggtcgactcaccaaagctaataatgtcaatcaggaggagttggatgatattatacgctatggatcaaaggagctttttgaagacgagaatgatgaatctcgccaaattcattatgacgaagctgcaattgagaggttgttagaccgtgatcaagttgacggtgatgaatctgtggaagatgaagaagaagatggattcttaaaaggattcaaggttgcaaactttgaatatatcgatgaggcaaaggctcaggcagaaaaagaggaggcacggagaaaggctgcagctgaggctgaaaattctgaaagaaactactgggatgaactattgaaggatagatatgatgtacagaaagttgaagaacatactgctatgggaaaagggaaaagaagccgcaaacagatggctgccgctgatgaagatgacattcatgatttaagttccgaagatgaggattactcattggaggatgacatttcagataatgacacaagtttgcaaggaaatatttctgggaagaggggccaatattctaagagaaaatcacgtaatgttgattctattccattgatggagggcgaaggacgtaccttgagagttcttggattcaaccatgctcaacgagcaatgttcctacagacactcaatagattcggttttcagaattatgactggaaagagtatcttcctcgtcttaaaggaaaaagtgtcgaggaaatccagagatatgctgaacttgtcatggcacatcttgttgaagaaattaatgattctgactatttttcagatggcgttccaaaggaaatgatgcgtgttgatgatgtactagtcaggatagcaaacatatcccttattgaggagaagatggctgccacaggaccaggaaaaattacaaacatttttcctaattacttgctctatgagttccaaggcttatctggtggaagaatatggaaagcggagcatgatctactgttactgagaggcatactgaagcatggatatgcaaggtggcagtatatatcagatgacagagagaatgggctttttgaggctgcacgacgagagcttcatctcccttcggttaatgaaataattggtgctcagttgaacgaggcaaatgggaatttggaaggtgcacaggaaggccaagcgaacacaacaagcatgtcgcattacaaggagatccagagaaagatagttgagttcttgagaaagagatatcatcttatggagagagccttgaatatggaatatgctgtgataaagaaaaaaattcctgttcctgatgatattactgaacaaggtgttccagcaggacatgctccttttattccagatatcagtgaactgttgcgggaattgcccaatcttgagccaatttctaccaatgaattggtttctgagggcacagctggtcagttacaagttccccatctctacaataagatgtgtggagtgcttgaagagagtggtgcttatgcgctcagttccttctttggagacaagtccgcatcttctagtttggccaatagccttcgacagtttgaaactgtgtgcgagaatgtcgtcgaggccttgcgaccacaccaaaatggtactggcagtgccatcaaagaggaattggtagatgcagccaccaaagcagcagcagcagcagctcctcaacaagattcaggccatgatgcaccgcatgggcagtcttcgacagccaaggcggacatggaaatcgatggttgatttgtaggttccagagtggtaagaaagggaatccccctctaatcattatgtatactgtggtcagaatgtgcgctatatattgtaacatcaaagaaagcacctccaggcctgagggtgttactgctaatgcgtttggtttacttgttgtccttgtaatatgcatacacatttagaactcatgcagccattttgtgtgctcgaaccggtggatcgctgccctgttgtgttgtactgtgtttagggcctgtttggatacgaatggttaattataagacggggctaaagataagtccggattagctatcgcggccgcttggctagcttgttggttaac

SEQ ID NO: 109077 - DNA, 459 bp, Zea mays
  Clone ID: MRT4577_30974C.1
aatagaacagccgatggtaatgaaaagagatagcgtcagactagcaaaagttttaagggtcacatagggtgatgacgcgcgcacacacatttatcggcaaaacaagccccaaaacccaaacgcggcctagtagctgaaaggcggtttggttaggatctgtctgtttggtttggacgacacggatcaaaaccttatgttgggtgctcgactgaatcagttccttggaggggggttcccaagtttgcccctgtcttggagaggagcacgaccgttaccgggggacctcccacggttactattggactcgacgcctccacctttggaatatccccggccttcaccaatgaaacgggcacgtcctccccttcttgccccttttatcccgcttttgggcttcctttcctcacataatatggccgcccatttattaaatgggggaagcctttaacgcattgggga

SEQ ID NO: 109078 - DNA, 448 bp, Zea mays
  Clone ID: MRT4577_30975C.1
ggacgcagaccagggagggctctccttacattgcaaaaaaaggttacagcaggacagttactactaaaacactactaggggggggattacaactagggggggggggggcaaaaacacaccaagcaacgggaggggggaaaaaggaacaaaacttttaccctaggggcgagggggattattaatttttttttttcaaaccgacaagctactacttacccgggaaaacttaacataaatccaaacgggcggatctgtctggggctaaaatcatgccgcacgtccaggaaatgggcccccctttcctttccccgcctttgggggcggggtttcgggggccggcccggttgctacccaagtcaggcgtacacaaccccggaggaaaccgccataaccaggatggccggcccctcctcctcgcccagggggggcctccgccgcatccgccgcc

SEQ ID NO: 109079 - DNA, 830 bp, Zea mays
  unsure (1)..(830): unsure at all n locations
  Clone ID: MRT4577_30976C.1
aattcggcacgagggctggacccacacctcgcctctcccgcagcccagcctcgcaaagcccctctgccacgcaaagcccctctgccaattctctgcagcgtcattgacgctgtctgggctctctctgtttttttttttgttccaatcatcatcgtcatcaaggaggagaagagtagattggattggtcagattactctctctcctccactgcagtctctctgaagagaagaggctaatccaatccagcccagcccagcctttccacagttcctggagaaaatcctcactcgggtgcgcgaagcagcttgattcgcctgcgcagctcatcggaagagagccaggagcttgttcttggctgctggaccgatccttgagcagccgccgctgatcttgccggagggccaagagcctgtgttcttgcaccggagaattctcggccagccgtgccggatagggttgagggtgtgccatgtcagcgtcgcagtcctcgatgagcggcgccggggagccgggggcgcgggcggtggtctggttcaggtgggacctgcgcgtggaggacaacccggcgctggcagcggccgctcgggcggcccggggaggtcgtgccggcgtacgtgtgggcgcccgaggaggacggggcctactacccccggaggttgttccccggtggtggctcagccagagcctcaagcacctggacgcctcgctccgccggntcggcgccgcccgcctcgtcacccgccgctccaacgacgccggagccgctctgctcgacctcgtccgctgcaccggtgccacgcacctcttcttcaacacctctacggttcga

SEQ ID NO: 109080 - DNA, 414 bp, Zea mays
  Clone ID: MRT4577_30977C.1
taccggagtcggagctctgagcgtgatcatgattcggagagggagcgctcggatcgggaacgtggcaatggcagtaccgtttcaagttcttgcaacatggtgtgagcaagaccaagaccaataccaaaggatagttgacttgggaactgtgggaagagggattgatgttgaagagcaatacggtgtgccggaccaccgtataacgtttggaagagcattgtctccacaaactttctgaggccaatattccgattgtgatgcttaatagttttgtgtccatctgttctgatatttataactgatctaattacaggcggattttgaagaatcattttattatacaccgtttatggcgtcttgaaaaaattctttaatttggttaaaaattttgtgagttgttgtgaaattttcgac

SEQ ID NO: 109081 - DNA, 534 bp, Zea mays
  Clone ID: MRT4577_30978C.1
ggggacttggatcccatctcggcagtgtcagctgcatggccgaagaagcacatcatatcggccggtaaggtaacctatctttcacagctccagatattccgctttatttttatgtcctgatgcagatacataacatgagatgtggaggctgcatgccgaagttgcaacgcggaagtccttttgctggctcgggcagtgactacggagcagggactagggtagtggggtttacatgcatggtgctgcatgattatgcaatcatttcagagcggtcatcgggcgcagaaaggcttcggcgcgcggccgggcgggtggcaggggcaaacttcttttcccatggcgtttccagcaaacagtgctctggacatccaggacggcgccttcttgagggtgacaggatagaaaagaggggagggcaaactgacatacagtgaggcggcggtgagggccgcctctactgctgacccctttcgatgggggcggcaacttggtcagggccagatgatgacatgtatgggatcgatctcacctctc

SEQ ID NO: 109082 - DNA, 265 bp, Zea mays
  unsure (1)..(265): unsure at all n locations
  Clone ID: MRT4577_30979C.1
cgccacaggaagcgcaacagcggagncggcaaagagggccgccgaggacagggagaccgacncgccgcagccgccggcgaagcngccccgncncnccggcgccgacacgagcgccggagnggcggccccgncgccccnggnncncgggccgggcccggggcncggcgggggcggcgagcgagacgcgganngcgccccggcaacggcgacgcccaagaggccgncagcgcngacgnncaagcagcagcaggaaccggagcaccag

SEQ ID NO: 109083 - DNA, 370 bp, Zea mays
  Clone ID: MRT4577_3097C.1
aaagccaaaaaaaaaatgttttggttaaaaaaattcgcttttttttttccggggaaaaaacccgggggataaaaaactttaaaactttggtggggaaaaactaaaaaaccccccgtttaacccttaccaagctttgtttaatttttaaaccctgacagttttttttggggggaaaccctttggaggggggcccactgggggggcccgccagcttgaccttggggggagctgcccccgccccgggggaaaaatcaaagccgcttatgcttcccaccggttttgaagctgggagttttccccgtgggaatggcctacaacccggggataaagggggccgcgaaaatctttaagaaggaatttttcccgggga

SEQ ID NO: 109084 - DNA, 280 bp, Zea mays
  Clone ID: MRT4577_30980C.1
aaaaaaaaaaaaaaaaaaaaattaaataaaaaaaaaaacgccgcccccccttggaaagtatacattattacatcctccatcctacaacataattattctataatatcaccaaaaaaaaataaactacccgccattttacaacaacttcactactaaaaaaaccccatcaccaaacaaaataatcttctagcaaatcatccttttttcacctgctttcataataaagaagaccccaccaatcatcattcttaacaacatttcatcactaataataaataat

SEQ ID NO: 109085 - DNA, 426 bp, Zea mays
  Clone ID: MRT4577_30981C.1
ctgccgcctacactggacgacgcttgatgcatacgagatgatgagttggccggaggaaggaagaggctgaaagggcggcggagagagaaaggctataagagcgagctgggtccctcgaggatgccatcaagaaaccgcgtggaggggagggcgatgagatgagggatgctggccgcggtgatggactactttagctcctgctggggcccgcgatcgggtgccgggcaccgggaaaagggctccgacgccgctggccggcaggacggtctcctctggtacaaggacgtcgggcagctcgtcactggggagttctccatggccgtggtgcaggccaaccagctgctcgaggaccagagccaagtggagtccggatcgctctccctggctgacacgggcccgcagggcaccttcgtcggcgtctatgat

SEQ ID NO: 109086 - DNA, 1454 bp, Zea mays
  unsure (1)..(1454): unsure at all n locations
  Clone ID: MRT4577_30982C.1
aaatcaggattggtagagcccatctctgcgccctgccttgctggctctgacctctccctcccttccccttcctcgattgttcctcccccttcttttattattagggttttttttgtctccttagatttgcgcctgttctcacctgtgcgcatactagtctctgcatcagagagtagagacctcgcagccgatcttcaacacgcagattgggcagagctgcctgccggagggagagtgaagagagagagagagagcgcgcgcgctcaaggggggcaaaaggagatattttttatccagcttgttagcttgattctctttgatccgggagagcagccgccagtccaactaatcctagctattgctgtgccggggctttgattgttctccagatccgagccacctgctgggtggactccaggaatccgagcacgaagttgacaggggagttctcagggaaaagttgcgcaggggaggaaggaagagcctgaaagggcggtgcggagagaaagactataagagcgacctgggtcccttgaggatgccgtcaagaaaccgcgtggagaggagggcgatgagatgagggatgctggccgcggtgatggactatttcagctcctgctggggcccgcgatcgggtgacgggcacagggggaagggctccgacgccgccggccggcaggacggtctcctctggtacaaggacgccggtcagctcgtcactggggagttctccatggccgtggtgcaggccaaccagctgcttgaggaccagagccaagtggagtccggatcgctctccctggctgacccgggcccgcagggcaccttcgtcggcgtctatgatggccatggcggtcctgagacgtcccggttcatcaatgaccacctcttcaccatctcattaggtttgcaactgagcacaagtttatgtcagcggacgtgatccgggaagctttccaagcaactgaggagggctttctttctctagtcagcaaggaatggtctttngaagcctcagattgcttcagtgggctcctgctgccttgttggtgtaatctgtgctgggggcggggatgttgcaaacctgggcgactcacgtgcagttcttggaaggcttgttaaggcaactggagaggttttggccattcagttgtcatcggagcacaatgcgtgctatgaggaagttagacaagagctgcagtcatcacatcctgatgatccacatattgttgttctcaaacacaatgtttggcgtgtgaagggtatcatccagtcaattcggctcgagggctggcagcatcactgctcaagataatgtttggggcgcatgatttgaccagtccggatcattacttttgatgatgtgttgtagcagcacgttgctctcaacaaggttggtttctttttttcttgaaaaaaaaaaaaaaaaagggcggcaaccgactagtgagctc

SEQ ID NO: 109087 - DNA, 931 bp, Zea mays
  Clone ID: MRT4577_30983C.1
gaccaccactacccaccaaattagaggattggtgccttgctccctcccccttcttgtcgttgctccaccctctcttcttttattattgggttctttttttctctctctccccttggatttgcgcttgtgctcgtctggccgcatactagtatccgcaccagagaggagacacctccgactccgacctgctcttgcatatagattgggcagagagtgagagagcgcgcgcgcgctcaaggggtgccaaagggagatttttttttaatccagcttcttagcctcactgtctttgatcccggagagcagccgccagcccaactaatccttgctgctggcgcgccggggctccgattgcgctccagatctgaggcacctgctcggtggattccaggaatccgagcaccaactcgacaggggagttctcagggtaaaggaagaggctgagagcgcgttggagatttggactataagagcgagcgggcgagctgggtgccttgaggacgccgtcaagaaaccgcgtggaggggagggcgatgagatgagggatgctggccgcggtgatggactacttcagcacctgctggggcccgcggtctcgtgcggggcaccggggcaagggctccgacgccgccggccggcaggacggcctcctctggtacaaggacgccgggcagctcgtcaccggggggttctccatggccgtggtgcaggccaaccagctgctcgaggaccagagccaggtggagtctggatcgctctccctggctgactacggcccgcagggcaccttcgtcggcgtctatgatggccatggcggcccggagacgtcccggttcatcaatgaccacctcttcaaccatctcaggagatttgcaactgagcacaagtccatgtcagcagacgtgatccggaaagctttccaagaaactga

SEQ ID NO: 109088 - DNA, 708 bp, Zea mays
  unsure (1)..(708): unsure at all n locations
  Clone ID: MRT4577_30984C.1
ccggccgggacaccaccaccacacccacacaaattagaggattggtgccttgctccctcccccttcttgtcgttgttgctccaccctctcttcttttattattgggttctttttttttctctgtctccttggatttgcgcttgtgctcgtctggccgcatactagtatccgcaccagagaggagacacctccgactccgacctgctcttgcatatagattggacagagagtgagggagagagagagcgcgcgcgctgaaggggtgccaaagggagatttttttttttaatccagcttcttagcctgactgactctctttgatcccggagagcagccgccagcccaactaatccttgctgctggcgcgccggggctctgattgcgctccagatctgaggcacctgctcggtggattccaggaatccgagcaccaactcgacagggagagttctcagggtaaaggaagaggctgagagcgcgttggagatttggactataagagcgagcgagcgagcgagctgggtgccttgaggacgccgtcaagaaaccgcgtggaggggagggcgatgagatgagggatgctggccgcggtgatggactacttcagcacctgctggggcccgcggtctcgtgcggngcacaggggcaagggctccgacgccgncggccggcaggacgggctnctctggtacaaggacgccgggcagc

SEQ ID NO: 109089 - DNA, 900 bp, Zea mays
  Clone ID: MRT4577_30985C.1
gtcaggaaggcgaacacctggattgaaagactgctctctcagttcagcattgggtcgtcaaggagaacaaaatgatggtaccttcagcgtgaggatcgatgactgtcaatggagctgtgcaaacacaatcgtggcaaagctggctgtggcactggcgcctatgccatttatgagggttttgcttgaccgttttgtggctgcaactagtggtgtgttcccagacaaccaagagctacaagacagaggtaagctctcgggttccgtcctggggcaatggggagctgttggcctgcctgggtccattgtccaagacggagctggactcctcctggcgaggagtcgatctacggatacatagtccatggttgtggtagccatctatttgcggtgtttgacatcgaggttggggaagttggaaaatggacacagatcgcagagctcggttaaacaagtggcctgtgcctgccatgttggtatcatccaaacagtctccatgtctgcattatactgatgactggaatgagggtgtgtccaaggaggagctggactctgagatcccacctggcgaggagtcgatatacggatacataatgggaatggcagatacatgtagtctgtagaatccatcaggatttccccttgataggtctcaggtttccctctaatattgtgcattgtccctcaagatgttaatacagcaatttcttgtttagtgctcataacattactccagtctccaggcgtagtgcttggtgtagagacataaaacagataatgcagcaccagtttgtggcttcaaaaaaaaaaaaaaaaaaaaaaaaaaaaaaaaaaaaaaaaaaaaaaaaaaaaaaaaaaaaaaaaaaaaaaaaaaaaaaaaaaaaaaaaaaatattaaattttt

SEQ ID NO: 109090 - DNA, 399 bp, Zea mays
  Clone ID: MRT4577_30986C.1
cccgattaaaactagataaaacagcataacttatcccatattttttctttttttgtagcactcggaccctctttgggggcaccaggggatgatttaaaatttgttgcgcctgattagcacctgtttaatcgaaatatccatgaatcgaatggctactcaccaagtgagttcctagcttttctttttttctttttgcacttaacagcatgcgagtcttgtttgacaccatttttcttttttatggtgctttatattattagactactgatgctgctgtacagacaaccttgatatgtggtctacaaagttgccgataccagcacttcccaacaatcgtttggagaatggcacagcatctcatgtggccgtgccactctcttttgttattctcgaagccat

SEQ ID NO: 109091 - DNA, 407 bp, Zea mays
  Clone ID: MRT4577_30987C.1
gcggttgtagctatgacttctgtgccacatattctcgaagtgacgaagttgtttctacggacgcgtgggcggacgcgtggggttcttcaaactgctgttgcgacggaggaaaagctaagtgtgcattcaatcacgcttgtgccgccgtcgtgtgtggtgaggaggcgttggcatcccccagtaagcaataggacatccttcggatattttgcgctttgtatctccacacagcccgagggcatgaggggggccgtgagaaataagatcctcccatggacaaggacgagtaggagactgcatgagcagcaaatgcttgggatcgttcccaaacgggttcccttattcatcgcatacagccgggacaatgatcagtagcaggttttcaaggtttcctcaattcgctcgcg

SEQ ID NO: 109092 - DNA, 408 bp, Zea mays
  Clone ID: MRT4577_30988C.1
gatccatcagagcggccgcccgtttataaaaccattaataaaccccccccaaaccaaaacccggagggggaggaaacgggaggcaacaccccggggccaacaagaacaacccggggcagagacacagaccagcgaaccagcacacctaaagaaacgatggggggcaccaagaaaaacagccccgggaaccaaggcctcggcaagagagggaccccacggcaacccaccatactttcaagcccccggcccaagcaccaacaatcagcaaaacaacgggaaaaggaaagggccaacccccggccttttgaatcgggcgcataaagcccaaaaaggaaccagggggcggcaaaaatccgagaacggaggaagcacaaaagaggggggcacccagccctaaggcccaacgcc

SEQ ID NO: 109093 - DNA, 2628 bp, Zea mays
  Clone ID: MRT4577_30989C.1
ccggccgggaaatagtctctgcatcagagtagtggcctccgagctgctcttcacacacacagattcggcagagcctgccgtgtgagagtgaaaggagagggagcgcgctcaaggtgtggcgcaaggagatttttcctttatccagctgcttcgcaagattatctttgatcccggcgagcacttaccggtccaactaatcctccctgagcgtgcgcccgagcttccgatcgcgcttccgctcacgcgtccgtacttgggcgagcgcgtgatctcgggaaccaagctgacagctgggttgacatgtggaatagaaagccgctcttgaatgctgggtgccctgctgcattgagcacggcgctagaagacggcgtggaggggagggcgagtaatcgtgtagtcttaggtccggctgtgaagcttcaaattcaactgtcgcctcttgtcccttgatctgtttctgccgcctacactggacgacgcttgatgcatacgagatgatgagttggcgcgcagagttttcttggatcccagcatacgatacgatccaccagcttaaccgcatacaagaattattgcctttttttaaaactcgttttgatttgattgcatctgttgttttagttgcgcaggggaggaaggaagagcctgaaagggcggtgcggagagaaagactataagagcgacctgggtcccttgaggatgccgtcaagaaaccgcgtggagaggagggcgatgagatgagggatgctggccgcggtgatggactatttcagctcctgctggggcccgcgatcgggtgacgggcacagggggaaggcccgcgacgccgtcggccgcctcggaggtcttcagtggtacattgcagccgactgggtagggactggggtgttctgccttcacgtgctgctgtttaacacgccagttcagatcaaggggcgcctgttagctcggatgggtaatctttgctgggactctctatgttgcgaacctgggcgactcgcgtgcagttcttggaaggcttgtgaaagcaactggagaggttctggccactcagttgtcagcggacacaatgcatgctatgaagaagttagacaagagctgcagtcatcacatcctgatgatccacgtattgtggttctcaaactataacgtttggcgagaaaggtgtctcatccatctcattacttctgtggggtctgtatctctagtcaatctaatctgtgcggggactctctatgttggaaacctgggtgactcacgtgcagttcttggagggcctgttaagtcaactggagagttcgtggccttgcacttgtcataggagcacaatgcgtgctatcaggaagttagacaagaactgctgtcataacaccttgacaatccgcaccttgttgctctcaaacaaattatttgacgtcaaaaagatcccctgaggatattaagagccattggcgatgtaattgtaaagaagacggagtacagcaaaaaacaacttcacagcatggatcgaggtggagcaaacgacctgcgggctctcataagcgtggacgctgtaatcctcgaaccggaaacccagacaaatgctagatttgttaaacttccttcggttggtctctgggagcgcctccacactaaggaagcagttgaccttgtcgaaattagtccacaacaaagagataaatcggagactaggtagagcggagatgcaagaagctgccaagaagagggcgatgagatactccggcctcaagaagatcgaccgtggtgtgagcaggcatttccgcgacgatataacggtcgtcgtggtattccttgatttgaatgccatgagcaaagctagctggagtaaaagcccctcggtttctatcctagggggcggtgtcacgggtcaatgcgtaggccctcgcatctttcctcagctttcggcacggctgaacagcacctactgaagttgctaccactcttgaaaggaagaacacggtgcagatctgcagtggtgagagaaaaaaaaacagcaatcaagtgtagcgttacagttacacctgctgtgttgttgctctttgcaaaactactgtctagactccgcctggtaattagtgtactgatagcgaggtaaaaaaaagttagattatttgttagcagcggcagtgatttgacatctaaggaacaacaacacggtgtccaccgattctgctatcctgatggctcgcggcagcctggctggtcggcacacgacacgaagtgaagctgttttactggcggcatctggctttgttatctcatgggacagtgatccacaagagtaagggatcagctcaatccaaagtcaatagatgttccttataaaacatagaggtacagatgttctcatcggctatgtgtatttggggaaaaatcaatataaggggtgtttggtttttagggactaataaaaaaaaaaaaaatgctattatatttattccttaaactaccaaatacataaactaaaattctaatttagagactaaaatagagctattaaaaattagtctctagaaaccaaacacccctcagaaaaaaaaacacaagaggctacgatattccagatctagagtattaatccaagaatttacattctgcaatggatac

SEQ ID NO: 109094 - DNA, 204 bp, Zea mays
  Clone ID: MRT4577_3098C.1
gatcatgctcagatcatccgtgttctagcttgcgaggtcgagagagactgacagatgactgcgtgctgcgcagcaactgcgcgtgcagctccggctgcatgtgcggcaactgctgcagatgacgcagcaagattgacccggacatggccgtgcaggtgaccaccaccaccaccgaggctctcatcatgagcgtcgcaccatcca

SEQ ID NO: 109095 - DNA, 636 bp, Zea mays
  Clone ID: MRT4577_30990C.1
gagcttttcagtattacataacataaccattagtacacataaatattaatggttatgttgatgaatgtcagtttgactgaaggtgaaggggcgtcctgccaacaaaagggaaggcgaacacctggattgaaagactgctctctcagttcagcattgggtcgtcaaggagaacaaaatgatggtaccttcagcgtgaggatcgatgactgtcaatggagctgtgcaaacacaatcgtggcaaagctggctgtggcactggcgcctatgccatttatgagggttttgcttgaccgttttgtggctgcaactagtggtgtgttcccagacaaccaagagctacaagacataggtaagctctcgggttccgtcctggggcaatggggagctgttgatgatcctgagtccatgctgcaccacatccattgggcagtaatgaggtgattccaatcgttaagagtcaagcataatgttgtgtgatagatctatttgcggtgtttgacatcgaggctggggaagttggaaaatggacagagatcgcacagctcgggtaaacaagtggcctgtgcccatgccatgttggggtcatccaaacagtctccatgtctgcattatacttatgacttgaatgagggtgtg

SEQ ID NO: 109096 - DNA, 178 bp, Zea mays
  Clone ID: MRT4577_30991C.1
gcgtacagaccgcggaccccctacggctcaaccacagtgcgcagttaagcaaccaccgcgctgttcgcagcgcaggcaggagcagccacaagcaacataccattgtcaccaaagaactggcaacaacaaacagagcaacgtgtggccaacacaccgtcacagacggtgagcgcacaac

SEQ ID NO: 109097 - DNA, 1981 bp, Zea mays
  Clone ID: MRT4577_30992C.1
ccggccgggagagtagtggcctccgagctgctcttaacacacagattcggcagagcctgccgagagagagtgaaaagagagggagcgcgctcaaggtgtggcgcaaggagatttttcttttatccagcttcttagcatgattctctttgatcccggagagcagccaccggtccaactagtccttgctgttggtctgccggaacttttgattgctctccagatctgaggcacctgctgggtggattccaggaacccgagcacgaagttgacaggtgagttctcagggaaaaaggggaggaaggaagaggctgaaagggcggtggagagagaaagactataagggcgagctgagtcccttgaggatgccgtcaagaaaccgcgtggagaggagggcgatgagatgagggatgctggccgcggtgatggactacttcagctcctgctggggcccgcgatcgggcgccgggcaccggggcaagggctccgacgccgccggccggcaggacggtctcctctggtacaaggacgccggccagctcgtcactggggagttctccatggccgtggtgcaggccaaccagctcctcgaggaccagagccaagtagagtccggatcgctctccctggctgacccgggcccacagggcaccttcgtcggcgtctatgatggccatggcggcccggagacgtcccggttcatcaatgaccacctcttcaaccatctcagaaggtttgcaactgagcacaagtttatgtcagcggacgtgatccggaaagctttccaagcaactgaggagggctttctttctctagtcagcaaggaatggtctttgaagcctcagattgcttcagtgggctcctgctgccttgttggtgtaatctgtgctgggactctctatgttgcaaacgtgggcgactcacgtgcagttcttggaaggcttgttaaggcaactggagaggttgtggccatgcagttgtcatcggagcacaatgcgtgctatgaggaagttagacaagaactgcagtcatcacatcctgacgatccacatattgtggttctcaaacacaatgtttggcgagtgaagggtctcatccagatctcaagatctattggagatgtatatctaaagaaaccagagtacaacagagaaccacttcacagcaagtttcggcttcgagaaaccttccagaggccgatccttagttctgaacctcaaattactgaacatcgaatacagccgaacgatcaatttgttatatttgcttctgatggtctatgggagcacctcagcaataaggaagcagttgaccttgtccaaagtagtccccgaaatggaatcgctcggaggctagtgaaagccgcgatgcaagaagctgccaagaagagggagatgagatactcagacctcaagaagatcgaccgtggtgtgagaaggcatttccacgacgatataactgtcgtcgtggtattcctcgattcggatgccatgagcaaagctagctggagcaaaagcccctcggtttctctccgagggggcggtgtcgccctccctgcgaagtccctcgcacctttctcagctccggcacggctgaacagcacctactgaagttgctaccactcttgaaaggaagaacacagtgcagatctgcagtggtgagagagagagaaaacagcaaccaagtgtagcgttacagttacacctgctgtgttgttgctctttgcaaaactactgtctagactccgcctggtaattagtgtactgatagcgaggtaaaaaaagttagattatttgttagcgacacacatcctttcaccttctcttctctccctcgattcctatcccttttctcttcatccttgagagaacaggtggttgtaaattgttcagaacatgttttcccttatagtccatcatatcccgcttttttcgtgttgaaaaaaaaaaaaaaaaaaaacaaaaaaaaaaaaaaaaaagcggcc

SEQ ID NO: 109098 - DNA, 282 bp, Zea mays
  Clone ID: MRT4577_30993C.1
acgcgtgcgcacgatcattcacacaatcaccattactcttctatttttaaccacacaccaccaatctcggctagggtgaattttaacagggagcaaacacatactctacactgccccaccgtacatgttaatcagaactgcaaccctaccgtaccttctagcacgccacccccaggattagccaccctaccggattttctccttcaaagtttctatttttgttatcactccggcgcaagcatgcgagggagtcacgaccaacccacgagacactagcacaaa

SEQ ID NO: 109099 - DNA, 271 bp, Zea mays
  Clone ID: MRT4577_30994C.1
agtagcgaaagcaaaggacgtaagaagtcgtctaattcttggatcgaattagacgacttcttccgccctctcttccttgctactctagctgggagtctgcaggatcgatgccgacgattgattctttgatggacagcattggcgaatctcgttgcgaagctttggtgatccctgatatcaaccttgcttaccattacgcaagaggcactaatttcgtatgcctccatccttcttgtgaacagcatactgtatacccccctccccacctctt

SEQ ID NO: 109100 - DNA, 1352 bp, Zea mays
  Clone ID: MRT4577_30995C.1
aaaaaaaaaaaaaacctccgactccgagctgctcttgatatagattgggcagagagtgtgagagagagagagagcgcgcgcgcgcgctcaaggggtgccaaaaggagattttttttaatccagcttcttagcctgactctctttgatcccggagagcagccgccagcccaactaatccttgctgctggcgcgccggggctctgattgcgctccagatctgaggcacctgctcgggggattccaggaatccgagcaccaactcgacaggggagttctcagggtaaaggaagaggctgagagcgcgttggagatttggactataagtgcgagcgagcgagcgagcgagctgggtgccttgaggacgccgtcaagaaaccgcgtggaggggggggagggcgatgagatgagggatgctggccgcggtgatggactacttcagcacctgctggggcccgcggtctcgtgcggggcaccggggcaagggctccgacgccgccggccggcaggacggcctcctctggtacaaggacgccgggcagctcgtcaccggggggttctccatggccgtggtgcaggccaaccagctgctcgaggaccggagacacccccccttctgatatatctccctgttggtcctcaggccgccattagcgcagaaaatggtcaatggtccccgcggttgaactccatgctctgggcctcctagctccaatcgcgtgcacgggtgtgtcaccggggcacacagatacgggcctgcgctttcccgtgcacatggttgttttggggcacaagtaatctctcaacggagtcaggcatggccgaagtactgccctcgtcatggctgggatccaacaccgtgtcatctctgggtttgcaactgagcacaagtccatgttagcagacgtgatccgaaaagctttccaagaaactgagggctttctttctctagtcaccaaggaatggtctttcaagcctcaaattgcatcagttggctcctgttgccttgttggtgtaatctgtgctgggcctctctatgttgcaaacctgggcgactcgcgtgcagttcttggaaggcttgttaaggcaactggagaggttctggccacgcagttgtcagcggagcacaatgcatgctatgaagaagttagacaagagctgcagtcatcacatccttatgatccacgtattgtggttctcaaacataacgtttggcgagtgaagggtctcatcccagcacacaaaaatctatactcttgatctggttgctgattttccactttatggtgtaattgtaaggacatggcaaaactggacaacaggattctagcaaaactggctcacattatttcacc

SEQ ID NO: 109101 - DNA, 307 bp, Zea mays
  unsure (1)..(307): unsure at all n locations
  Clone ID: MRT4577_30996C.1
gaatctggaacgtaacttcttatttctggttggccccctcggacaaaaacaccctaagggcgagctcgggcgccctggcggccggtgcaggccgctccgggctcgggcccgggggtggacgaaacctcgatgtagccggtccttgctggcgctcgcctgatttttaaagatgatgactttcctcctgcctctgctggagcgaagcagccgctgctgctcactccgggacgatgtggtagatcctattcatgtaatgcactctcatgccatccccngttctcgcttagctttgtcttgttttcctagc

SEQ ID NO: 109102 - DNA, 2108 bp, Zea mays
  Clone ID: MRT4577_30997C.1
ccggccgggaaggattggtagagcccatctctgcgccctgccttgctggctctgacctctccctcccttccccttcctcgattgttcctcccccttctttttattagggtttttttttgtctccttagatttgcgcctgttctcacctgtgcgcatactagtctctgcatcagagagtagagacctcggagccgatcttcaacacgcagattgggcagagctgcctgccggagggagagtgaagagagagagagagagagagacgcgcgcgcgctcaaggggggcaaaaggagtttttttttatccagcttgttagcttgattctctttgatccgggagagcagccgccagtccaactaatcctagctattggtgtgccggggctttgattgttctccagatccgagccacctgctgggtggactccaggaatccgagcacgaagttgacaggggagttctcagggaaaagttgcgcaggggaggaaggaagagcctgaaagggcggtgcggagagaaagactataagagcgacctgggtcccttgaggatgccgtcaagaaaccgcgtggagaggagggcgatgagatgagggatgctggccgcggtgatggactatttcagctcctgctggggcccgcgatcgggtgacgggcacagggggaagggccccgacgccgccggccggcaggacggtctcctctggtacaaggacgccggtcagctcgtcactggggagttctccatggccgtggtgcaggccaaccagctgcttgaggaccagagccaagtggagtccggatcgctctccctggctgacccgggcccgcagggcaccttcgtcggcgtctatgatggccatggcggtcctgagacgtcccggttcatcaatgaccacctcttcaaccatctcagaaggtttgcaactgagcacaagtttatgtcagcggacgtgatccggaaagctttccaagcaactgaggagggctttctttctctagtcagcaaggaatggtctttgaagcctcagattgcttcagtgggctcctgctgccttgttggtgtaatctgtgctgggactctctatgttgcaaacctgggtgactcacgtgcagttcttggaaggcttgttaaggcaactggagaggtcgtggccatgcagttgtcatcggagcacaatgcgtgctatgaggaagttagacaagaactgcagtcatcacatcctgacgatccacatattgtggttctcaaacacaatgtttggcgagtgaagggtctcatccagatctcaagatctattggagatgtatatctaaagaaaccagagtacaacagagaaccacttcacagcaagtttcggcttcgagaaaccttccagaggccgatccttagttctgaacctcaaattactgaacatcgaatacagccaaatgatcaatttgttatatttgcttctgatggtctatgggagcacctcagcaataaggaagcagttgaccttgtccaaagtagtccacacaatggaattgctcggagactagtgaaagcggcgatgcaagaagctgccaagaagagggagatgagatactcagacctcaagaagatcgaccgtggtgtgagaaggcatttccacgacgatataacggtcgtcgtggtattccttgatttgaatgccatgagcaaagctagctggagcaaaagcccctcggtttctctccgagggggcggtgtcaccgtccctgcgaagtccctcgcacctttctcagctccggcacggctgaacagcacctactgaagttgctaccactcttgaaaggaagaacacggtgcagatctgcagtggtgagagaaaaaaaaacagcaatcaagtgtagcgttacagttacacctgctgtgttgttgctctttgcaaaactactgtctagactccgcctggtaattagtgtactgatagcgaggtaaaaaaaagttagattatttgttagcagcggcagtgatttgacatctaaggaacaacaacacggtgtccaccgattctgctatcctgatggctcgcggcagcctggctggtcggcacacgacacgaagtgaagctgttttactggcggc

SEQ ID NO: 109103 - DNA, 279 bp, Zea mays
  Clone ID: MRT4577_30998C.1
atcttctgcaaagcaaaacaccgcaaccattcagttctctcagcttctcagctcatttctctttgtgtccaacctcacaaccttcaactcttccctcacccaaaacaacaccaccacaacaaacgtcacaatggccgccaagctctccgccgatctcctcttccagatggccaaggtccgccgctccatctacaccctcaacaaggacctccccatctcgaccacccgcatccacgagatcgtcaaggacgccacactgcacactccctcgtccttcaa

SEQ ID NO: 109104 - DNA, 2145 bp, Zea mays
  Clone ID: MRT4577_30999C.1
cgggctcttcttttattattgggttctttttttctctctctccccttggatttgcgcttgggctcgtctggccgcatactagtatccgcaccagagaggagacacctccgactccgacctgctcttgcatatagattgggcagagagtgagagagcgcgcgcgcgctcaaggggtgccaaaaggagattttttttttaatccagcttcttagcctcactgtctttgatcccggagagcagccgccagcccaactaatccttgctgctggcgcgccggggctccgattgcgctccagatctgaggcacctgctcggtggattccaggaatccgagcaccaactcgacaggggagttctcagggtaaaggaagaggctgagagcgcgttggagatttggactataagagcgagcgagcgagctgggtgccttgctgccttgaggacgccgtcaagaaaccgcgtggaggggagggcgatgagatgagggatgctggccgcggtgatggactacttcagcacctgctggggcccgcggtctcgtgcggggcaccggggcaagggctccgacgccgccggccggcaggacggcctcctctggtacaaggacgccgggcagctcgtcaccggggggttctccatggccgtggtgcaggccaaccagctgcttgaggaccagagccaggtggagtccggatcgctctccctggctgactacggcccgcagggcaccttcgtcggcgtctatgatggccatggcggcccggagacgtcccggttcatcaatgaccacctcttcaaccatctcaggagatttgcaactgagcacaagtccatgtcagcagacgtgatccggaaagctttccaagaaactgaggagggctttctttctctagtcatcaaggaatggtctttcaagcctcagattgcatcagttggctcctgttgccttgtacgcgtgggctgtgctgggactctctatgttgcaaacctgggcgactcgcgtgcagttcttggaaggcttgtgaaagcaactggagaggttctggccactcagttgtcagcggagcacaatgcatgctatgaagaagttagacaagagctgcagtcatcacatcctgatgatccacgtattgtggttctcaaacataacgtttggcgagtgaagggtctcatccagatctcaagatctatcggagatgtatatctaaagaaaccggagtataacagagaacctcttcacagcaagtttcggcttcgagaaaccttccagaagccgattcttagttctgaacctcaaattactgaacaccgaatacagccaaacgatcagtttgttatatttgcttccgatggtctatgggagcacctcagcaatcaggaagctgttgaccttgtccaaagtagtccccgtaatggaatcgctcggagactagtgaaagccgcgatgcaagaagctgccaagaagagggagatgagatactcagacctcaagaagatcgaccgtggcgtgaggaggcatttccacgacgatataaccgtcgtcgtggtgttcctcgactcggatgccatgagcaaagctagctggagcaagagcccctcggtttctctccgagggggcggcgtcacccttcccgccaagtccctcgcacccttctcggctccggcacagttgaacggcacccactgaagctgctactgctcttgaaaagaagggcacagtgcagatctgctagagatgatgagagaagcagcaatcaagtgtagctgttgctcgtacacctgctgtgctgttgctgtttgcaaagctgccgtcttgactccgcctggtaattagtgtactgatagcgaggtatagaaattaggttatttgttagcgacgcaaatcctttctttttttttcttctccctctgttcttatctcttttctcttcatcatggaggaaacaggtggctgtaaatttgtccagaacatgttttccctaatagcccatcatatcccgctctttttcttgttgatatgaccaaggctggcagcatcgctgctcaagataatgtttggggcgcatgatttgaccagtccgaatcattacttttgatgatgtgttgtagcatcacgttactctcaacaaggttggtttctttttt

SEQ ID NO: 109105 - DNA, 1230 bp, Zea mays
  Clone ID: MRT4577_3099C.1
cggggcttatcataaaccgattctcaagtgggaagagaaagaaagggagagaaagacaggactggagaaggtgagtgagaggggggcgcgcagcggcagcggcggcggcggcgtcgccgtccatggcgaggaagcacggatggcagctccccgcgcacacgctccagatcattgcggttacggttttcttccttctggtgattgctttttatgcattcttcgcaatgtttctagggaagcaagtcctagagtatgttgtgatcggtgtctacactgccgtggtgttttctgtcgccatgctttacatccgctgcactagtataaaccctgctgatcctggaatcatgtcaaagttcgacaatgtcctcatcgatgcacctggaagtgctgccaacatacagggcacggatttgccagtgaaagctggtattggcgctggaacaatctccccatcggcaacatctacttgtaggaactctgtagatgggcattctaacgctggtgctttagctgctggagacacaaatctggatttaaggtctcagccgccaacaagtccatggagctgcttacttggagggcttgtttgttttttgtttgggaaggaggattgtaggaaatacgatgattcagagaatcaagttgatggggaaggagccttgttctgcacgttatgtgacgccgaggttcgcaaattcagtaaacactgcagaagttgtgacaagtgtgtggatggatttgatcatcactgtcggtggctaaataactgtgttggacggaagaactatttcacgtttcttgctctgatggctaccagtcttctctggcttgctatcgaaattggagtaggcatcggtgttcttgttatatgctttgccaacaagaattcagagagaattattcaagacaggcttgggaatggtttgcctcggcctgcctttgctaccattgtagcgttttttactcttctttctctagtcgcttgcatacctttaggggagcttttcttcttccacatgatcttaatcagaaaggggatcacaacttatgaatatgtcgttgcaatgagagctatgagtgaaacacctcaagaggaggaagagcacgaggaggaggagggggtaaacattgtttattccccaacaaattcagccaccactgcgttcagtggtgctagttcactcagtcttcactacaagggctcatggggcacaccttcaagatttttgt

SEQ ID NO: 109106 - DNA, 198 bp, Zea mays
  Clone ID: MRT4577_309C.1
agaatgttttgactgacgtcaaggaaacagcccaggggagcattgacctcggaggggcgtacggagcccctccggccctggcttcaccaagcctggggcactaggattcatagaatcttatgagcttaggagaacatcggtcccaaggatgaagacgtacaaggattataagccctaatacgcgatgatgccagatac

SEQ ID NO: 109107 - DNA, 575 bp, Zea mays
  Clone ID: MRT4577_30C.1
ccggccggggtccgtcccaccttcgcaagccagccacctccctgagaggcctgaccgtgatttcgacgtggcatccaaaggcggtcaagattcgagaggccggaggaaccaagcgtagggcctccgaccccacgtcgtcgtccgcgcgcgccgcccgccgccgcagggagatgggggccgattactacaaggtcctcggcgtcgaccgcggcgccagcgacgacgacctcaagaaggcctatcggaagctcgccatgcgatggcaccccgacaagaactccaccaataagaaggaggcagaaaccaagttcaaggagatctctgtggcatacgaggttgcctgcccctccctctcactctccatgtgtttgtcttgccaggattattactgttccaaattcctcgcctttggggcttcgatccatccgctgtccctgtctttgtggttcatgctgacgaacaaaactgcctgtctgttataccggccagctctttggacacagtagtgaattcgatactgcaatctggaccacgcaccaatactgcggaaaaaaaaaaaaaaaaaatttgcggcc

SEQ ID NO: 109108 - DNA, 577 bp, Zea mays
  Clone ID: MRT4577_31000C.1
gcgtcgactttttttttttttttttttttttctttcttttttttttagcatagcatgtcatgtacatgacgtttttttttactgtgaacctgaaaatcgacagtaatattttgttcaaaaaaaacaatggtcgcaagtaaccgcgcgagtatacaggttatcatcagaacagtagaaaaggggaagaacaaaaacaaggaaggagtaggctgtaaagcggcgtcacttgaaatcaaaactgtgtccaccatcccccctgcatctcagtttcgcttatttactacagtactgctagtaggagatgcaatggggatgatgcattgcataacgcgtggctctagcacatgtatatatatatatgagactgcatgcatagctcaatcgtcgtagtcggggcggcggcggcggccgttcttctcgtagcgcttcttcctgtcaccgtcatccgagccgccggcgtctttctttttgtaacggggcttcctggcgccgtcttcgtcagagtcatcgccgccgtcgctcacattcttcttcttccggccggagctgggcctctcgtccccgtcgacgcggccgc

SEQ ID NO: 109109 - DNA, 601 bp, Zea mays
  unsure (1)..(601): unsure at all n locations
  Clone ID: MRT4577_31001C.1
taagtactcctaattattttattagaatgggaatataaggagtaagttgcccgttgctctctaatacttnnnnnnnnnnnnnnnnnnnnnnnnnnnnnnnnnnggcttaatttggcggagatggtggcgtcgggcttgggccaggagcaggagcannnnnnnnnnnnnnnnnnnnnncaggcacaggtgggccaggcgcaggtgggccattattgatgaagcacttctcgcagcagtccttcaagcacgccgttttctttctgctatggtgcggatggccgaggcaggtggcgatggcgcactgcgggtaggtgatggccggcaggtccttgaagcacgcttcgttatggcagctgatgttcttgcactcgccggtgaccccggagaggaagtccgccagggcggaagcgccgttgtcgtggtggtggtggcagcccctggcgcatgacttgaagcactgccagggctgcgtcttgtcgnnnnnnnnnnnnnnnnnnnnnnnnnnnnnnnnnnnnnnnnnnnnnncggccaggagaacgccaaccgccctgcccgccatctagcttgggcggtggaccgagagaccagccagcctcgtgcc

SEQ ID NO: 109110 - DNA, 830 bp, Zea mays
  Clone ID: MRT4577_31002C.1
ccggccgggggcaaagccgcgggaacaccgcaacaaagccaacgagcccaacccggacgggtgagcgagcggctcgtgcggaggtacacagagacgcggaccgggtcgccggacgacgagacgcaccatggcaccgtcgcagctgcttggcagcaccgatctctggcggcccgttgccgccgcgcgcgggggcggctgggccacggccgccgtgctcctcctcctccttgcctctcacctcgcagtcctcctcgtccgcctccgccgccgcctccgcggcggaggccgaaacgcccatccggaggccgccgtggcacccgcgcctgcctccacgccccctggttccgcttccgcctcaggaatagagggattagtgacggagggcgatctgaggcagctggtaggcagtctgggcttgggcgcgcacgaaccagagagggagggctgggagcacgtcatctccaagagcagcgacgacgtctcctacaaggcctggtgcgacaagcccacggctggccctcctaaatatctgagtattacaacatacgagagatgctcggcagagcagctgagggacttctacatggataatgagtacagaatggagtgggataacactgtcaaaaaacatgagcagctgcagtatgacgagaacagtggggtggaggtagggcgaacaattaagaagtttccacttctaacaccaagagagtacatattggcatggcgagtctgggaagcaaacgacaagtctttctattgctttatcaaggaatcccaacaccctcttaacttacgacctagaaagcttattagagtgcaacttctaa

SEQ ID NO: 109111 - DNA, 803 bp, Zea mays
  Clone ID: MRT4577_31003C.1
cgggggccaagaaaaggcaggctacccttagagccttaattagtagatattgaaactggaatgagatggcaaatagctttggtgctgggtttatgttacaccccaactcaagagaaaatgtcacttcggttacagtcatgatatccttcttttttttcaagtaagtactcctaattattttattagaatgggaatataaggagtaagttgcccgttgctctctaatacttcatgcatgtgtaccaagagcatccatgcaacatgggcttaatttggcggagatggtggcgtcgggcttgggccaggagcaggagcaggcgggccaggagcaggcgggccaggcacaggtgggccaggcgcaggtgggccattattgatgaagcacttctcgcagcagtccttcaagcacgccgttttctttctgctatggtgcggatggccgaggcaggtggcgatggcgcactgcgggtaggtgatggccggcaggtccttgaagcacgcgttgtcatggcagctgttgttcttgcactcgcgggtgacggcggcggagaccttggcggcggccccggagaggaagtccgccacggcggcagcgccgttgtcgtggtcgtggtggtggtggtggcagcctctggagcatgacctgaagcactgccagggctgcgtcttgtcgtcgtcgtccgccgccctcgccgtcgccgccgcgaggagcgcggccacggccagtagaacgccgaccgccctgcgcgccatctagctggctggtctctcggtccaccgtccaagctagacggacgcgtggg

SEQ ID NO: 109112 - DNA, 767 bp, Zea mays
  Clone ID: MRT4577_31004C.1
ggtgctgggtttatgttacaccccaactcaagagaaaatgtcactgcggttacagtcatgagatccttcttttttttcaagtaagtactcctaagtattttattagtataggaatataaggagtaagttgcccgttgctctctaatacttcatgcatgtgtaccaagacatccatgcaacatgggcttaatttggcggagatggtggcgtcgggcttgggccaggagcaggcgggccaggcacaggcgggccaggcacaggtgggccaggcgcaggtgggccattggtgaagcacttctcgcagcagtccttcaagcacgccgttttctttctgctatagtatagtataatatcgcgtgctgctcctcgattgttttgatggggcgtttgaccgtgcacgtacggtgcggatggctgaggcaggtggcgatggcgcactgcgggtaggtgatggccggcaggtccttgaagcacgcgttgtcatggcagctgttgttcttgcactcgcgggtgacggcggcggagaccttggcggcggccccggagaggaagtccgccacggcagcagcgccgttgtcgtggtcgtggtcgtggtggtggtggcagcctctggagcatgacttgaagcactgccagggctgcggcttgtcgtcgtcgtccgccgccctcgccgtcgccgccgcgaggagcgcggccacggccagtagaacgccgaccgccctcgcgccatctagctggctggtatctcggtccaccgtccaagctag

SEQ ID NO: 109113 - DNA, 417 bp, Zea mays
  Clone ID: MRT4577_31005C.1
gtgaggttctccggggctcggggtcttgggtgagcggctcgtgcaggcggcgttcgatgttcagtaccgctgcttcgtcggctgcctcgcctgagccacggacgactactcagtacacaacgccttcagcacctacagcgaggttcttgagtccaatatcacctaaggcgtgagacgcacaggtcccgcggcttcggcttacggaccttctgcacgtaagaggcatatacgagatcgcactcgagggcatgaacgtataagagctggactgtcaccacattacggtcaacaaggcccactctcgccgtagccggggccgcggctgtatatgggtacgccaagtagccgaagaggccagcattaccggttcggatcacaccaatatcgctgtatgaccttcatgatgaagctgtaata

SEQ ID NO: 109114 - DNA, 360 bp, Zea mays
  Clone ID: MRT4577_31006C.1
ccgtcttctgcaactactgtcacaaaggcgcggaccaatgagtgaatgaccagcccggcggccggactctaacgataacacgccggcccggctcgacacgctcccaccattctgtctgcgtgcgccacgaccagccgccccagcagctgatgtcgaccccgtccgacctgctgctacactcccggattccgctttagacccgccacattatgattgaacgcgcgagcagattcaatcagggttgtagtctgctccctcgcgactaccgcggggcgcaactccttagcggcgatactgctattcgagggccctcggaaacacgcggaaggcggtttttctgccgagacggtgagcaaggcg

SEQ ID NO: 109115 - DNA, 1030 bp, Zea mays
  unsure (1)..(1030): unsure at all n locations
  Clone ID: MRT4577_31007C.1
attgggtacctcgaggccggccgggaggacacactaccgaaccaggcaaccagctgggaggaaccctagcggaacactgtgcaggtgacagcggcgcgctaccggtgacgggggatacggcggcatcgtccccctcggtccctcctccatcccccgcgcggcggcgccagcagccggcctgcagaaccatagcaacactttggtgcgcttaagatgtccatcctccgatcctttctcccaatagtagcaagatcaaatggttggagatgcttttctactgggattccttctgatatgatagcggatcttaataaggaaatggagtcagtatttggcgaacctccatcatccagtcctttgggctcaagtccgtccccccagcagccagtggaggattcaccactagtgcttacccatactgatagcagcggacaggccaatatgggtgacgtctctcccaaagaagacagtaagagagtcgctatagctagctgcagggttttgctaggccaaaaggggtccaatttggtggcatctaacgagaattccaaaggggatggcagctcctggccctgtttggatggagtatattaatttccgcaaacccacaacggtatacatgcccgataaagagtcgcaccgcatgactactgttcgtaaagtgtaccagaaggcaattttagttccaactaatcatgtagagcagttgtggaaggattacttgaacttcgaaaattctgttagccgcaccttggcaaaaggcttgatatatgaataccaaccaaagtttaacagtgctaaggctgtatatagagagcgaaaaaagtacattgatgatattgattggaatgtactggccaccccccctacaggctcgtacaaggaagagcaacagtgtatggcatggaaaagactcttggtattngaaaaggggaaccctcaaagaattgatgctacaacagctaataggcgtatcacctttacttatgagcaatgcctgatgtatctatatcatcatgctggatatatg

SEQ ID NO: 109116 - DNA, 861 bp, Zea mays
  unsure (1)..(861): unsure at all n locations
  Clone ID: MRT4577_31008C.1
tgggacctcgagccggcgggaaggtttaaactctctctncctctcgcgtctcgtcttggccactcaccccacccttgccccccccccctctctctctctctctctctgccacagtgcactgctcagtcggcagtcggcagtcgcagcgctgcggctgtggttcttcttgtcctgttccgccgcccgccagcccgaccgctgctactgctgggataaagaaaacagatggtggatggtggttgagatagaagaatacctcaataaagacaaacgaacccactaaagccagaaacaacagcagcataaaaaagaagatgatcataaggaaaaaaaaaaaaagagagacaaaataaaagcaaaccaccaaaaaagaaacaacaatatcaaaaaggaaaaagaacgaactaataaagaaaaaatagaaaaagaaaaaaaaccaaaaaagaaaaaagaaataaagcaaaaaaaagaaaatggaaagaaaaaacgaaaaaaacagaaacatgacccaacaagagaacatgaacaataaaaaaaacaaaaaaaaaaaagaccaataaaaaaataaccaaaaaacaaaaaaaacaaaaaaaaaataaaaaacaaaaaaaaaaaaagaaaaaaaaaaaagaaaaaaaataaaagaataacagataaaaaaaaacaaaaaaataaaatatatatattaaatttaaaataaataanaaaaaactgtaccntgaaaaaatataattaataaaaagaaataaatttaaataaaaaaaaaaaaaaaaaaaaaaaaaaaataaaaaaaaagaaaataaataataaatgaaaataataaaaaaaaaatgaaaagaaatagaaaaaaaaaaaagaaaa

SEQ ID NO: 109117 - DNA, 474 bp, Zea mays
  Clone ID: MRT4577_31009C.1
atccttatattgttttttttcaggtttactagagacagagacatagtgttcaataataagaggactaaaacgaagtccatccttagggttataaatttccgccagtggacttcaagttcaaccgctaaacaggctctattagtgcattacaacagtgtagtacaacattgcgtccacagaacacgggcgagcagactgggagtcactatcacaggctcttgtaagaaacggggggggacataacctaccggagggggaacttggcccacaaatggttgtttttaaacacctcgttcagatgggtgtgcttgcggagcttctttttgttcatgaggcccgggaacgcgaaaaggaagaagtcacctgccacggtctgcgtggaccatgttgtagatcttctagtggtagatctccttcgggtaattggttcacttcaccatgttgaacaagaaaacaggcgggatctggtacccg

SEQ ID NO: 109118 - DNA, 459 bp, Zea mays
  Clone ID: MRT4577_31010C.1
tgccgaaacaccaccacttatctacctacttcctctctcaagcccttacccggttcatacgacttcttcttgaatggcttacaaaaggacacatgcatgtcccttcgccctcataatgccagttcctgttgctcgccgacaccggcatgaccaacacctacccgctgctggatgacgccgtgcctaagaacgagtacatccacattgaaaagccacacttgaacgatgctgagctcccgacgtaccatactgtgacgcaagtccctaacactgatcacctacctccacttcacatactgccggagatgacaaatcccgatattgccaccgtactccgccactgcgaaattgcccaagtcaaacctacttcctcaccccatgatggatatatctgacgaatgcatatgtgacccttcatactctccatggcaaaactaacgatgacctaactttctcatc

SEQ ID NO: 109119 - DNA, 387 bp, Zea mays
  Clone ID: MRT4577_31011C.1
tcgcccacacatacacccacacattctttcacattatctcccaatcaaaaatcattagtgtctgcgtcatctatactactcctaccaacacctcctataacaacacttcttatcctcattttcttttcattttcattaaagatgccacttattactattcttatttacattcccaacacatacatcctacttctttctttttttactaccaaaactctttaccttctcccctaccactatcctatctttttttacaccttctccattacttcttatcatttttttatacattccaaattcaaacaacaaaccttattttttatttttattttccactcaataataattcattccttatattatacttcatccttccttttttacttt

SEQ ID NO: 109120 - DNA, 621 bp, Zea mays
  unsure (1)..(621): unsure at all n locations
  Clone ID: MRT4577_31012C.1
gnctagttctagatcgcgagcggccgctcgcgaaggttaaaaaagcgaggtggccatgttatgctggtggttaaggcncagggcctctccaaccactgtgccactgacttgctgtgtgaccctgggcaagtcacttaactataaggtgcctcagttttccttctgttaaaatggggataataatactgacctacctcaaagggcagttttgaggcatgactaatgctttttagaaagcattttgggatccttcagcacaggaattctcaagacctgagtattttttataataggaatgtccaccatgaacttgatacgtccgtgtgtcccagatgctgtcattagtctatatggttctccaagaaactgaatgaatccattggagaagcggtggataactagccagacaaaatttgagaatacataaacaacgcattgccacggaaacatacagaggatgccttttctgtgattgggtgggattttttccctttttatgtgggatatagtagttacttgtgacaagaataattntggaataatntctattaatatcaactctgaagctaattgtactaatctgagattgtgtttgttcataataaaagtgaagtgaatctg

SEQ ID NO: 109121 - DNA, 795 bp, Zea mays
  unsure (1)..(795): unsure at all n locations
  Clone ID: MRT4577_31013C.1
ggaaggcatgggcgcggtcatgccgagtgatggtgcgggtccccctctgctccgttttccaattagtgaaccagataggagtcttcttcctccccgaccacaccgctcctctccttccaagccctcgtcaccaccagcctgctctcattcctgtgccacctggatctcaactgcttgcgctcaacatgctccccacacactctcgctgcggcgtgtgcccgcccaacccgtgcatcgctctctgtcgcttccgcctcatcataggtgatggcgtcgtcgtccccgcagcagcacacgaggtcgcgggcagcaacttttgatagacaaccttgttggatatgatactatacctacaaacagcttggtgatttctcctggtcatggttatttatacaactttgagatgaaggagctaaatggtcttagttatggccatgaaacaccagaaggtcctacaaaatttggagctttggaagatggtgctacgattttcaagagctgctagccaacgccaatgcatctcgtttaagatcgtgcatgtgacctttcctctcctctcctgatgttaggccttcacaacttgtattatgtgcgggcagaaaaaatccactcttttatatagcaaccacctgctgttaagaccttttgactctatatcctaaggctgcaaactgtgttctctaagtatatgtgtaaccagcatcttttattggcccaaaaatgtatttgattccatgcctcaaccccttatggttgtttactttaaaaaaatananaaaaaaaaaaaaggcggcc

SEQ ID NO: 109122 - DNA, 850 bp, Zea mays
  unsure (1)..(850): unsure at all n locations
  Clone ID: MRT4577_31014C.1
cattgggtacctcgaggccggccgggaaagaattactcttcttcctccccgaccacaccgctcctctccttccaagccctcgtcaccaccagcctgctctcattcctgtgccacctggatctcaactgcttgcgctcaacatgctccccacacactctcgctgcggcgtgtgcccgcccaacccgtgcatcgctctctgtcgcttccgcctcatcataggtgatggcgtcgtcgtccccgcagcagcacacgaggtcggctcgtcctcgaacctcgcgcaatttaggaatagcggcggatccttcccaggtagacttggatgttgcggtccagcgaatgtcgggggtgtggaaggagatctccaccgctggagggctctccacgcccatcctccctcccccatccccgctgccagctctgacgctgacagtgccgcagagacgacgctggagtattgtattagtttgtttatcttttgttttgatctaggtcttaatttgccttgatatgtgcaaggcctgcagttgaatgcaatgcgagcaacagctcagttatgtgtgtgtgacgctgaagggatctatctctatgctcaagcataagaagcataattttgttattcattgaatgaagaactggctactctacccgttccaaattatatatacttcaagctgtacatgataatcaggtggcaaaagaatgtcaactcaattttttctatgttttctttttcagggggcagcaacttttgatagacaaccttgttggatatgatactatacctacaaacagcttggtgatttctcctggtcatgggtatttatacaactttgagatgaangagctaaat

SEQ ID NO: 109123 - DNA, 825 bp, Zea mays
  unsure (1)..(825): unsure at all n locations
  Clone ID: MRT4577_31015C.1
ggaaggcatgggcgcggtcatgccgagtgatggtgcgggtccccctctgctccgttttccaattagtgaaccagataggagtcttcttcctccccgaccacaccgctcctctccttccaagccctcgtcaccaccagcctgctctcattcttgtgccacctggatctcgccctgcttgcgctcaacatgctccccacacactctcgttgcggcgtgtgcccgcccaacccgcacatcgctctcagtcgcctccgcctcatcacaggtgatggcgtcgtcgtccccgcagtagcacaccgaggtcggctcgtcctcgaacctcgcgcaatttaggaatagcagcatcatatccatgaacatggacgacatcatctataacatctacgacctcgagaccgtcaacgctgccgccgccagcgtcagccccggcccggcggatccttcccaggtagatttggaggttgcggtccagcgaatgtcnggggtgtggaaggagatctccaccgctggagggctctccacgcccatcctccctcccccatccccgctgccagctctgacgctgacagtgccgcagagatgacgctggaggatttccttgccagggattcctgcgctagggcggtggtggatggaggggaacatggncgttggggttccctgatggtgatggagatgtggcagggagcgtgttggggggggagtggncgacatgaggagatgcaggaagcgagcccttctggatcccacggaccgcgccgtcatgcaatggtaagagctcatgatcaagaaacgagagttcgcaacgatgtccagggacaggaa

SEQ ID NO: 109124 - DNA, 226 bp, Zea mays
  unsure (1)..(226): unsure at all n locations
  Clone ID: MRT4577_31016C.1
gacannctatagaagaagctatagacagtcgcatagcacagcgtaccgtaatgctcagagaattcaggcttcgaggagcaggatgccacatccacatccacatccatcccttaggtccaggcatctagcatctatgctatccagtaggagaccgaagatggcgatcggcgccggtgagctgcatggttagccgccataggcaggtgagcagctgctaggcgagagt

SEQ ID NO: 109125 - DNA, 148 bp, Zea mays
  Clone ID: MRT4577_31017C.1
tatgaatagacacttggactgcacgcactagggatgttcgacatggtgctgcgcgcgcacaaatgtgtgttgcagagtgagccagccatatatgcacatgccgtatgttaagaaaccggaatggatcctgccgtcagccttacaccta

SEQ ID NO: 109126 - DNA, 448 bp, Zea mays
  Clone ID: MRT4577_31018C.1
ttttttttttttttttttttttttttttttttgtttttttttttttttttgttgttttttttttttttttttttgggaatcacgaaaacaaccctttttcatggaagggtttcacagaagatttatccatacatggttgctcattgggggggacccagttgcccacctaggggtgggtgtatacagatgggctaaggggggggcaacaaaggaacacatgtttatgggccacatttttggtactaaaagccggggtggggtggtaaccaaacgacaaccccgattttgcaaccccctaaaaagaaaaaactcagaagcaaattgccccccgaaacccggtttactaataaagcactccatttttttcctggatgggatccaactttctccaagaagacaagattagcccgcttgcagtccttaaaaaaggggatggatttttgccatt

SEQ ID NO: 109127 - DNA, 387 bp, Zea mays
  Clone ID: MRT4577_31019C.1
attatgcgcattcagaaacacacttagcgacgcacattgccaacaacctgacagcgaatggttaccaagatattatccctccttgcgcttcttgcgcgtcttgcgagcgcaacaaaggcgttcattattgcacaatgctcacttgctccaagattcattattacacagatccttccaccagttacttcaatgggctctgaacacccagctgtgcatgcctataggctacaacacgcaattgcggtgggcgtcgtacaacaaccaatttaccagctgcaacaacaatcgttggcacatttaacagtacataccatcgtaacgcaacagctacaacaattgctaccagcactgatccaactagccatggagaaccctgccgtctacttg

SEQ ID NO: 109128 - DNA, 306 bp, Zea mays
  Clone ID: MRT4577_31020C.1
gagacagtcaagagacgcatgaaaccggatcttcagtgtacccagttagaagaacctaaacaggatagcctctcacgacatatcatgaaactacagacactacgcttgaggactggcagttccaaacttcttccttctaatccccagaggacacggttccactttaccatagcaagtaaactcatttccatgggggaaagctcgggaagcccgaatgggtcttggtgccaaaagagcctgtggcgaatggtgggcattgctgtgcacccagggattatgaacctcataaacggactggtggtaatt

SEQ ID NO: 109129 - DNA, 170 bp, Zea mays
  Clone ID: MRT4577_31021C.1
aggccacgcgtccaaccaagcatacatttgtaatacttcatagaacgccaagtcaatcaccggataggaccttttgaactacatgccaactcattatacagatcccaaaacggatatgacaaatttaatgggcgttacacataagcacattgatgtacatgccaagaaat

SEQ ID NO: 109130 - DNA, 245 bp, Zea mays
  Clone ID: MRT4577_31022C.1
cacagctttttttttttttttttttttttttttttttttttttttttggacaaaacaccaatatgtattggtgggattaagtcaagtctttgcgcgatcataaaataaaactggttcgaaaaacgaagtacattttctggaactcaatggaaaaacggggaaaaattcagtaacaaaacccaaaaacttcaagcgaaatactggctggtgcgctgaaaaacattaggcagctttgggaagctccc

SEQ ID NO: 109131 - DNA, 4884 bp, Zea mays
  Clone ID: MRT4577_31023C.1
atgccgccccgcacaaggctaacggcacgcaagtcaacgggaccaattggagtgcctcggcatcaactggcccctcgacatgaaagcagtagcagtggaagtaatgactccataggagatcttgaagcccgagtgagtcgacttcaagcagcgctgcaacacaggaccgatgcttgggtcgcagacgaagatagaatcaatgaactaagaagggacatccgtcacctgcaggatcagcttgctgatcgagacttagcacttgactgggcagtacagtctcgtttgctggcatgtgctaaggaagcaagggctcaggcccaaattaaagaacttagctcaactgtcgacaaccttaatgtaaaatggaaggtttctctggcacattatgtttacttcaaatgttatttgccacagatgtcgaccaggactcgaggacaggacgcagcaggaacttctgggggaagggatgttaccccaaacccacctccggttcctcccacattagccgaggcgattgccgccttggtgaatgccaccgcagacaatacccgcttccttagggaaaaggcgggtcaacagcaattccagcagcaggcaggaaggggttatcagcaaggcccccgtgaaaccacctatctggacttctctgaaacccatccacccctattcatcaaagctgaagatccattagaagctgatgagtggatacgggttattgaacaaaagtttggtcttctccgttgttcagaaacgcagaagccgttgttcgcagcacagcaactacgtggtcctgccagtacttggtggggaaattttgtggctactcaacctgtcaaccatcaagtcacctgggaagagtttaaagcagccttccgtgagcactacatacccgaaggagtgctgcatatgaaacaagaggaatttatgaagttaaaacaaggaggagataccgtcaatcagtatctcaacaagtttaatcacctgtcgcagtatgccatcgaccaggtgaatactgatttaaagaagaagaactgttttatgcggggtttaaatgatcggctacagaggaaaatggctgcctgtattgacttgacgtatggaaaggctgtcagcacagccttatctgttgaagcaaaatacgcaagttctgggaaaaacaagggattcggtggtgagaggcctaatcagggccaggcgaagaagcaacagtttgtgatccggccttcaagccaaaatcacactttttctcgtccacccttattccctttcaaacagccaatcattattcgccccaacaatacccccactactccaaatcagccgggtgccccaggcactcgattccctgccttgcctagttcttcaactgggtgttttaattgcggcaagtcgggacatttcatcaaagactgcccatatcctaagcaaaatcaatcaaatgctccgcaaggatctgggagatcagctcaacccaaaggaaatattgtggggaaaaatacaaagaagacggggcgtgtatattacacccaagtggccactacaccggaaggagagccggtgatgatgggtacgtttcccgtggccagtcaccctgcaattattctttttgattctggtgcttcgcatacattcattagcaagaaatttgtggagcaacatcatattgcatgccatgaatcaaaagagggatttaaaattcattcacctgggggacacatttttactagagaagtggcctatgaagtgccagtaacaatggccggacgaaactttcctgctaacatgattgttctgaaaggccaggatatagatgtaattttgggtatgaattggttaacccaacacaaggcaattctcaacactgaactcagaaccgtcaggttgagctataatcaagaagagattcttttgtctctccccgtaaccaatccagccaaagcttctggtagaatatatgaagccattgtaccggagatcaagaacattccggtagtatgtgagtttccagatgtatttccggaagatttgcctggactgccccctgaaagagatgtagaatgtgtaattgagctaaagcccggtacgactcccatctcccgaagatcgtaccgtatgccccctaatgagttggcggaattgaagattcaattacaagatctactgaataagggattcatccggccaagctcgtccccatggggttgtcccgccatttttgttaagaagaaggataaaaccttgcgaatgtgcgtggattatcgacccctgaatgaggtcaccatcaagaataagtaccctcttccaaggatcgacatcttatttgatcaactgactggggcgagggtattttccaaaattgatctcaggtcgggctatcatcaaatccgtattcggcccaaggatataccgaagaccgcgtttactacgcggtacggattgtttgaatacctgataatgtctttcgggctcaccaatgctcctgcccacttcacctatttgatgaactcagtgttcatgcccgagttggacaagttcatggtagtcttcattgacgatatcttgatatattctaaaaatgaagaggaccatgctcagcatctacggattgtattgacgcacctgagggaacatcagctatatgccaagttcagcaagtgcgcgttctggctggaggaaattcaatttttggggcacgtgttatcggctaaaggaattgcagtagatcctagcaaggtcaaagatattctggagtggaaacccccaaccactgttcaccaagtccggagttttcttggactagctggatattatcgcagattcataccagatttttctaagcttgtgaagccaatcacaagtttattgaagaatgacattaagttcaattggtcttctaagtgtaatgaagcctttgagcaattgaaggcattattaaccactgctccggtattggctcaaccggacatcactaagccttttgatgtatattgtgatgcatctggcagtgggctcggctgtgtactaatgcaagagggccgaataattgcgtatgcttcaaggcagttgcgccgacatgaggagcattacccaactcatgatctggagctagctgctgtggttcatgccctaaaaatttggcgtcactatctgctgggaaatatctgtcacatatatacagatcataaaagtttgaagtacattttcacccagtcagaattaaatatgaggcaaagacgatggcttgagcttattaaagactatgaactggagatccattatcacccaggcaaagccaatgtggtggcagatgcactgagccgtaagacttcctgccactgtcttatggtgaagacctccgagaacactttgtgtcaagagatggagaagctaaacctggggataatccaacaagggactctaaatcagctaaagcttgagtcaatcattttgcaaaggataattgatgctcaaaaggataatctgggtatgaagcacatacgagaaaagataagggctggagtagccaaatgtttcaaggaagacgatcaaggtgtgatatggtttaaaaaccgcatagtagtgccaaagaacgaagaactccgccagcaaattcttgatgaagcacatcttagtcgttattctattcatcccggaagcactaagatgtatcaagacttaaagcaacattactggtggacaaagatgaagattgaaattgcacgctatgtggctaagtgtgacacttgtagacgtgtcaaggccatacacatgaaaactgctggtccattacaatctttgccaatcccaacaaggaaatgggaagacataagtatggactttattgtgggactgcccaggacggccaaagggtatgattctatttgggttatcgttgatcgactcacaaagattgcccacttcttacccgtcagggccaaatatacagtagccacttatgcagcattatatatcggccgtattatcagtttgcatggtattccaaagaccatagtgtcggatcgtggacctcagttcgtatccaagttttgggaagaacttcataaatccttgggtaccaaattgctccacagttcggcctatcatcctcaaacaagtggacagactgagagggtaaatcagatactcgaggatatgctgcgggcatgtgttctggacttctcacagaaatgggatgaatgtttgcccctagcggagttttcatacaataacagttatcaagaaagtatcaagatggcaccttttgaagctttatatgggcgacggtgtcgaactccgctaaattggtctgaacctggagaaagatacttctttaggcctgatatggtgaaagaggtcgaagaaaaggttcataaaattattcataatatgaagaaagctcagactcgacaaaagagttatgcggaccgacgacgacaacccttatgctttctggtaggcgattatgtctacctgaaagtttcaccaatgaagggtgtatcgcgtttcggggttaaagggaagcttgcacccaggtacattggtccattcctggtgattgagcaatgtggaccagtggcgtaccgacttcaactacccgaaacattgtctgctgtgcataatgtgttccacgtgtcacaattgaagaagtgtcttcgggttcccgatcgaaccattgaagtaacagatgttgtccttgaaccagacttgacatactctaagcaccctatacgagtcttggatcaaaaggacagggttacccggagaaaaactctcaagttttataagatacagtggaaccagcattctgaagatgaagctacttgggaaactcaagacttcttgaataagaatttcccaggctttctagcctcatgtaatttgtaa

SEQ ID NO: 109132 - DNA, 332 bp, Zea mays
  Clone ID: MRT4577_31024C.1
accaacgtacgaccacgcgtacgctcctcgacagcagcagacgaaggttacacgggcgggaggcctagtagatccagcctaacctgcacccatgtgcgacatggacaatctcatgatctgtgtccttaatgaacccgactggccgtccttctgcactcatcgctacaggcaaaaccttgctttcaccaaacttactggccttgctggatatatggcttaccccagatcacgttactccaactatgctcgatcctatcgccgttcgtatcacctgcgcaacctagttgtgaactgggactggccttttatgccaacgttaacccacattgtct

SEQ ID NO: 109133 - DNA, 1056 bp, Zea mays
  Clone ID: MRT4577_31025C.1
atgaaaatcgaaattgcacgctatgtggcgaagtgtgacacttgcagacgtgtcaaggccatacacatgaaaactgctggtccattacaatctttgccaatcccaacatggaaatgggaagacatcagtatggactttattgtgggactgcccaggacagccaaagggtatgattctatttgggttatcgttgatcgactcacaaagattgcccacttcttacctgttaaggtcacatatacagtagccacttatgcagcattatacattgcccgtattctcagtctgcatggtgttccgaagaccattgtgtcggatcgtggacctcaatttgtagccaagttctgggaagcacttcgcaactccttgggtactaaattactccacagttcggcttatcatcctcaaaccagtgggcagactgagagggtgaaccaaatacttgaagatatgctgcgggcatgtgtcctggacttctcaccaaaatgggatgaatgtttgcccctagcggagttttcatacaataacagttatcaagaaagtatcaagatggcaccttttgaagctttatatggacgacggtgtcgaactccgctaaattggtctgaacttggagaaagatacttctttagacctgatatggtgaaagaggtcgaagaaaagggtgtatcgcgtttcggggtaaaagggaaacttgcacccagatacattggtccattcttggtgcttgagcaatgtggaccagtggcataccgacttcagctccccgaaacattgtctgctgtgcataatgtgttccacgtgtcacaattgaagaagtgtcttcgggttcccgatcgaaccgttgaagtgactgatgttgtcctggaaccagatttaacatactcggagcatcctattcgagttctggatcaaaaggacagggtcacccgaagaaagactctcaagttctacaagatacagtggaaccagcattcggaagatgaggctacatgggaaacccaagactttttagataagaatttcccaggctttctagcctcatgtaaattgtaa

SEQ ID NO: 109134 - DNA, 595 bp, Zea mays
  Clone ID: MRT4577_31026C.1
ggatttgatatttacatgagcggagccggggttttttttgcacgtcgtggtcacgtggaggacttgatgccgtcgtggtcacggcgtgagcggtggtcgatgatttcttagcagcaggcttctcccgtgtctggagcttgatgtcgtcgccgacctcgagaaggagtagggtggactcctcatcctaagccacatgaacctgctcttctgccttcggcttgctacgactacgacactctcgtgccagtggcctaccttgccacacgtcgtcgccgcggtttgacgaagatcccgagccatctcgtgcgctcgtatttccgccaccgcgaggcctcctccctcggccaccacgatgtcgcccgcgatacctagttccatcggaaccgcgcgagcctgagcccgagccctcctgcttcttctgcttgtagtagctcttaagccactactccgcacaccctgtataattgatttctgaccctcctgaaacgaaaaacgaaaatgatgcatgaggattgcaaatttgcagtgctccctcacgccatcttgcttaaccccgggaaagcaaattcatcaatggacaggccatccagataaa

SEQ ID NO: 109135 - DNA, 1174 bp, Zea mays
  Clone ID: MRT4577_31027C.1
ctaacccttctccacattgtcggtccagctagaatcgcgcaccgacaggcggccccacctgtccacgcgtcgccgctcacttctgcgtggttgtcgcagaacctcccaagttattaggcccacatgcacatgtccttgtctcaaagacctcagacggctatgcatgtgcaccaaacaacttaacaggatctgtccgagtgccccgaggacctcggataaacgacttaccaccaagatcgcaggattaagtaaacacaactcacatacaaacacttgcagcggaaataaactccatgatgaggcattaggccagttaaagggtcctagatcagtaggacaacaatcagaacggtccttaatcgacacagacgggcgacctttcctgctcagcgtctggtctagatttattccaaccattttcccatttttggtacccggcaggggtactcttttccgaatgatgaacccacggggcttgcctgggataaacactaagtcagtgttgttagatgatactcgcttggcgagcacctcccattccagcacgatcagatcatttagctttgggttcattcatcagtcccatcttgagattattccagttgttgtcctccacattacgtgatcaatgaacgtacctatgtgatatgcaagatgcacatgaatgagcacgagtatgaatagcacgagctagataatgctactcgaagtagattaagcacttaaagcaagacatttcaactttacttagatgcttttgactttacacaaacatgacctttaagtcaaatggaccaaaaccaaacatctagtaacatgttttacttgggttctatattctcctaggattaagcattcatcgaaaaactaataaccttaggtttgtcactaacagacacctagaataaaatatggatagaagcaatctattgactttctaaaccaccatgtccaaatgacttgaatcatacaatagctaagacatcacaattgtgagttagtaggcaaagcatccatcacatacatattcactcaaacaactaaatcatcacagtaacctcgacaccacttccctgcaaaatattcaaaatactaacttagcactctacacataattggcatttcaacctaaactcctcatgcacatctagtatccacacaaaagaaactccaa

SEQ ID NO: 109136 - DNA, 2841 bp, Zea mays
  Clone ID: MRT4577_31028C.1
atggccacatgcatagatctcacgtatggaaaggctgtcagcacagccttatctgttgaagcaaaatacgcaagttctgggaagaataagggattcggtggtgagaggccaaatcagggccaggcgaagaagcaacgatttgtgatccggccttcaagccaaaatcgcactttttctcgtccaccctcattccccttcaaacagccaatcattattcgccccaacaatacccccactaccccaaatcagccgggtgccccaggcactcgattccctgccttgcctagttcttcaactgggtgttttaattgcggcaagtcgggacatttcatcaaagattgcccatatcctaggcaaaatcaatcaaatgctccgcaaggatctaggagatcagctcagcccaaaggaaatgctgtggggaaaaatacaaagaagacggggcgtgtatattacacccaagtggccactacaccggaaggagagccggttatgatgggtacgtttcccgtggccagtcacccagcaattattctttttgattctggtgcttcgcatacattcattagcaagaaatttgtggagcaacatcaccttgcatgccatgaatcaaaagagggatttaaaattcattcacctgggggacacatttttactagagaagtggcctatgaagtgccagtaacaatggctggacagaactttcctgctaacatgattgttctgaaaggccaggatatagatgtaattttgggtatgaattggttaacccaacacaaggcaattctcaacactaaactcagaaccgtcaggttgagctataatcaagaagagattcttttgtctctccccgcaaccaatccagccaaaacttctggtagagtatatgaagccattgtaccggagatcaagaacattccggtagtatgtgagtttccagatgtatttccggaagatttgcctggactgccccctgaaagagatgtagaattcgtaattgagctaaagcccggtacggctcccatctcccgaagatcgtaccgtatgccccctaatgagttggcagaattgaagattcaattacaagatctactgaataagggattcatccggccaagctcgtccccatggggttgccccgccatttttgttaagaagaaggatcaaaccttgcgaatgtgcgtggattatcgacccctgaatgaggtcaccatcaagaataagtaccctcttccaaggatcgacatcttatttgatcaactgactggggcgagggtattttccaaaattgatctcaggtcgggctatcatcaaatccgtattcggcccgaggatataccgaagaccgcgtttactacgcggtatggattgtttgaatatctagtaatgtctttcgggctcacaaatgctcctgcccacttcacctatttgatgaactcggtgttcatgcccgagttggacaagttcgtggtggtctgcatcgacgatattttgatatattctaaaaatgaagaggaccatgctcagcatctacggattgtattgacgcgcctgagggaacatcaactgtatgccaagttcagcaagtgcgcgttctggctggaggaaattcaatttttggggcacgtgttatcggctaaaggaattgcggtagatcctagcaaggtcaaagatatcctggagtggaaacccccaaccactgttcaccaagtccggagttttcttggactagctgggtattatcgcagattcataccagatttttctaagcttgtgaagccaatcacaagtttattgaagaatgacattaagttcaattggtcttctaagtgtaatgaagcctttgagcaattgaagacactattgacgactgctccggtattagctcaaccggacatcactaagccttttgatgtatattgtgatgcatctggcagtgggctcggctgtgtactgatgcaagagggccgagtaattgcgtatgcttcaaggcagttgcgccgacatgaggagcattacccaactcatgatctggagctagctgctgtggttcatgccctgaagatttggcgtcactatctgctgggaaatatctgtcacatatatacagatcataaaagtttgaagtacatcttcacccagtcagaattaaatatgaggcaaagacgatggcttgagcttattaaagactatgaactggagatccattatcacccaggcaaagccaatgtggtagcagatgcactgagtcgtaagacttcctgccactgtcttatggtgaagacctccgagaacactttgtgtcaagagatggaaaagctaaacctggggataatccaacaagggactctaaatcagctaaagcttgagtcaatcattttgcaaagaataattgatgctcaaaaggataatctgggcgattatgtctacttgaaagtttcaccaatgaagggtgtatcgcgtttcggggttaaagggaaaattgcacccaggtacattggtccattcctggtgcttgagcaatgtggaccaatggcataccgtctccaactacccgaaacattgtctgctgtgcataatgtgttccacgtgtcacaattgaagaagtgtcttcgggttctcgatcgaaccgttgaagtgacagatgttgtccttaaaccagacttgacatactctgagcaccctatacgagtcttggatcaaaaggacagggttacccggagaaaaactctcaagttttataagatacagtggaaccaacattctgaagatgaggctacatgggaaactcaagactttttagataagaatttcccaggctttctagcctcatgtaaattgtaa

SEQ ID NO: 109137 - DNA, 885 bp, Zea mays
  unsure (1)..(885): unsure at all n locations
  Clone ID: MRT4577_31029C.1
cattgggtacctcgaggccggccggngccgggataattttaaacaaggaagggaaacacaaaaggtggaagggaaaagggtttgatttccccactcctgtagtgccgccgccgtgttccggtgatccgccatccgcctccgttcgccgtcccccgcttgtcccgttagtggttttcgtccttctggttcactcgccggcggactacatgctgatcgacgggatgaggtccgtggtcgccacggtgagcggttaccacggcgacgagcggcataggcttgtaaacctcattgcggagaccggtgctagctacgtaggatcaatgagcagatccatcacccacctggtgtgctggaggctcgaggggaagaagtacgacatcgcgaggaggctggggacacgcgttgtgagccactggtggttcacggagtgtctcagggaggggaggcgcctcccagaggacccgtactttatggtaagtggtgaagaagcagggccagtcccagagctgccttctcgttcccgtaaacaagtcaagaaaaatgccatcatggaggacagagttttccaagagttacctgatgatttctgggacactcctcgagctagagccagctataaagttaagcttgatgattctgattctgattttgagtctgccctgctagaacaaaaaaatcattcaccagacgttaagaaaaggagaaagcgtatgaagcatgtcaatacatcaacggacagagatgtcttaacctgcaggataatgtgtcatgtgtcatggcaagacagtgccttcttttctccagtcatagaacgtcccagagcacattcaagcattaggggaaacttgtcacacttgctttcacatgaagttcctatccggatgg

SEQ ID NO: 109138 - DNA, 532 bp, Zea mays
  unsure (1)..(532): unsure at all n locations
  Clone ID: MRT4577_3102C.1
cctcgaggccggccgggaagaaccggagcgagatatttacatttcagtccctgcgaagagaaaccgtcgcgtcctcgccgcgccgctcgcgtcgggatcccgccgccgccctactcggtcgaccatggggacggcgacgatggcgactgcggtgggcgcggccatgctgctctacttcgtgctgagccggcggctggcgggcgaggacgtctcagcccgcggggggagggggaggagtcgggtctggaaagcggcggagggggcgcgcgctgcggcggccggggcagccgccggcgacgnggatcgaggcggngggcacgctcgcggaaacgctgcgnntcacctactcggagacgctcggcaaggggnccatcggggacctccccttcggaatcaagtacctcatgcgccgacagggcaatttaaatgttgccagtgtatatgctggaagtgattgcattgaattgaaaggacctcaaatcatggaaaaantgattgttttaacgggggtgaatgaactggggctttcttt

SEQ ID NO: 109139 - DNA, 4530 bp, Zea mays
  Clone ID: MRT4577_31030C.1
atgccgccacgtaccaggctaacggcccgcaagtccacgggaccaattggggtgcctcggcatcaattggctccccgacatgaaagcagcagcagtggaagtaacgaccccatcggagaccttgaagctcgtgtgagtcgacttcaggcagcactgcattataggactgatgcttgggtcgctgacggtgatagaatcaacgaactacgaagggacatccgacacttgcaggatcaactcgctgatcgagacttagcacttgactgggccgtacagtctcgtttgctaatgtgtgctaaggaagcaagggctcaggcccgagttaaagaacttagctcgactgttgataacctgcagatttactgcaatactttgcacgaggaagtccatatattatactcacaactacacccaagtgagcctgcacaacctgctgaggcggaagctggaccatctcacgttgcgggacgtgcgctgggtggggagttagacctttttgagcccccttcttctttgagtaatgtaaaatggaaggttttctctggcacattgtgtttacttcaaatgtttttgccacagatgccgaccaggactcgaggacaggatgcagcaggaacttctgggggacgggatgttaccccaaacccacctccagttcctcccacgttagccgaggcgatcgccgccttggtgaatgccaccgccgataatacccgcttccttagggaaatggcgggtcagcaacaattccagcagcaggcgggaagaggttatccgcagggtccccgtgagaccacttatctggatttctcggaaactcgtccacctctattcgtcaaggcagaagatcccctagaagctgacgagtggattcgggttatcgagcaaaaatttggtcttctccgttgctcagagacgcaaaagccgttgttcgccgcacaacaacttcgtggtcctgccagtacctggtggggaaatttcgtggctatccaaccagtcaaccatcaagtcacctgggatgagtttaaagcagccttccgtgaacactacatccccgaaggagtgctgtatatgaaacaagaggagtttatgaagttacaacaaggtggagataccgtcaaccaatatctcaacaaattcaatcacctgtcgcagtatgccctcgaccaggtgaatacggatttaaagaagaagaactgttttatgcggggtctgaatgatcggctacaaaggaaaatggccacatgcatagatctcacatatggaaaggctgtcagcacagccttatctgttgaagccaagtacacaaattctggaaagaataagggattcggtggtgagaggcctaatcagggccaggcgaagaaaccagcgcctaaaggaaatgctatggggaagaatgtgaagaaaacggggcatgtgtattatactcaagtggctactacaccggaaggagagccggtgatgatgggtacgtttcccgtggccagtcacccagcaattattctttttgattctggtgcttcacatacattcattagcaagaagtttgtggaacaatatcatattgcataccatgaatcaaaggagggatttaaaattcattcacctgggggacacatttatactaaagaagtggcctatggagtgccagtaacaatggccggacggaactttcctgctaacatgattgttctgaaaggccaggatatagatgtaatcttgggtatgaattggttaacccaacacaaggcaatcctcaacactgaactcagaaccgtcaggttgagctataaccaagaagagattcttttgactctccctgcaaccaatccagccaaagcttctggtagagtctatgaagccattatactggagatcaagaacattccggtagtatgtgagtttccagatgtatttccggaagatttgcctggactgccccctgaaagagatgtagaattcgtaattgagctaaagcccggtacggctcctatctcccgaagatcgtaccgcatgccccctaatgaattggcggaactaaagattcaattacaagatctactgaataagggatttatccggccaagctcgtccccttggggttgtcccgccatttttgttaagaagaaggatcaaaccttgagaatgtgcgtggattatcgacccctaaatgaggtcactatcaagaataagtaccctcttccaaggatcgatatcttatttgatcaactgactggggcaagggtatttccaaaattgatctcaggtcgggctatcatcaaatccgtattcggcccgaggatataccaaagaccgcgttcactacgcgtgttcatgcctgaattggacaagttcgtggtagtcttcatcgacgatatcttgatatattctaagaatgaagaggaccacgctcagcatctacggattgtattgacgcgcctcagggaacaccagctatatgccaagttcaatttttctaagcttgtgaagccaatcacaagtttgttaaagaatgacattaagttcaattggtcttctaagtgcaatgaagcctttgagcaattgaagacactattgaccactgctccggtattagctcaaccggacatcactaaaccttttgatgtatattgtgatgcatctggcagtgggctcggctgtgtactgatgcaagagggccgagtgattgtgtatgcttcaaggcagttgcgccgacatgaggagcactatccaactcatgatctggagctagctgctgtggttcatgccctaaagatttggtgtcactatctgctgggtaatatctgtcacatatatacagatcataaaagtctgaagtacatctttacccagtcagagttaaatatgagacaaagacgatggcttgagctcatcaaggactatgaactggagatccattatcacccaggcaaggccaatgtggtggcagatgcattgagtcgtaagacttcctgccactgtcttatggcaaagacctccgagaacactttgtgtcaagaaatggaaaagctaaacctggggatcattcaacaagggactctaaatcagttaaggcttgagtcaatcattttgcaaagaataattgatgctcaaaaggataatctgggtatgaagcacatacgagaaaagataagggctggaacagccaagtgtttcaaagaagacgatcaaggtgtgatatggtttaaaaaccgcatagttgtgccaaagaacgaagagctccgccagcaaattctggatgaagcacatcttagtcgctactctattcatcccggaagcactaagatgtaccaagatttaaagcaacattactggtggacaaaaatgaagattgaaattgcacgctatgtggctaagtgtgacacctgcagacgtgtcaaggccatacacatgaaaactgctggtccattacaatctttgccaatcccaacatggaaatgggaagacatcagcatggacttcattgtgggattgcccagaaccgcaaaaggctttgactccatctgggttatcatcgatcgacttacaaagatcgcccactttcttccggtcaaggtaaaatatcacgtcaatgtctatgctgagttgtacatcgcccgtattctcagtttgcatggtatcccaaagactatagtgtcggatcgtggaccacaatttgtatctaaattctgggaagaacttcataaattcctgggtactaaactgctccacagttcgacctatcatcctcaaaccagtggacaaactgagagagtgaaccaaatacttgaagatatgctacgggcatgtgtcctggatttctcactaaaatgggacgaatgtttacctttagcggagttttcatacaataatagttatcaagaaagtatcaagatggcaccctttgaagctttatatggacgacggtgtcggactccgctaaattggtctgaacctggagaaagatacttctttagacctgatatggtggaagaggttgaggaaaaggttcagagaattatccataatatgaagaaagctcaagcacggcaaaagagttatgcagacagacggcgaatgcccttatatttcctggaaggagactatgtctacttgaaggtctcaccaatgaagggcgtatcgcgtttcggagttaaaggaaaacttgcaccacgatatattggtccttttcttattctggaaagatatgggccagtggcgtatcgacttcagctccccgaaacattgtctgctgtgcacaatgtgttccacgtgtcacaattgaagaagtgtcttcgggttcctgatcgaaccgttgaagtgactgatgttgtcctggaaccagatttaacatactcggaacatcctattcgagttctggatcaaaaggacagggtcacccgaagaaagactctcaagttctacaagatacagtggaaccagcattcggaagttgaggctacatgggaaacccaagactttttaaataagaatttcccaggcttcctagcctcatgtaaattgtaa

SEQ ID NO: 109140 - DNA, 750 bp, Zea mays
  unsure (1)..(750): unsure at all n locations
  Clone ID: MRT4577_31031C.1
cggccgctcgaggccnnggccgggcccggaaattacaaaaaaaaaaaaaagaggcggttcttgtctcatctctgctgctccccgatatactttgccagttgccacgcaccgattccgcgcccccgataaggaattctggttgttgggcttgcggtgcagttcctcaagaatcaagattcctaatttgggctgcgtgcaaagatggcgtccagcgccggtgatctgcccgaggtgaaattcaagaggaccgggagcctggggagcagcgactacgtgcgagcagacaagatcgacctcaccagcctcgacatccagctagagcagcagctcaacaagaaatggggcaagaccaacatcaagccccagggacccaaggcggactgggagattgaccttgctaagctggagatccggcatgtcatcgcccagggcacgtatggaaccgtctaccgcggcacctatgatggccagcaggtcgcagtgaagctgttggattggggagaagatggttttgccacagaagccgaaactactgctttgcgaacatcatttaagcaggaggttgctgtttggcataagctcagccatcctaacgttacaaggtttattggtgcgtctatggggaccaccgacctcaagataccggtcaatgacaacggcgcgcgtgccaacttgccagctagagcatgttgtgttgtggcagagtatctcgctggaagcactttgaaacagtatctgataaagacagac

SEQ ID NO: 109141 - DNA, 509 bp, Zea mays
  Clone ID: MRT4577_31032C.1
cccattcgtcctattggtttcttgcggcgagagtttctagtattttcttttcctccagacatgattcttcactgaaggtgtatgtgatatgttatgaaggaaataactccattttttctagacagaagcgaaagggttccaacgcattaaataccatatagttgttttttttggaggaaatggtactaaaaagaaaaaaagatggctaatatggatactgatttgatggttaactgtaaaaccagtttttttcttcttgtttggtgcttgactccacatttattcccagtcagatgctctgatgtattgtattgcaaagttatctaaattcctatctaatttaaccgaggcccaatagttcatacatttaattgccacactagttaggaaagcagtgacataaagtaagattttctggtttggtcggttgttcctgttgctgctctaaaaaaagggggaagaccagggatctggggaagggataaaccaaagttgctctaaagcagatt

SEQ ID NO: 109142 - DNA, 1806 bp, Zea mays
  Clone ID: MRT4577_31033C.1
ggccgcttttttttttttttttttgcgataaaaaaaactcacatcgaccctcagtaatcaatgttagagtatagacatcaaatggaacttggcagttacatctcagtaatcaaatggtgttcatgccttctgatacaatttcctccaacaattaaggtttgacatgagtaccataactggggctaacgataccggtgaaacagcatacgcaggtctctgcagtgcatgcatgtccaaggagtcagcggaggatcaaggcagtacgagtgtacccactgtgatctgcagacgtggcagcttagaagaagctcctcgggctcacggaagtgacactggtagcatgctccttgcccagacgttggtcgagagaaatcgtagcctacattgcccggcacaaaaacatcagtagaagcttcacagggaatggtctgcgagtatatcttctgatctgaggtgcctgcctcgtccaccttactgatccatgtgaaactggctttgcaaaggggacatgttgagactttacccctagaagccagacaatccacccatccttgaatgcatgaataacagaatcgatgtccacatggtaagatgccccttgtagaagaaaaatctgtccagcatatgacacatgataattccggttgcctttccatattagatgatttttccatgggtttgttatcagctagagtgccaaggctacatttatctacttgctcctgagtacagaaagctggttcctgtcctgacaaatcaaatggaagtaagcttcttgaagtctcccttaattcaacgttgtctagttttgttcttcctgctggttcatgcctactagtttcaccaaattcatatagagaatctagggtacttcgtctaagtgatgatgatggtgcacttgattttctttgagcttctatacacagagtatctgaagtctgaggttcactgaagctgtcagacaaactatcattttcagagttttcagtaagattgttcctttctcccatccggataggaacttcattgtgaagcaagcgtgacaagtttcccttatgctttgatgtgctctgggacgttctatgacttgagatatgaaggcactgtcttgccatgacacttgacacattatcctgaaggtttaagacatctctgtccgttgatgtattgacatgcttcatacgctttctccttttcttaacgtttgttctagcagggcagactcaaaatcagaatcatcaagcttaactttatagctggctctagctcgaggagtgtcccagaaatcatcaggtaactcttggaaaactctgtcctccatgatggcatttttcttgacttgtttacgggaacgagaaggcagctctgggactggccctgcttcttcaccacataaagtaggggtcctctgggaggcgcctcccctccctgagacactccgtgaaccaccagtggctcacaacgcgtgtccccagcctcctcgcgatgtcgtacttcttcccctcgagcctccagcacaccaggtgggtgatggatctgctcatggatcctacgtagctagcaccggtctccgcaatgaggtttacaagcctatgccgctcgtcgccgtggtaaccgctcaccgtcgcgaccacggacctcatcccgtcgatcagcatgtagtccgccggcgagtgaaccagaaggacgaaaaccactaacgggacaagcgggggacggcgaacggaggcggatggcggatcaccggaacacggcggcggtactacaggagtggggaagcaacaatgtttctcgaggtccggccgg

SEQ ID NO: 109143 - DNA, 4719 bp, Zea mays
  Clone ID: MRT4577_31034C.1
atgaggagggtaaaggcaataagaaacaaaagcacaacaaaggatgaggttacaaactcgcgagccaaagaagaggatatgaccaagagaaagaagagtgtggatcacgttgccatagaaaatcgggagagaatgatgctccaatatgctctgtcagtcgctctgaatggggtgttcaccatgcatacccttgagagtcttttccttagtcgggtgaggaagcgacaaatttttgttgcttttgctccaaggtggtaccaaatgaggaaaaacaagactgaagtgcgggaggactcggtcctccacttaggatcttttgcttataacttatcgggaggagtttgtgcctcccttggtttgtataatattactactctgcactcacttttagctctggtttactgcaatacgttgcatgaggaagtccatatactatactcacaattacaccctagtgagcctccacatcctgctgaggcagaagccggaccatctcacgttgcgggatgcgcgctgggtggggagttagacctttttgagccccctccttccttgagatgccgaccaggactcgaggacaggacgcagccggaacttctggggggaagggatgttaccccaaacccacctccggttcctcccacgttagccgaggcgattgccgccttggtgaatgccaccgcagacaatacccgcttccttagggaaatggcgggtcagcagcaattccagcagcaggcaggaagaggttatccgcaaggtccccgtgagaccacctatctggacttctctgaaacccgtccacccctattcgtcaaagctgaagatccccttgaagctgatgagtggattcgggttattgaacaaaagtttggtcttctctgttgctcagagacgcagaagccgttgttcgcagcacaacaactccgtggtcctgccagtacctggtggggaaattttgtggctattcaacctgtcaaccatcaatatgccatcgaccaggtgaatactgatttaaagaagaagaactgttttatgcggggactgaatgatcggctacaaaggaaaatggccacatgcatagatctcacgtatggaaaggctatcagcacagccttatctgttgaagccaaatacgcaaattctgggaagaataagggattcggtggtgagaggcctaatcagggccaggcgaagaagcaacagtttgtgatccgaccttcaaatcaaaatcgtcctttttctcgtccaccctcattccccttcaaacagcctatcattattcgccccaacaatacccccactaccccaaatcagccgggtgccccaggcactcgattccctgccttgcctagttcctcaactgggtgttttaattgtggcaagtcgggacacttcatcaaagactgcccatatcctaggcaaaatcaatcaaatgcttcgcaaggatctgggaaatcagctcagcccaaaggaaatgctgtggggaaaaaatacaaagaagacggggcatgtatattacactcaagtggctactacaccggaaggagagccagtgatgatggcaagaaatttgtggagcaacatcatattgcataccatgaatcaaaggagggatttaaaattcattcacctgggggacacatttatactagagaagtggcctatggagtgccagtaacaatggccggacggaactttcctgctaacatgattgttctgaagggccaggatatagatgtaatattgggtatgaattggttaacccaacacaaggcaattctcaacactgaactcagaaccgtcaggttgagctataatcaagaagagattcttttgactctccccgcaaccaatccagccaaagcttctggtagagtctatgaagccattgtaccggagatcaagaacattccggtagtatgtgagtttccagatgtatttccggaagatttgcctggactgccacctgaaagagatgtagaatttgtaattgagctaaagctcggtacggctcccatctcccgaagatcgtaccgtatgccccctaatgaattggcggaattgaagattcaattacaagatctactgaataagggattcatccggccaagctcgtccccatggggttgtcccgccatttttgttaagaagaaggatcaaaccttgcgcatgtgcgtggattatcgacccctgaatgaggtcaccatcaagaataagtaccctcttccaaggatcgacatcttatttgatcaactgactggggcgagggtattttccaaaattgatcttaggtccggctatcatcaaatccgtattcggcccgaggatataccgaagaccgcgtttactacgcggtatggattgtttgaatacctggtaatgtctttcgggctcacaaatgctcctgcccacttcacctatttgatgaactcggtgtttatgcccgagttggacaagttcgtggtagtcttcatcgacgatatcttgatatattctaaaaatgaagaggaccatgctcagcatctacggattgtattgacgcgcctcagggaacatcagctatatgccaagttcagcaagtgcgcgttctggctggaagaaattcaatttttggggcacgtgttatcggctaaaggaattgcggtagatcctagcaaggtcaaagatattctggagtggaaacccccaaccactgttcaccaagtccggagttttcttggactagctgggtattatcgcaggttcataccagatttttctaagcttgtgaagccaatcacaagtttattgaagaatgacattaagttcaattggtcttctaagtgtaatgaagcctttgcgcaattgaagacactattgaccactgctccggtattggctcaaccggacatcactaaaccttttgatgtatattgtgatgcatctggcagtgggctcggctgtgtactgatgcaagagggccgagtaattgtgtatgcttcacggcagttgcgccgacatggggagcattacccaactcatgatctggagctagctgctgtgtcagaattaaatatgagacaaacacgatggcttgagcttattaaagactatgaactggagatccattatcacccaggcaaagccaatgtggtggcagatgcattgagtcgtaagacttcctgccactgtcttatggcgaagacctccgagaacactttgtgtcaagagatggaaaagctaaacctggggatcctccaacaagggactctgaatcagctaaagcttgagtcaatcattttgcaaaggataattgatgctcaaaaggataatctgggtatgaagcacatacgagagaagataagagctggagtagccaagtgtttcaaggaagacgatcaaggtgtgatatggtttaaaaaccgcatagtagtgccaaagaacgaagaactccgccagcaaattcttgatgaagcacatcttagtcgttattctattcatcccggaagcactaagatgtaccaagatttaaagcagcattactggtggacaaagatgaagattgaaattgcacgctatgtggctagatgtgacacttgcaaacgtgtcaaggccatacacatgaaaactgctggtccattacaatctttgccaatcccaacatggaaatgggaagacatcagtatggactttattgtgggactgcctaggacggccaaagggtatgattctatttgggttatcgttgatcgactcacaaagattgcccacttcttacccgtcagggccaaatatacagtagccacttatgcagcattatatatcgaccgtattctcagtttgcatggtattccaaagaccatagtgtcggatcgtggacctcagttcgtatccaagttttgggaagaacttcataaatccttgggtaccaaattgctccacagttcggcctatcatcctcaaaccagtggacagactgagagagtgaatcagatactcgaggatatgctgcgggcatgtgttctggacttctcgcaaaaatgggatgaatgtttgcccttagcggaattttcatacaataacagttatcaagaaagtatcaagatggcaccttttgaagctttatatggacgacagtgtcgaactccgctaaattggtctgaacctggagaaagatacttctttaggcctgatatggtgaaagaggtcgaagaaaaggttcagagaattattcataatatgaagaaagctcagactcgacaaaagagttatgcagaccgacgacgacaacccttatgctttctggtagacgactatgtctacttaaaagtttcaccaatgaagggtgtatcgtgtttcggggttaaagggaagcttgcacccaggtacattggtccattcctggtgattgagcaatgtggaccagtggcatatcgactccaactccccgaaacattgtctgctgtgcataatgtgttccacgtgtcacaattgaagaagtgtcttcgggttcctgatcgaaccgttgaagtgacagatgttgtcctagaaccagatttaacatactcggaacatcctattcgagttctggatcaaaaggacagggttacccggagaaaaactctcaagttctacaagatacagtggaaccagcattctgaagatgaggctacttgggaaactcaagacttcttgaacaagaatttcccaggctttttagcctcttgtaaattgtaa

SEQ ID NO: 109144 - DNA, 4623 bp, Zea mays
  Clone ID: MRT4577_31035C.1
atgccgccacgtaccaggctaacggcccgcaagtctacgggaccaattggggtgcctcggcatcaattggctccccgacatgaaagtagcagcagtggaagtaacgaccctattggagaccttgaagctcgtgatcaactcgctgatcgagacttagcacttgactgggccgtacagtctcgtttgctaatgtgtgctaaggaagtaagggctcaggcccgagttaaagaacttagctcgactgttgataacctgcagatgccgatcaggactcgaggacaggatgcagcaggaacttctgggggacgggatgttaccccaaacccacctccggttcctcccacgttagccgaggccatcgccgccttggtgaatgccaccgccgataatacccgcttccttagggaaatggcgggtcagcaacaattccagcagcaggcgggaagaggttatccgcagggtccccgtgtgaccacttatctggatttctcggaaactcgtccacctctattcgtcaaggcagaagatcccctagaagctgacgagtggattcgggttatcgagcaaaaatttggtcttctccgttgctcagagacgcaaaagccgttgttcgccgcacaacaactccgtggtcctgccagtacctggtggggaaattttatggctattcaacctgacaaccatcaagtcacctgggatgagtttaaagcagccttccgtgaacactacatccccgaaggagtgctgcatatgaaacaagaggagtttatgaagttacaacaaggtggagataccgtcaaccaatatctcaacaaattcaatcacctgtcgcagtatgccatcgaccaggtgaatacggatttaaagaagaagaactgttttatgcggggtctgaatgatcggctacaaaggaaaatggccacatgtatagatctcacatatggaaaggctgtcagcatggccttatctgttgaagccaagtacacaaattctgggaagaataagggattcggtgcctatcattatccgcccaataatacccccactaccccaaaacagccgggtgccccaggcactcgatttcctgccttgcctagttcttcaactgggtgctttaattgcggcaagtcgggacactttatcaaagactgcccatatcctaggcaaaatcaatctaatgcttcgcaaggatctgggaaatcagctcagcctaaaggaaatgctgtggggaagaatacaaagaagacagggcgtatatattacactcaagtggctactacaccggaaggagagccggtgatgatgggtacgtttcccgtggccagtcacccagcaattattctttttgattctggtgcttcacatacatttattagcaagaagtttgtggaacaacatcatattgcataccatgaatcaaaggagggatttaaaattcattcacctgggggacacatttatactaaagaagtggcctatggagtgccagtaacaatggccgaacggaactttcctgctaacatgattgttctgaaaggccaggatatagatgtaatcttgggtatgaattggttaacccaacacaaggcaatcctcaacactgaactcagaaccgtcaggttgagctataaccaagaagagattcttttgactctccccgcaaccaatccagccaaagcttctggtagagtctatgaagccattgtaccggagatcaagaacattccggtagtacgtgagtttccagatgtatttccggaagatttgcctggactgccccctgaaagagatgtagaatttgtaattgagctaaagcccggtacggctcccatctcccgaagatcgtaccgcatgccccctaatgagttggcggaactgaagattcaattacaagatctactgaataagggattcatccggccaagctcgtccccgtggggttgtcccgccatttttgttaagaagaaggaccaaaccttgagaatgtgcgtggattatcgacccctaaatgaggtcactatcaagaataagtaccctcttccaaggatcgacatcttatttgatcaattgactggggcgagggtattttccaaaattgatctcaggtcgggctatcatcaaatccgtattcggcccgaggatataccgaagaccgcgtttactacgcgatatggattgtttgaatacttggtaatgtctttcgggctcacaaatgctcctgcccatttcacttatttaatgaactcggtgttcatgcccgaattggacaagtttgtggtagtcttcatcgacgatatcttgatatattccaagaatgaagaggaccatgctcagcatttacggattgtattgacgcgcctaagggaacatcagctatatgccaagtttagtaagtgcgcattctggctggaagaaattcaatttttggggcacgtattatcagctaaaggaattgcggtagatcctagcaaggtcaaagatattctggaatggaaacctccaaccactgttcaccaagtccggagttttcttggactagctgggtattatcgcagattcataccagatttttctaagcttgtgaagccaatcacaagtttgttgaagaatgacattaagttcaattggtcttctaagtgcaatgaagccttcgagcaactgaagacactattgaccactgctccggtattagctcaaccggacatcactaaatcttttgatgtatattgtgatgcatctggcagtgggctcggctgtgtactgatgcaagagggccgagtgatcgcgtatgcttcgaggcagttgcgccgacatgaggagcactatccaactcatgatctggagctagctgctgtggttcatgccctaaagatttggcgtcactatctgctgggtaatatctgtcacatatatacagatcataaaagtctgaagtacatctttacccagtcagagttaaatatgagacaaagacgatggcttgagctcatcaaggactatgaactggagatccattatcacccaggcaaggccaatgtggtggcagatgcattgagtcgtaagacttcctgccactgtcttatggcaaagacctccgagaacactttgtgtcaagaaatggaaaagctaaacctggggatcatccaacaagggactctaaatcaactaaagcttgagtcaatcattttgcaaagaataattgatgctcaaaaggataatctgggtatgaagcacattcgagagaagataaaggctggagtagccaagtgtttcaaggaagacgatcaaggtgtgatatggtttaaaaaccgcatagtagtgccaaagaacgaagagctccgccagcaaattctggatgaagcacatcttagtcgctattctattcatcccggaagcactaagatgtatcaagacctaaaacaacattactggtggactaagatgaagattgaaattgcacgctatgtggctaagtgtgacacttgtagacgtgtcaaggccatacacatgaaaaccgctggtccattacaatctttgccaatcccaacatggaaatgggaagacatcagtatggactttattgtgggattacccaggacggccaaagggtatgattctatttgggttatagttgatcgactcacaaagattgcccacttcttacctgttaaggtcacatatacaatcgccacttatgcagcattatacattgcccgtattctcagtctgcatggtgttccgaaaaccattgtgtcggatcgtggacctcaatttgtagccaagttctgggaagcacttcacaactccttgggtactaaattactccacagttcggcttatcatcctcaaaccagtggacagactgagagggtgaaccaaatacttgaagatatgctgcgggcatgtgtcctggatttctcaccaaaatgggatgaatgtttgcccctagcggagttttcatacaataacagttatcaagaaagtatcaagatggcaccttttgaagctttatatggacgacggtgtcgaactccgctaaattggtctgaacctggagaaagatatttctttaggcctgatatggtgaaagaggtcgaagaaaaggttcagaaaattgttcataatatgaagaaagctcaggctcgacaaaagagttatgcagaccgacgacgacaacccttatgctttctggtagacgattatgtctacttaaaggtttcaccaatgaagggtatatcgcgtttcggggttaaagggaaacttgcacccaggtacattggtccatttttggtgcttgagcaatgtggaccagtggcataccgacttcagctccccgaaacattgtctgctgtgcataatgtattccacgtgtcacaattgaagaagtgtcttcgggttcctgatcgaaccgttgaagtgactgatgttgtcctggaaccagatttaacatactcggaacatcatattcgagttctggatcaaaaggacagggtcacccgaagaaagactctcaaattctataagatacagtggaaccagcattctgaagacgaggctacatgggaaacccaagacttcttagataagaatttcccaggctttctagcctcatgtaaattgtaa

SEQ ID NO: 109145 - DNA, 265 bp, Zea mays
  Clone ID: MRT4577_31036C.1
tattaaagcaattgatggatggatcactcacgcatcggttacgtgtgctgcgtttagaccgtcttgagataggttagtttgaccctactgttgaccgtgccgcgatagtaactgagactagtacgataggaaccgtacatgacacaattggatatcgtgcttgcttgaaaagccagtgacgcaaagctactgagtgctggattatgactgatcgcctgtaagtattgatacaagctatcagggggcacctgtggtagcaaataaa

SEQ ID NO: 109146 - DNA, 472 bp, Zea mays
  Clone ID: MRT4577_31037C.1
tacctcgaattcgctcgagcggtcagtgacaataagccgtacttttctttcctctcagtcggccaggcccccgggtgggggtgttacttgctccgactccctgcgtccccatcggtgaccctgggcctgcaccctggaggccttccctgtcgtaacatatccgtcatggttacatgctacgacaagaccaagtacaccggcatctggtccgccatctagtactctgcgtgcgctctcaaggtggaggtcctcgtggtcataggccatagctgctgccgcggcatcagggcgcttctctctctccaggacggagcacctgacaccttccacttcgttgaggactgggttaacatcggcttcattgccaagatgaaggttaagaaagagtacgcctctgtgccgttctatgaccagtgctccattctctagaaggaagccgtgaacgcgttcctggagaacctcaagatctatc

SEQ ID NO: 109147 - DNA, 3089 bp, Zea mays
  Clone ID: MRT4577_31038C.1
gccagcaggtcgactccctcttgcatcaagacatagcctaaactactgcctgatgcgtcacaatacacatcaaaaggcttttcaatgtccggttgagctaatatcggagcagaggtcaataacaccttcagctgctcgaaggcttcattgcatcttgaggaccaattaaattttgtgtggttcttcaataaacttgtgattggcttcacaagcttggaaaaatccgggataaatcggcggtaataaccagccaatccaaggaaacttcggacttgatgtacagtggttggcggtttccactctaaaatatccttgaccttaatgggatcaactgcaatccctttggcagacaatacgtgtcccaaaaattgaatttcctccagccagaacgcgcacttgctgaacttggcatatagctgatgttcccttaggcgcgtcaatacaatccgtaaatgctgagcatggtcttcttcattcttggaatatatcaagatatcatcaatgaagactaccacgaacttgtccaattcaggcatgaataccgagttcattagataagtgaaatgggcaggagcatttgtgagcccgaaagacattaccaaatattcaaacaatccatatcgcgtagtaaacgcggtcttcggtatatcctcgggccgaatacggatttgatgatagcccgacctgagatcaattttggaaaataccctcgccccagtcaattgatcaaataagatgtcgatccggggaagggggtacttattcttgatggtgacctcatttaggggtcgataatccacgcacattctcaaggtttgatccttcttcttaacaaaaatggcgggacaaccccacggggacgagcttggccggataaatcccttattcagcaggtcttgtaattgaatcttcaattcgggctttagctcaattacgaattctacatctctttcacggggcagtccaggcaaatcttccggaaatacatctagaaactcacatactaccggaatgttcttgatctccggtacaatggcttcatagactctaccagaagttttggccggattggttgcggggagagtcaaaagaatctcttcttggttataactcaacctgacggttctgaattcagtgttgagaattgccttgtgttgagttaaccaattcatacccaagattacatctatatcctggcctttcagaacgatcatattagcaggaaagttccgtccggccattgttactggcactccataggccacttctttagtataaatatgtcccccaggtgaatgaattttaaatccctcctttgattcatggtatgcaatatgatgttgttccacaaacttcttgctaataaatgtatgtgaagcaccagaatcaaaaagaataattgctgggtgactggctacgggaaacgtacccatcatcaccggctctccctctggtgtggtagccacttgcatataatatactcgccccgttttcttggtattcttgcccgaagtacttcccttgcctggagctgaatttcccgatccttgcgaagcattggattgattttgcctaggatatgggcagtccttgatgaagtgtcccgacttgccgcaattaaagcacccagttgaagaactaggcaaggcaggaaatcgagtgcctggggcacccggctgctttggggtagtgggggcattgttggggcggataataataggctgcttgaagggaaatgaaggtggacgagaaaaagggcgattttgggttgagggtcgaatcacaaaccgtggtttcttcgcctggccctgattaggccgctcaccaccgaatcccttagtctttccagaatttccatatttggcctccacagataaggctgtgctgacagcctttccataagtaagatcaatacatgcagccatttttcgctgcattcggtcgttcagtcctctcataaaacaattcttctttttcaaatccgtattcacctgatcaattgcgtattgtgacaggtgattgaacttgttgagatattgattaacagtatctcctccttgcttcagtttcatgaactcttcttgtttcatgtgcagcactccctcaggaatgtaatgctcgcggaatgctgctttgaactcgttccatgtaatttgatggttgtccggctggatggccacaaagttcccccaccaagtactggcaggtcctcggagttgctgtgctgcaaacagtggcttctgtacttccgaacagcgtagaaggccaaacttctgctctatgacccgtatccattcgtcggcctcgagcgggtcttctgctttgatgaagagaggcggacgagtctcagagaaatctagataagtggtctcacggggaccttgttggaatcctcttcccgcttgttgttgaagctgttgctgacccgccatcaccctcaggaagcgggtgttgtcggctgtggcgttcaccaaggtagcaattgcctcggcaagcgtgggtggaacgggaggcggattcggggtaacgtcccgacccccggatgttccggatgcatcctgtgcacgagtcctcaaagaaggaggaggctcaaaaaggtctaactccccacccagcgcacgtcccgcaacgtgagatggtccagcttctgcctcagcaggtggtgcaggctcacttgggtgtagttgtgagtataatacatggacttcctcgtgcaacgtgttgcagtaaacctgcaggtcatcaacagtcgagctaagttctttaattcgggcctgagcccttgcttccttagcacacattagcaaacgagactgcacagcccagtcaagtgctaagtctcgatcagcgagttgatcctgcaagtgtcggatgtcccttctcagttcgttgattctatcaccgtcagcgacccaagcatcagtcctttgttgcagtgctgcctgaagtcgactcacacgagcttcaaggtctccgatggggtcgttactcccactactgctgctttcatgtcggggagccaattgatgccgaggcaccccaattggtcccgtggacttgcgtgccgttagcctggtacgtggcggcat

SEQ ID NO: 109148 - DNA, 582 bp, Zea mays
  Clone ID: MRT4577_31039C.1
ggcaggaaaaataattttttttttacaaaaggggtacaagttccaacttttacaagttttagcaagattccattttttttcatgggggggggttccaaaaaaattgggttcaaaaaaattccatttggaagggaaaaaacttttataagtttaaaaaacccggctaccttaagggacatccctcaataaaaaacctaaagaggggatttccttatttaaaaaggccgacccccccggcctttaacagcttccccaacaaaacaaatttttacccggggaaaaccctaagggggggtaaaagaagacccctgggggagcattttccatccgggccctggaaaaaaccatcccttcctcgggtttattcggcagcatcactttgggggtaatccaacatttttcctccacatggggggatcaaataacgccccactttttgaccccacttgttttttcttgaaaaaacaaaaacagttccttggtcccccttttgggaaaacccccggggggcgtaatatgggacggggcttcttccccctaaacccgtgactatgaatggcccaagtcaccacctaggcttcc

SEQ ID NO: 109149 - DNA, 582 bp, Zea mays
  Clone ID: MRT4577_3103C.1
ttccccatctttaaatattaatagagctcctcagagatctggggggggggggggggggggcctgcgtagaggtcttccctacctggcggacgcccatcacccgccaggtctacccgataggcacgcgtcgccgactcgcctgctctgaccacctcaccccagtacgagttaccatacacgataagacaaaactaatcagcacaacggcggaggactacccctacccactagaaggaaagaaaaaagactagacctatcgccaacgcctccccaagtagcatatcagtatgcgcgtcgccgtacgcgtacgtacccctcgccagtcacttaactgtgctatccaggacgctacacaccattaaatctgtctagtacctaatgtgtaagctgcaattgctttttacttaggtgctttcaaagatcgattacatagtcgtgctgattaagtctcaggttgtctaggttgactaggttacaacctaggtaaacctgttctctactaccaaggagacgaccttttaggttttctacacgcacaaggaggagacgcaggtaactccagaggagaaggaacactggacc

SEQ ID NO: 109150 - DNA, 840 bp, Zea mays
  Clone ID: MRT4577_31040C.1
atggacttcattgtgggattaaccaggactacaaaagggtatgactctatctgggttattgttgatcggcttatgaaaattactcattttctgccagtcaagacagaccacccagttattgtctatgcccaattgtacattgctcgtattcttagtctgcatggtgttccgaaaaccatagtgtcggatcgtggacctcaattcgtatccaaattctgggaagaacttcataaatccctgggtactaaactgctccacagttcggcctatcatcttcaaaccagtggacagactgagagggtgaaccaaatacttgaagatatgctgcgggcatgtgtcctggacttctcaccaaaatgggatgaatgtttacccctagcggagttttcatacaataacagttatcaagaaagcgattatgtctacttgaaagtttcatcaattaagggtgtatcgcgtttcggggttaaagggaagtttgcaccctggtacattggtccattcctggtacttgagcaatgtggaccagtggcgtaccaacttcaactacccgaaacattgtctgctgtgcataatgtgttccacgtgtcacaattggagaagtgtcttcggattcccgatcgaaccgttgaagtgactgatgttgtcctgaaaccagatttaacatactcggaacatcctattcgagttctggatcaaaaggacagggtcacccgaagaaagactctcaagttctacaaaatacagtggaaccagcattcgaaagatgaggctacatgggaaacccaaaactttttagataagaatttcccaggttttctagcctcatgtaaattgtaa

SEQ ID NO: 109151 - DNA, 1890 bp, Zea mays
  Clone ID: MRT4577_31041C.1
cattccaccatctgttctgtgccggaattttcgttcccaggaatttccacaaggccaacttctacgcttccgcgtcactcagcccctaaatatcgatttggttggctagttggtacctttgctgcctgctgcaatcagtgatctgtgccgcctggggtctcggaccatcagatctccagctagcttccttgctacttactcccctacccgctgcaccctcgccatggatccgccgagctccgatatcgtagtcgacactccatacttccgcatctacagtgaccggcgcatcgaccgcttggtcggcaccgataccgtgccggcgggctttgatcccaccaccggcgtcacctccaaagatgtcgttgtagacagcgacgccggcgtctacgttcgcctgtacctcccggacacggctacggggtccgatgattccaagaagctcccggtgctagtctacttccacggcggcggctttgtcacccactcggcagcgtctccgccctatcagtccttcctcaacaccctggccgcgaaggccggcctgctcatcgtctccgtgaactaccgcctcgcgccagagcacccgctgcctgcaggctacgaggactccttccgcgcgctcaggtgggcggcctctggtagcggggacccctggctgtcacatcacggcgacctgggccgcatcttcctggccggcgacagcgccggcgggaacttcgtccacaacatcgctgtgatggcagccgcgtcggaggtgccagtgcgaatcaggggcgcggtcctcctgcacgcggggttcggtggcagggagcgcatcgacggagagacgccggagtctgtggcgctgatggagaagctgtggggggtcgtgtgcctcgaggcgacggacggcctgaacgacccgcggataaatccgttggctgccgccgcggcgccgagcctgcggaacctgccgtgtgagagggtgctcgtctgcgcggcagagttggacttcctgcggccgaggaacagggcgtactacgaggccctcgcggcaagctggcggggcggcacggtggagtggttcgagtcgaagggcaaggagcacgtcttcttcctctacaaccccggctgcggcgaggccgtggagctcatggatcgtctggtcgcgttctttgctgggaactgaaattcgtcatgtgtggatgtgaccgcgaccacatccacatccagtgcagtgagacggatggatcaaacgaagatgcagctcatcgctgaatcgaatgattgagctgggtccaggaaaagaaaactaaaagtgactagaataattgagatcggagccttggattgatcagtttgtgctatcaatttactgcacgggtcagcgtctcttgttttctttttcatcgagaataatatactagtaggaccgaaactatctcagcatccgaaagtatcagcttatgtcgatcctttcgtgtaggcgtttttttcctttgcatatattattgtataactcttctgtgtcaatacatgtccaattaatttagaaaaaaaaaaaaaaaatcctgcatttgtcacttcaaggttttgaagcagctcacgttatagcttgtggagcagaagggtgcaaacgattgagaacatggaggtggcggttgaaaggagcttgtgaaacctgtcaagtggcaaggaccgatggatgggctggaggcgctagctgacagcttgtgtgtgctatatagtcatccgttagctccttatatatatatgtacaacactagcaactcaacttaaattcgctggaagattgtatttatatgtgcaaccattaaaacggtgaatgctaatgtccaattctgttgtattctattttttataaacttgcaagctattatttgtatc

SEQ ID NO: 109152 - DNA, 4950 bp, Zea mays
  Clone ID: MRT4577_31042C.1
atgccgccacgtaccaggctaacggcacgcaagtctacgggaccaattggggtgcctcggcatcaattggctccccgacatgaaagcagcagtagtgggagtaacgaccccatcggagaccttgaagctcgtgatcaactcgctgatcgagacttagcacttgactgggccgtacagtctcgtttgctaatgtgtgctaaggaagcaagggctcaggcccgagttaaagaacttagctcgactgttgatgacctacaggtttactgcaacacgttgcacgaggaagtccatgtattatactcacaactacacccaagtgagcctgcaccacctgctgaggcagaagctggaccatctcacgttgcgggacgtgcgctgggtggggagttagacctttttgagcctcctccttctttgagtaatgtaaaatggaaggttttctctggcacattatgtttacctcaaatgtttttgcctcagatgccgaccaggactcgtgcacaggatgcagccggaacatccgggggtcgggacgttaccccgaatccgcctcccgttccacccacgcttgccgaggcaattgctgccttggtgaacgccacagccgacaacacccgcttcctgagggagatggcgggtcagcaacagcttcaacaacaagcaggaagaggattccaacaaggtccccgtgagaccacttatctggatttctctgagactcgtccgcctcttttcatcaaagcagaagacccgctcgaggccgacgaatggatacgggtcatagagcagaagtttggccttctacgctgttcggaagtacagaagccactgtttgcagcacagcaactccgaggacctgccagtacttggtgggggaactttgtggccatccagccggacaaccatcaagtcacctggaacgagtttaaagcagctttccgtgaacattacatccctgagggagtgctgcacatgaaacaagaggagtttatgaagttacaacaaggcggagataccgtcactcaatacctcaacaagttcaatcacctgtcacagtacgcaattgatcaggtgaatacggatttgaaaaagaagaattgttttatgagaggactgaacgaccggatgcagcgaaaaatggctgcatgtattgatcttacttatggaaaggctgtcagcacagccttatctgtggaggccaaatatgcaaattctggaaagactaagggattcggtggtgagcggcctaatcagggccaggcgaagaaaccacggtttgtgattcgaccctcaagccaaaatcgccctttttctcgtccaccttcatttcccttcaaacagccaatcattatccgccccaacaatgcccccactaccccaaaacagccgggtgccccaggcactcgattccctgtgctgccaagttcttcaactggatgttttaactgtggcaaatctgggcattttattaaagattgtccctatccaaggcaaaatcaggctaataatcagcaaggatcgggaaattcagctccaggcaagggaagtactccgggcaagaataccaagaaaacggggcgagtatattatacgcaagtggctaccacaccggagggagagccggtgatgatgggtacgttccctgtggccagtcaccctgcaataattctttttgattctggtgcttcgcataccttcattagcaagacatttgtggagcaacatcatattgcataccatgaatcaaaggagggatttaaaattcattcacctgggggacatatttttactaaagaagtggcctatggagtgccagtaactatggccggacggaactttcctgctaatatgatcgttctgaaaggccaggatatagatgtaatcttgggtatgaactggttaacccaatacaaggcaattctcaacactgaattcagaaccgtcaggttgagttataaccaagaagagattctcttgactctccccgcaaccaatccagccaaagcttctggtagagtctatgaagccattgtaccggagatcaagaacattccggtagtatgtgagtttccagatgtatttccggaagatttgcctggactgccccctgaaagagatgtagaattcgtaattgagctaaagcccggtacggctcccatctcccgaagatcgtaccgtatgcccccaaatgaattggcggaactgaagactcaattgcaagatctactgaataaaggattcatccggccaagctcgtccccgtggggttgtcccgccatttttgttaagaagaaggatcaaaccttgagaatgtgcgtggattatcgacccctaaatgaggtcactatcaagaataagtaccctcttccaaggatcgacatcttatttgatcaactgactggggcgagggtattttccaaaattgatctcaggtcgggctatcatcaaatccgtattcggcccgaggatataccgaagaccgcgtttactacgcgatatggattgtttgaatacctggtaatgtcgttcgggctcacaaatgctcctgcccatttcacttatctaatgaactcggtattcatgcctgaattggacaagttcgtggtagtcttcatcgatgatatcttgatatattccaagaatgaagaagaccatgctcagcatttacggattgtattgacgcgcctaagggaacaccagctatatgccaagttcagcaagtgcgcgttctggctggaagaaattcaatttttggggcacgtattatcagctaaaggaattgcggtagatcctagcaaggtcaaagatattctggagtggaaacccccaacaactgttcaccaagtccggagttttcttggactagctgggtattatcgcagattcataccagatttctctaagcttgtgaagccaatcacaagtttgttgaaaaatgacatcaagttcaattggtcttctaagtgcaatgaagcctttgaacaactgaagacactattgaccactgctccggtattagctcaaccggacatcactaaaccttttgacgtatattgtgatgcatctggcagtgggctcggctatgtactgatgcaagagggccgagtgattgcgtatgcttcaaggcagttgcgccggcatgaggagcactatccaactcatgatctggagctagctgctgtggttcatgccctaaagatctggcgtcactatctgctgggtaatatctgtcacatatatacagatcataaaagtttgaagtacatcttcacccagtcagagttgaatatgagacaaagacgatggcttgagctcattaaagactacgaactggagatccattatcacccgggcaaggccaatgtggtggcagatgcactgagccgtaaggttgcctgccactgtcttatggcgaagaccttcgagaacactttgtgtcaagaaatggaaaagctaaacctggggatcatccaacaagggactctaaatcagttaaagcttgagtcaatcattttgcaaaggataattgatgctcaaaaggataatctgggtatgaagcacattcgagagaaggtaaaggctggaacagccaagtgtttcaaagaagacgatcaaggtgtgatatggtttaaaaaccgcatagttgtgccaaagaacgaagagctccaccagcaaattctggatgaagcacatcttagtcgctattctattcatcccggaagcactaagatgtaccaagatttaaagcaacattactggtggacaaaaatgaagattgagattgcacgctatgtggcgaagtgtgacacttgcagacgtgtcaaggccatacacatgaaaactgctggtccattgcaatctttgccaatcccaacatggaaatgggaagacattagtatggactttattgtgggattacccaggacggccaaagggtatgattctatttgggttatagttgatcgactcacgaagattgcccacttcttacctgttaaagtcacatatacaatagccacttatgcagcattatacattgcccgtattctcagtctgcatggtgttccgaaaaccattgtgtcggatcgtggacctcaattcgtatccaagttttgggaagaacttcataaattcctgggtactaaactgctccacagttcggcctatcatcctcaaaccagtggacaaactgagagggtgaaccaaatacttgaagatatgctgcgggcatgtgtcctggacttctcaccaaaatgggatgaatgtttgcccctagcggagttttcatacaataacagttaccaagaaagtatcaagatggcaccctttgaagctttatatggacgtcggtgtcgaactccgttaaattggtctgaacctggagaaagatacttctttagacctgatatggtgaaagaggttgaagaaaaggttcatagaattattcataatatgaagaaagcccaagctcgtcagaagagttatgcagaccgacgacgacaacccttatgctttctggtagacgattatgtctacttaaaggtttcaccaatgaagggtatatcgcgtttcgggattaaaggaaaacttgcacctaggtacattggtccatttttggtgcttgagcaatgtgggccagtggcgtatcgactccaactccccgaaacattgtctgctgtgcataatgtgttccacgtgtcacaactgaagaagtgtcttcgggttcctgatcgaacagtcgaagtggctgatgttgtcctggaaccagatttaacatactcggaacatcctattcgagttctggatcaaaaggacagggtcacccgaagaaagactctcaagttctacaagatacagtggaaccaacattcggaagatgaggctacatgggaaacccaagacttcttagataagaatttcccaggctttttagcctcatgtaaattgtaa

SEQ ID NO: 109153 - DNA, 316 bp, Zea mays
  Clone ID: MRT4577_31043C.1
tttttttttattaccaatgtctttttttgtttgtgttagtttaatattttcatgtccgcaaattgcctaacagatggtttatttttaatgtaagggggggagggacacttataaactctacacccaaaaaattttttgaaataaaaagggggacaaaaatataagccccagggcttttacccttattgccccaccgcccaaaaagaaaaggggcggtggcccaaaccaaaatttaaacatttaggtggttggatgtgccggagataatagggccaacctttatggcttaaaaatgggggcacctttcttttggggt

SEQ ID NO: 109154 - DNA, 1803 bp, Zea mays
  Clone ID: MRT4577_31044C.1
ggccgcttttttttttttttttttagatgtgatcagtcatatatatctgaactaaacatgtttgtatgtggcctcataagatacaattgtttttttgtggttgatcggtcgacatagcaaccaagatctgagccaccatgaaacggttgtacaaaccatagagaaacacaaaaccaacatgggatctagcatactatatgttgacaaattcatatctgatcttcgtgtcacttctgctggcatgtttgttatttgggtgccgtgccgggctcgtggttggccgggtatcctgcaccactgcctgcaacgcagcatacgccgatccgcccttctccgcggccttccggcatgccgccttcatcttcctggccttctccttcgccttcctcccttcctctgacccgcccatcaagctccgtacagctcgctccagttccgctgcctccaccacggagctggcccttcccgtgccgacgaccctaaggtcaacagcgacacccatgcacgcgacgagctcgaacgcgttaagcggctgctcggcgtacagcggccacggcgccatcggcacgccgtgccacaggctctccagcaccgagttccagccacagtgggtaacgaagccacccacggcggcgtgggcgaggatctccagctgcggtgcccaaccaggccacacaaccccctgggccttcgtcctctccaggaacccgtcgggaagcaggtcgccgaggtttgcgtccgtcgggtgccccgagccgctgccggccggtgggccgcgcagcacccacaggaacctgtgcccgctgcgctcgaggccggcggccacctcgcgcgcctgctccgcgttcatccaccccatgctcccgaagcagaggaacacgacggacgccggcggctgcgcgtcgagccaccggatgcactcttgcgcagacgacgacgaccgagcatcgacgacgacgcgcggcttcggcgagagcaccgggccgattgggtacaccgttggagcacgcccgccaggcgtgcacctgccgccggcgatggacgcaagaacgcctggctccagctcggctgccgtgttagcgatgatgcctctggtttccaggaagcggcggccgtagtacgcgaaccacgtgtagtcgttcacgtccggtgacggcatagaggccaccggcaccggaggcatccctggcacgtcaacgacccctccctcctcccgcaacctggaagccagctcctcctgaatgcccggtaaacgcagcatgagcgcgagcatggcgccggtggacgcgaagtacacgtaggctggcacggcgaggtcgtgggcgacgtcgaggagcggggtcccgaagaagtcgacgacgaccgctgccaccggggccgccaaacccgcgatggcctccttgacttgcggcgcgtagagccggatgtactccgacgggtgggcgaggtcggtgcggtgctcgatggcggggaggtggtggaaaacgatgccgtcgacggtggccatcatctcacagtgtgcctgctggctgctgctggcctcggacgacgcggccatcggcgggggcgtcacgagaacagtgaggctgtatgctgcagtgcggccggcgctgcagaacagcagcctcttgccggcttcgagcatcgaggagaagtggcctgtagcccacatcgggaggagcacgatggttgggctcggcatgtcggcgtctaatctttccctccacgctggtgtgtgtcttaccggcggcgaatcacgagcgccagtgtggttatatcaactattgaaggccattgattcat

SEQ ID NO: 109155 - DNA, 340 bp, Zea mays
  Clone ID: MRT4577_31045C.1
cagccgtaccggcgccgcatcgcgcgccaccattccattgtggagattttatgaagagctcgatcctgcgtgccggtgttgtagcgctggcatgcgcgctgggcctgtccgcctgcggcggcgggagcggcgacctgtacctgaccggcgcggtctacaacgtcaccaaggacggtctggtactgacgaataatggcggcaacgacacggccgtcgtgtatccctatacctcgttccagttcagcaaccgtgtgtcgacggatgaccagttcaacatcgaggtcaagagcaggccgtcgaatgcggagaaatgcgaagtgaccggcggccatgcccgcgc

SEQ ID NO: 109156 - DNA, 407 bp, Zea mays
  Clone ID: MRT4577_31046C.1
ggagaacggggggtccccaggcaaaggcccaaaatttacaaaaacaaacggggccgggaataacgggtacaagcaggtaaacctggccggcacaaccggtggtccaaagaaacaaaaaatgcgaggggggcccgcacaacgggggcctgagacaagctaccaagcatgcaccgccccaaaaaaaactaaacgggggcaagcggggaaagggcccaggatgctaaatgcgctgcgccggcaacccctgggaagggcggctccggcttttaaaaacccggggaagggagcttatcccgggggggggaaaaaaaaaacattctagaataaccccggtaaggccccccccggtgagggggcccgccccacctcaaccaccggccgccccactcccaactgacacggggggg

SEQ ID NO: 109157 - DNA, 460 bp, Zea mays
  Clone ID: MRT4577_31047C.1
aaaggacagcccccattaatgggggggaaggttcctaataaatccgggggtattttaagttgatggactcgccccagggggggggggaacaaataacatccccccctacctagaaatcctcattttgccgaggggttaaaagaaaaccatggaaatttggttggtacctttcaaaataaagaaagggggggcccttacctttatcctagtaaaaaaaggccaaccctaggggggggtcaaaaataaacaacactttccaaattcaaaaaagggggaacaatggcggacggaacctgggggggattttattttaggggcattgggcccctctttctttggttttccagtttttgaaaaaggggcaggcccctttgttgccgaaaaaccccgggggaacccaaaggcatttggcccaaaatttgttgaataaggggaggaaggcctttttgttctggttttt

SEQ ID NO: 109158 - DNA, 214 bp, Zea mays
  Clone ID: MRT4577_31048C.1
acaagcttactggtaagctgaagagggaagttattctaggctcgtcaagtatcgatgatcctgcacaatatattacgaaattgaagatgctgacagcacaggaactttcattggatgatctccagatatgacgtcacagacttgaaaatggaagatgatcttccttccgcttgtctaatatacgtgttgtaaccatattgtttattcatctcat

SEQ ID NO: 109159 - DNA, 558 bp, Zea mays
  unsure (1)..(558): unsure at all n locations
  Clone ID: MRT4577_31049C.1
attacttggtcatcagtgacaagngcaatgtctgcctcggcgtgctcaatggtggacccatcggtccgcccacgcgtccgcccacgcgtccggtttctcttcgtgggaaattggttgcttacgacaacgataagaatgaggtcgggtgggttgatttcgactgcaccaaccctcgcaaacgaagcaggattccttccttcctgcgacgagcgttgcgcaaccaacttctgtaaatactggctactgtgaaactggctatgcttgttcttacagacgtgctattccgcgtctgaattctgaaactgccatggaaccctcctataatcgtcgctgtaatcgtgtggagggatgtaactacgaggtagtaaaaaagcggttacaggacaggaaatagtggaaaggtagataagcatagatagtatatagtcaaaagaggtcatgtttgctatgttgtagagatctctcactttttaagactaaagtggggaagcataatccatagcagttcatttaactaaaaaaaaaaaaaaaaaaaaaaagggcgcccgcgctctagag

SEQ ID NO: 109160 - DNA, 311 bp, Zea mays
  Clone ID: MRT4577_3104C.1
tttttcttcttggtttgggtcattgggtaaggtcttagcaagaatatgcgtgccccaaacacgcatatttggcatttaatttttatctcggcatgcctatcatcaccatgacgtccgggcagaaacattacagtgatgacacagacttcatcttgccggctagttcagtggggactggaccacaattgaaggggggctccaaagcttgatggatgaccagagctgcctcttaacggtcttgacattcggggtgaggtttaacctcgagcccagcttgacaaccctcctgatactcttgaagtcaacgaagg

SEQ ID NO: 109161 - DNA, 1742 bp, Zea mays
  Clone ID: MRT4577_31050C.1
acgtccttcctgctgccgctctacccgaagccaccacgccgcggcggcgacgactggccgcagaattccacgttattcccgcacccgctcgccggcaacctcttcccggaagggctatactacaccgctatctccttgggcagtcctccaaggccttattttcttgacgtcgacactgggagccacacaacatgggtccagtgcgacgcgccgccatgcgcgagctgtgcaaagggagctcaccctttatataggcccgcaaggacggcggatgcacttcctgccagcgacccactttgtgaaggagcccagcatgagaacccaaaccagtgcgactatgagatcagctatgccgacggaagctcctccatgggcgtttatgtaagggacagtatgcaattcgtcggtaaagatggtgaaagggagaatgcagacattgtgtttgggtgcgggtacgaccagcagggagttcttttgaacgcactagaaaccaccgatggagttctcggcctgaccaacaaggcactgagccttcctacacagctagccagccgaggtatcatttccaatgcgttcggccactgcatgtcgacagatcccagcggtgctggtggttacttgtttcttggcgacgattacattcccaggtggggaatgacttgggtccctatccgcgatggtccagcagatgatgtacgcagagcccaagtcaagcagataaaccatggggatcagcagctcaatgcgcgagggaagttgactcaagtggtctttgacactgggtccacatacacatatttcccagacgaggcgcttacaagattgatatcttcgctgaaggaggctgcatcatccccaagattcgtacaagatgactcggacaaaacacttcctttctgcatgaaatctgattttccagtgaggtctgtggaggatgtgaagcattttttcaagcccttgagtctgcaattcgggaaacggtttttcttctccaggaccttcaacatccgccccgaagattacttggtcatcagtgacaagggcaatgtctgcctcggcgtgctcaatgggacaacgatcggttacgattcagaagtaatagtcggagatgtttctcttcgtgggaaattggttgcttacgacaatgataagaatgaggtcgggtgggttgatttcgactgcaccaaccctcgcaaacgaagcaggattccttccttcctgcgacgagcgttgcgcaaccaacttctgtaaatactggctactgtgaaactggctatgcttgttcttattacagacgtgctattccgcgtctgaattctgaaactgccatggaaccctcctataatcgtcgctgtaatcgtgtggagggatgtaactacgaggtagtaaaaaagcggttacaggacaggaaatagtggaaaggtagataagcatagatagtatatagtcaaaagaggtcatgtttgctatgttgtagagatctctcactttttaagggcatgtttgtttacccccatggattatataatctggattatttttggaggattatataatctgaattatataatctggattatataatctgagtagtactgtttgtttacccagattatttgagttgttaataggattcttttgtatgaggaagacaagaatgccctctatatttgtactaggttgaaactcatatatgaaaaaaaaataattcaattgacattggcaaatattgcattagcaat

SEQ ID NO: 109162 - DNA, 285 bp, Zea mays
  Clone ID: MRT4577_31051C.1
gaggcgaaggactacgtacaaggtcactttcacaggcttctataagcttgacgccaaagtctgcatccagatacgtgctgccgaatttgaaggtttcaaccccaaggcagaactctgaaacggttttaattgttcttaaacttgataagtctatgcgatatacttttgtacaaaatcgtctaatcaataaagtgggcacgtgcctaaggaccctaccctactttgtctgtatgtacatctactgtcacacttaaacagtacctgcagctatgcggtgttttgggc

SEQ ID NO: 109163 - DNA, 672 bp, Zea mays
  Clone ID: MRT4577_31052C.1
tcgagccggccgggagcacagcatcaggagaggccgacaatggttttagtcgtatccctagtgataagatagagctagctggtgcacaccggattggcgaccacggcctactccgcgacgctcctcggaggcgcgagcctccccgccggtccggaggcagccgatgctgcatcgacacagcgtctggcatcttcggttccaagatgtagcgagggtctccctgatgcgtggaaaggccgcttcctaggacacatccgactacggagacgagtacatcgaggacctcaaagagcagtgcgacgccgcagaggacgcgaccgccgtcctcttgtaaggcggcgagcgacctaagagccctatggctgaagtccatcgtagagatcgtcatcatcgacatgcctatgctcctaaagaaactgtcagtctgctggactccactacaccagatggttagtgtatcggtacctaacgtttcaagaaactggagaatcacgctgtatcgacggcgttgagaaccttaaggacacactcgagtagaacacgatcaatgttcaagtggagtcacgcagccaacttgcttcatggtaagcaaccaattcaatggtatattcatgagccgacgagagcaccataatcgtacatgaaatggctgacgtatatgagaaggaaacc

SEQ ID NO: 109164 - DNA, 420 bp, Zea mays
  Clone ID: MRT4577_31053C.1
accaccaaaccatccccgtttgattccgaaaatcatgctaacaattaattattctgggggggggggggagtaagaagaaaataaaggggcctccttggggcttggggccagttagccgaccgtccataaagatgaagaagatgaacttgcttgctcgatcgctaaagcagggtaaatttttttatcatccgaggggcacttgcccgtagttgaaaaagatgcccttgacgataatcctgtaggctttctgggggggggggtagctgtcaaaaaacacgtgctggaagacgttgtcgaaaacggaaacaaagggggagtcgaaaagccccgggaccttgatggtgccggtgccgaaaaatcccctgggggtctaaaagaagccgtacttgtccccgcgctccataggttgtccaggacgcg

SEQ ID NO: 109165 - DNA, 309 bp, Zea mays
  Clone ID: MRT4577_31054C.1
aagaaacctccaaggggttaagcccttagagggcaaacgcccaaccccttgggaggggggggggtttaattttgggggacaggggacaataatacaaccctgggggaatatatgaagaacctttcttcccccccttggggccctaaacaacaaaatggttcaaccccacaggggtaaggaataaactttttaaaaacataaggcccccggaccccaaaaggggggggatcaaggttaaacaaaacccctctataaaaaatttcattttatccccagggggattcaggccccccaaaaaaggggcttttt

SEQ ID NO: 109166 - DNA, 451 bp, Zea mays
  unsure (1)..(451): unsure at all n locations
  Clone ID: MRT4577_31055C.1
acactaccaccctcttgtatttaacaagggtccctaacttttatttattacctaattgataccggaattattaccacaaccaactatagggggtgtttggttttaaaaaccaatttttaatccctcccatttattccactttaataaccaaattggcaaatatggaaaccaaaataaaattataatttccatattttgccatttataaaccaaaggggaataaaatagagggaccaaaaattaggccctaanaccccacccccccctaggttggtggggtgattttcccccggcccatcctggcctcatccaaaggccggggaccctggtttttcccggggggcgcatggaaaannaacgaacaaaaccctcgcgggggggcgcgggtccccttggcgcttttgggtggccnntttcccnnnccttnnggggggggccttcccctgggccc

SEQ ID NO: 109167 - DNA, 273 bp, Zea mays
  Clone ID: MRT4577_31056C.1
gttccatctggtggttcttacatagtagctgcttatactctaatggacaactaaatacctggattttagctgcttcaagtttccccgggctactttatttaccacttgcagctcaatcctgttttgttctcttaatcctctgttacttgcctcgtttaccagttaggaaacctgatctggttaggcccaccttttgctgatatgaattcaatatgctacttgattcgctgacagtgaatttgatcgcctgaatatgcacacatttttttactc

SEQ ID NO: 109168 - DNA, 322 bp, Zea mays
  Clone ID: MRT4577_31057C.1
ctatcgtgggccgggacgagggactccgagctaagtaccattctaggtagagaacggatctacattgtaaactgtgccagatggataacctttgacaacaacctcaacaccctggccgaaagcacgaccagcaccacctgcggtgccacacagagtgatgtaactccaagtaatcgtcttttgtttttatgcacagcttgttcacatcgagcattcctctacgtgcccatttgcttaagagaccattccttacgaggggcataggaggagtgtgagcgacacgcttgcacgcttacctgctcactgactcgttcgataggcc

SEQ ID NO: 109169 - DNA, 562 bp, Zea mays
  unsure (1)..(562): unsure at all n locations
  Clone ID: MRT4577_31058C.1
ggtcaagcggccgcaaattttttttttttttttttagttgtatcagtccacggacttattttttagtgacacgtaccaattaacacagctgaggcaccacaatatatttagttcttaaattctagtagtacatttctactcgacggaccgatcccatgcatgagatcaggctgcaggtccaggcggtaggcggatgttgatgtgcttagtgtcgtcgctgcgaggcagcgagaaggtggcgtcggcagtgcggttgagataggtgacggagagtctgtactcgccgtagaaggcgctgaagttgaaggagccgcggtcatcggtggcgcccagcacctccttggtctgccactcccccagcagcctgtcgacgacgtctccggccgggaggttggtgaagtcggcgtccgtgaggcacatctggtagcaggtggcgttggcgcccatggccgtccacagcacgatgccgtcgacggccgggtgcgcgaagccttcgcggacccggccctcggcgcgcgcgccctgcgtggcgnggtcgaaggcggcgctgacgtcgacctcg

SEQ ID NO: 109170 - DNA, 1663 bp, Zea mays
  Clone ID: MRT4577_31059C.1
acgcgcatgccgcagcattgggtacctcgaggccggccggggtggtaagaatccatcgattgctcgagagagggatatctgtttccgcatcggcagcgttctctgcagcggcgatgccgctcctcgaggagatgatggaatcgtcgtacatccgcacgtacctgcagcagatggcagcgtcggtctccacggcgagctgcgacccgtctagcggcgccgatgaggtggagtgccgcgacgaggcggcggcgctgaggcttaagatggtgttcgtcgtgaccatactcgtcgccggcgcgaccggcgtcgcgatcccgctcgtcggccgccgctgccacgggcatggagcctcctcctcctcctcctccaccggtggggcattcgtgctcgtaaaggcgttcgcggccggggtgatcctggccacgggcttcgtccacatgctgcacgacgcggacgaggcgctcacggacccttgtctccccgccgcgccgtggcgccgcttcccgttcccagggttcgtcgccatgctcgcggcgctcgggacgctcgtcttcgacttcgtcggcacgcatatgtacgagcgcaagaagcaccacgccgatgcggaggaagccgccgtcgtcgttggcaatgccagtgccagtgccaatgcgagcggccacgacgtgatcgttgcgctgctacaggacggcgcgctcgtggcgagcactggcagcagcattgggagagacgggggaggccacaaggaccccatgcacatcgtggggatgcacgcgcatgccgcagcacataggcatagccacgcccacgggcacggcccatgtgatgactgtcacgatgggcatgatgaggagccgtcccaagctcgtcatgtggtcgtctcccagattcttgagcttgggattgtatcgcactcagtgatcatcgggctatctttgggcgtctcacagaatccttgcaccatcaaacctctaggtgctgctctctccttccaccagttttttgagggctttgcattgggcggctgcatttccgaggctcagttcaagagtttctctgcactccttatggctttcttcttcgctatcacaacacctgctgggattaccgtggggtctggtatcgcgtcgttctacaatcccaacagccctagggcacttgtggtagagggaattctggattccatttcggctggtattctgatctacatggccttggtggacctcatcgcagctgattttctcagcaagaggatgagctgtaacttgaggcttcaagtcggctcatacattgccttgttccttggtgccatggccatggcatctctagccatctgggcttagcaagtagaatggaagtaaggcaaagatttgagagtgctgcctaattgcctttgatagcaggaggttctctccagcagctagttggttgcaattcttgatgagaatgggaggcattttttattttcttatattcttctgtttgtctattggttctcttcatgttggtggtggacagtaagatttagttcttgtgccctgtttggtagagctgttgttgttggaaaagtaacttatctaagaagctagtgaaaaaaacttttgtttattgtatgcttttagtttattctgagaagaagctgaattgataagttgcctcgtgc

SEQ ID NO: 109171 - DNA, 370 bp, Zea mays
  Clone ID: MRT4577_3105C.1
ttttcggaccaaagtggggcgtctttgaactacccccgggcaacgctcgtagagggggcctgcattgtccactaaacaatccacggaagggttctccaatgccaaacagccctggtagatggcctacgaacattctttttttgtctccaactgcacctttgcaaggtgcggtcggcccggccaaaggttttggataaccaagaatccgggcgcaaccactgtcatccattagccttgctcattctcaaccagccctgagagctctacactgtgcaacgcgaactgctcgatcgtaggccggggatgacggctgaactacatttaatatattgtccatcgatggagaattggaccatgccggagccttata

SEQ ID NO: 109172 - DNA, 634 bp, Zea mays
  Clone ID: MRT4577_31060C.1
ggtacttaaacatcatccttcgtttcttgggttctttcatgtacaagcatggttgactacaatagagtttttaaagatactatgcgtaatttgtgtaccatcacaacacactcattgtactagtttcatcataagaggtcgagatagttgcgcgcgtatagtagtagttgtatcaatccacggacacgtaccaattaacacagctgatgcaccacagtatatttagttcttaaattctagtagtacatttctaataatgagatcaggctgcaggtccaggcggtaggcggatgttgatgtgcttggtgtcgtcgctgcgaggcagcgagaaggtggcgtcggcagtgcggttgaaataggtgacggaaagcctgtactcgccgtggaaggcgctgaagttgaaggagccgcggtcatcggtggctcccagcacctccttggtctgccactcccccagcagcctgtcgacgacgtctccggccgggaggttggtgaagtcggcgtccgtgaggcacatttggtagcaggtggcgttggcgcccatggccgtccacagaacgatgccgtcaacggccgggtgcccaaagccttcgcggaggacgtcctctaggtacccggcctgcgtggcgtggtc

SEQ ID NO: 109173 - DNA, 726 bp, Zea mays
  Clone ID: MRT4577_31061C.1
ctcgagagagggatatctgtttccgcatcggcagcgttctctgcagcggcgatgccgctcctcgagattcttgagcttgggattgtatcgcactcagtgatcatcgggctatctttgggcgtctcacagaatccttgcaccatcaaacctctaggtgctgctctctccttccaccagttttttgagggctttgcattgggcggctgcatttccgaggctcagttcaagagtttctctgcactccttatggctttcttcttcgctatcacaacacctgctgggattaccgtggggtctggtatcgcgtcgttctacaatcccaacagccctagggcacttgtggtagagggaattctggattccatttcggctggtattctgatctacatggccttggtggacctcatcgcagctgattttctcagcaagaggatgagctgtaacttgaggcttcaagtcggctcatacattgccttgttccttggtgccatggccatggcatctctagccatctgggcttagcaagtagaatggaagtaaggcaaagatttgagagtgctgcctaattgcctttgatagcaggaggttctctccagcagctagttggttgcaattcttgatgagaatgggaggcattttttattttcttatattcttctgtttgtctattggttctcttcatgttggtggtggacagtaagatttagttcttgtgccctgtttggt

SEQ ID NO: 109174 - DNA, 1659 bp, Zea mays
  Clone ID: MRT4577_31062C.1
gtctcttccatcgattgctcgagagagggatatctgtttccgcatcggcagcgttctctgcagcggcgatgccgctcctcgaggagatgatggaatcgtcgtacatccgcacgtacctgcagcagatggcaggtaagtaggtcaacaaattgattcctctcgtggtcgttgtgtgattttgacgcgacatgcgttgcgtgcatgtatctctctgctctctcggtgcctcggtggtagcagcgtcggtctccacggcgagctgcgacccgtctagcggcgccgatgaggtggagtgccgcgacgaggcggcggcgctgaggcttaagatggtgttcgtcgtggccatactcgtcgcaggcgcgaccggcgtcgcgatcccgctcgtcggccgccgctgccacgggcatggagcctcctcctcctcctccaccggtggggcgttcgtgctcgtaaaggcgttcgcggccggggtgatcctggccacgggcttcgtccacatgctgcacgacgcggacgaggcgctcacggacccttgtctccccgccgcgccgtggcgccgcttcccgtacccagggttcgtcgccatgctcgcggcgttcgggacgctcgtcttcaacttcgacggcacgcatatgcacgagcgcaagaagcaccacgcccatgcggaggaagccgcccctccttggcaatgccagtgccagtgccaatgcgagcggccacgacgtgatcgttgcgctgctacaggacggcgcgctcgtggcgagcactggcagcagcattgggagagacgggggaggccacaaggaccccatgcacatcgtggggatgcacgcgcatgccgcagcacataggcatagccacgcccacgggcacggcccatgtgatgactgtcacgatgggcatgatgaggagccgtcccaagctcgtcatgtggttgtctcccagatttcttgagcttgggattgtatcgcactcagtgatcatcgggctatctttgggcgtctcacagaatccttgcaccatcaaacctctaggtgctgctctctccttccaccagttttttgagggctttgcattgggcggctgcatttccgaggttaatatctagtacttccttttgtgatttggatcaacaacttgtcatttgaaagcagatgtgtctgtgtttgtgtttgtggtgctgtgttcattgcccaacaaaatgcaggctcagttcaagagtttctctgcactccttatggctttcttcttcgctatcacaacacctgctgggattaccgtggggtctggtatcgcgtcgttctacaatcccaacagccctagggcacttgtggtagagggaattctggattccatttcggctggtattctgatctacatggccttggtggacctcatcgcagctgattttctcagcaagaggatgagctgtaacttgaggcttcaagtcggctcatacattgccttgttccttggtgccatggccatggcatctctagccatctgggcttagcaagtagaatggaagtaaggcaaagatttgagagtgctgcctaattgcctttgatagcaggaggttctctccagcagctagttggttgcaattcttggtgagaatgggagggcatttttattttcttatattcttctggttggcta

SEQ ID NO: 109175 - DNA, 265 bp, Zea mays
  Clone ID: MRT4577_31063C.1
ggggggaaaaaaatttatttaccggaacccaagcccgggtttttggggcctttttacctaagtaccagggccccccataggggaccccaaaaaaattgacaaaaaaggagggggggggaaaaaaaaattccccccccccttcccctgaaaacattcacccgggccgataaactttttggggctaaaggaccatttttttctccacaagggcggctctaaaaaggaaggggagggccggccccaaaaaaaacgggggtaaaccccc

SEQ ID NO: 109176 - DNA, 169 bp, Zea mays
  Clone ID: MRT4577_31064C.1
acttctatcaattttgaatacccatccttgaaatactgggcccgccactggtggtgacgtggatggatgaaaatttattatgtctaaaacatggtacacaccaacgccttcgatcaatgaaatgggttgctgatcttgtgaccgtcgatgcgattgcgaaagattggat

SEQ ID NO: 109177 - DNA, 178 bp, Zea mays
  Clone ID: MRT4577_31065C.1
attacaatcaacaactaactactaaccaacgcaatgagtcttacacgatttttagccgatccatttgcggatgtgtttgacactcgcatggcatccttcgatccgttccttggagagaagggcggactgatgagccaatggcgtcctaaagtcgatgtgaaagagaccgacaaagctt

SEQ ID NO: 109178 - DNA, 398 bp, Zea mays
  Clone ID: MRT4577_31066C.1
taagaaggttcgcatcagcccttccctttcaggcaaggtggccctaaagtagggtgttttggctgctgaatgggctcgtcagatccaagacaaaaggagaaatcacttaaagctacatcaccatagaaatgccctaaagacggaaatgttgcctgaaccatacttcgatgtacatgtgtgtacaagcttcataagattcttattctgaagcatacaaagcagtgataacgtactatctactgtgcaagattacaactgtcagtactggttgaatgatatgaataatgtaaacttgcattgtatgcctgagttgaagattaaagcgccattgcaagaatggatctcactggaatagttgccaactgcatatctgagacgaaaaattggatcgacacgct

SEQ ID NO: 109179 - DNA, 476 bp, Zea mays
  Clone ID: MRT4577_31067C.1
acttcccaacgcaccctcccaggtcgcaagctcatcgaaccctactcaccgacccacccgcaggaaaacgcaaaagctcaatcgtgtcgaggccactgtcatggccaaggcagggaatgccacgacgaatgcggagaacgcaaccgtgcgcttctaggacgtcgagaggcacttcacggacaccatcgagatcgccacggacaaccaccacatctactcctgccggctggaggagctcgtctcactgcaccactactccgacgatctcgccgacgcgcagaagaccgccgaggtcaagcctgactgggccaagggctactcccgcctcggcgcggtgtattcgggctcggcgacgccgacagcgccgtcgccgcatacgagaaggtgcttgcgctcgagcccacgcaacgaaggtctcaaggcggggctcgaggacgccaagaaggccgccgccgccccgccgcgtcgcggcctgt

SEQ ID NO: 109180 - DNA, 278 bp, Zea mays
  Clone ID: MRT4577_31068C.1
aaatggaacagatggtgatggctgggtgatcatgactgcattatcataaacatgccccatccatttgctcaagtgacgggacgagctttgtatttacattttgcaagttgctgcacccacatgagtgccttttacactcaaactgccttcatcgcatgtcttggcaccactgaaacagcctttgctgccaactgtgcgacatgggggatattgtacaaccatgctgatgtgttgccccatgttgccaaggtatatataatgtgtgccgcctctgaaaa

SEQ ID NO: 109181 - DNA, 370 bp, Zea mays
  Clone ID: MRT4577_31069C.1
caaagaaggagaccgtgtcttgggtgccaccaatagaaacaaagctaaaagagttggattgcgcatacactctgcagccaaccagcccaagcacaatgcctgccgcagtcaaatcacttcactgtcaagggcccagcgggagtactagatagccaggtccatgagcactaacaggatgatctggtgaacttccgactgcgacctgggctcacccctgatcttgaaatgcttgtgcccgcactctagccttaacttgaaggcacaccctacacgggtgcgctaaatggctcccgttaacccaagcagggacccttcgacggagatgttgataatgtgatgctcgacggccgtaaacaccaccttgacgtac

SEQ ID NO: 109182 - DNA, 474 bp, Zea mays
  Clone ID: MRT4577_3106C.1
cattggtacctcgagccggcggggatatatccttctgtcggctgacacctctctcactctgggccgccgtcatccgccctaagccacgtgctcagcctttctgtggtctcttcgccgcagacgagcacccagcacatctgcacacatgcctgatgccgaagacatccaacctcttgtctgcaacaatggcgctggaatgccctctactgctacttagctgttcatgatgcaccaacggcagagttctccctatcattgtatccaccgtcctacgacacacaggctgcaatgggtaagctacgccgacctacatgacgcctatggttgccacatagaccaaccagtcgcaatgagaggaatgcctcaccgatcgaaccaccctgatctgagcactactagtctcgtgagcaacgtgacaataaacatgacagaaccctctcgctactcatgactcttactaccacatagcattct

SEQ ID NO: 109183 - DNA, 747 bp, Zea mays
  unsure (1)..(747): unsure at all n locations
  Clone ID: MRT4577_31070C.1
aagtccaatgtatggttgtctggatgactcttctggtttattgcaaaatacaggagagaatgatctgncaactagaacattcgttaaggtttacaagtcaggatcggtggggagatccttggacatcacccggttctctaattatgctgaacttcgagaagaactgggtcagatgttcggcattaagggtcagttggatgaccctgatagatcaggctggcagcttgtatttgtcgacagggagaacgatgtgcttctccttggagacgacccctgggagtcatttgtgaatagtgtatggtacatcaaaatactttcacctgaggatgtgcataagatgggaaagccaggaaacgatccacgctacctatcttaaattgatacccagagctctttcgggctcccgtgacgattctgtggcacactgtagcactgtccatggcggtccggtgtgctgtgctcgcatgttcgcccgtgtcatctatagcatgtacaccgtgcgcgtcttcagaactcccccgttacttgtatccggtgcaggccaccgctctggactgatatcttgtaggttccacttaggaatcagtataagcgactctatcctagttggtttgttgaaactgttcccgtgattcttaagctatctatgtatttgaggattcctcggcatgctttcgacgatgaactgcaataatttgaatgcaggaggattgtttgaaaaaaaaaaaaaaaaaaaaaaaactcgag

SEQ ID NO: 109184 - DNA, 1002 bp, Zea mays
  Clone ID: MRT4577_31071C.1
ttcacgcgtccgcccacgcgtccggcgaaccaggtaaccagctgccgagggaggaaccctagcggaacactgtgcaggtgacggcggcgcgctaccggtgacgggggatacggcggcatcgtccccctcggcccctcctccatccccggcgtggcggcgcaggcagccagcctgcagggttttctgactcagattacttgttcactgtggggtgcaagcttaatcggccaccatggatgttgataagcaagaaacaatggaggagaccatccttgttggtgatgatctcatgcgtgggccgccatcccctgtcataccgaaagagatcgcatcacatgtccttgaagatgttgagctttgtgatggtatactcaagaaccttttcttatgcctacagatcaatgatattgagccattctgccaagatgaaattgtgctatatcgacagtgtgctgagaaaagggacaaggaaataagagagcggatgcaaaatagtgaatataaattgggtttttcgatgcccctgaaacagcgaaggagagagctactcaactcgtaacctcggaattcggctcgagaaggcgcatgattcttgctagtggacttgagggtatggaaggatttcgccagagatggagcttgcacggacagcttgaagacacaaggaaaaggctagaagcactgaaccatggcatggaaaaacgagagaaccaaagttctacggcggagaggacaaaatctccagctgggaagaagtggttcttttggtaggttagtatcattgtttcagacttgagaaatattgtagcctgagttgtattagcggcaatgctacacaccttttaacttccacagtactctgcctccaactagccacttaatttgctaacaagtaacaagcgatttgcttatatatagctgcaatttaaaatgtttaaatcatggattaaaccttgtaactgcaggtgatggtacggttgcattccatttttgtgatttatg

SEQ ID NO: 109185 - DNA, 1172 bp, Zea mays
  unsure (1)..(1172): unsure at all n locations
  Clone ID: MRT4577_31072C.1
cgagcagcagcagcaacaggcatggaagcaaaagtttatgggctcacagtcgatgtcttttgggggctcggtttcacttaactcacccactaccaaagatggtcctgttgacaacaaaattggtcgtgatgtgcagaaccagaccctttttagccctcaagttgactcttcctccctactgtacaatatggtacctaatttgacctcaaatgttgcggataataatatatcaacgattccctctggatcaacatatctgcaaagtccaatgtatggttgtctggatgactcttctggtttattgcaaaatacaggagagaatgatccgacaactagaacattcgttaaggtttacaagtcaggatcggtggggagatccttggacatcacccggttctctaattatgctgaacttcgagaggaactgggtcagatgttcggcattaagggtcagttggatgaccctgatagatcaggctggcagcttgtatttgtcgacagggagaacgatgtgcttctccttggagacgacccatgggagtcatttgtgaatagtgtatggtacatcaaaatactttcacctgaggatgtgcataagatgggaaagccaggaaacgatccacgctacctatcttaaattgatacccagagctctttcgggctcccgtgacgattctgtggcacactgtagcactgtccatggcggtccggtgtgctgtgctcgcatgttcgcccgtgtcatctatagcatgtacaccgtgcgcgtcttcagaactcccccgttacttgtatccggtgcaggccaccgctctggactgatatcttgtaggttccacttaggaatcagtatcagcgactctatcctagttggtttgtagctcgcacggcactcgttcttgtgtcgcatcgaaatcttcaggctaaatgcttagttgaaactgttcccgtgattcttaagctatctatgtatttgaggattccccggcatgctttcgacgatgaactgcaataatttgaatgcaggaggattgtttgagggtagctacgctgccccgcgcgctagttcccgttccttgactcgggctccctttctttttcgcgccgggccgtggntccgcgtcccccncttggggcgcgttcctcggtctcctccccgctgggggcgggttctg

SEQ ID NO: 109186 - DNA, 1085 bp, Zea mays
  unsure (1)..(1085): unsure at all n locations
  Clone ID: MRT4577_31073C.1
gaggtaacagagcaacgccagccacacacgacacgaaccacgtaaccagctgccgaggaaccctagcggaacactgtgcaggtgacggcggcgcgctaccggtgacgggggatacggcggcatcgtccccctcggcccctcctccatccccggcgcggcggcgcaggcagccagccttcagggttttctgactcagattacttgttcactgtggggtgcaagcttaatcggccaccatggatgttgataagcaagaaacaatggaggagaccatccttgttggtgatgatctcatgcgtgggccgccatcccctgtcataccgaaagagatcgcatcacatgtccttgaagatgttgagctttgtgatggtatactcaagaaccttttcttatgcctacagatcaatgatattgagccattctgccaagatgaaattgtgctatatcgacagtgtgctgagaaaagggacaaggaaataagagagcggatgcaaaatagtgaatataaattgggtttttcaatgcccctggaagaagcgaaagagagagctactcaactccaatcagaagtaacactgctagaaaggcgcatgattcttgctagtggacttgagggtatggaaggatttcgccagagatggagcttgcatggacagcttgaagacacaaggaaaaggctagaagcactgaaccatggcatggcaaaacgagagaaccaaagttctacggcggagaggacaaaatctccagctaggaagaagtggttcttttggtagtacgtgttgtgtgcaatatgcaaactccaacgatggtccagctgtgtggtccaacttgttaggcaagttgcattctaagcggctaagcctgaagcaatgtgatagcagctaacaaagctacaatttgtttgcaacatgtacctctagggtctactccccctaaagtttgtgccatactcatgtgtttccatttgcatctggtcctctttggatgcaaagtagcattggataaagctagggttttgtaaaatatgttgttttttaaaagccacgaaccctgtttggatatgacaaatnttggtagtttat

SEQ ID NO: 109187 - DNA, 3350 bp, Zea mays
  unsure (1)..(3350): unsure at all n locations
  Clone ID: MRT4577_31074C.1
cgatgggtgcccccctccccgccccctcgcgccctcagagactccctctctgctcacttatctctctctctccgcagcctcatcctccggtttccgcgcccccctcccgtccctctgttggtctcctcttcgagagaatggcgatctccgagctcgggtgagcggaggtgggcgtccctacctagtccgttgcctgcctcgggtgaagcgtcggttcggctcggtgcagaatgcggccgatttgagcgaggacgggggggcgatggatgtgggttcggacaggattcggcagcagcttgtagaggatccggttcgagccatcccggcccagctgatggtagataaagatactttcccctcaggatgtgcagaagatgggaaagccaggaacgatccacgctacatatctgaactgcctatcctaagtcgattcatggaggtgcgtctggctcctcttctgcctccccaccacaccgtagcgcggcgtacgatggcctgctctactctgctcgcaggttcgcccgggtcgcctgtagcatgcaccaccgtgctcgtcttcagaagaccaactccccgtcgcttgtatccggtgcaggtcaccgctcctggactgatactgtggtggattccacgtaggaatcagtagcagcaaatctatcctagtttgtggcaggctcgagcggcgctcgttgctctgtcgcaccaagatcttcggcctaaaaagcgtggccgaaaccgatctctgcaagacgctgactgcgagcgacaccagcattcaccgcgggttttctgtgccccgtcgtgcggcagagcgtgtcttccccccgctggatttcacacagcagcctccagcacaggagcttattgcacgggatattcatgatggcaaagccaatgcaggcatgtcttcatgactcagtgctaaagagcactgcacaggactggctggagtgtgtttgtcagtgctaagagacttgttgctggagattctgtgctattcatatggaatgagaaaaaccagcttttgcttggaatcagacacgctacccggccacagactgtgatgccctcttctgttctttcgagtgacagcatgcacatcggactccttgcagcagcagctcatgctgctgcaacaaacagccgcttcacaattttctataatcctagggcaagtccaacagaatttgttatacccctttcgaaatacatcaaggctgtttttcacacgcggatatcagttgggatgcgattcaggatgttatttgagactgaggaatcaagtgtccgcaggtacatggggacaataacagaagtgagtgatgctgacccagtgcgttggcctagttcctattggagatcagtgaaggttggttgggatgaatcaaccgcaggagaaaggccacctagagtttctctgtgggaaattgagccactgacaacctttcctatgtatccatccctgttcccactgcgagttaagcatccttggtattcaggacttgctgctcttcatgatgacagcaatgctttgatgtggctgagaggagtaaccggtgaagggggctttcattctttgaacttccagtcacctggtataggttcctggggacaacagagactccatccatccttacttagcaatgaccatgatcagtatcaagcagtggttgctgccgcagctgcctcccagtccggtggttatctgaagcagcaattcctacaccttcaacaacctatgcagtccccacaggagcagtgcaatctcaatccgctgttgcagcaacaaatactacagcaagcgagccaacagcagatggttagttctgatgctcaaaatattcagtccgtgctcaacccaggtgctattcagcagcagctccaccaactccagcagatgcagcatactcataatgaccagaagcaaaagattcaaccagatcaacagtaccaagttgctagcagtgcggttctcccgagtccaacatcattaccaagccatttgcgtgaaaaatttggcttctctgatcctaatgtgaactcttccagcttcatcagctctagcagcaacgaaaacatgctggaatcaaacttccttcaggtaagttcaaaatccgtggatttgtctagattcaaccaaccagtagttagcgagcagcagcagccgcaacaacaacaggcatggaagcaaaagtttatgggctcacagtcaatgtcttttgggggctcggtttcgcttaactcgcccactagcaaagatggttctgttgacaacaaagttggtcgtgatgtgcagaaccagtccctttttagccctcaagtcgactcttcctccctactgtacaatatggtacctaatcttacctcaaatgttgctgataataatatatcagcgtttccctctggatcaacatatctgcaaagtccaatgtatggttgtctggatgactcttctggtttattgcaaaatacaggagagaatgatccgacaactagaacttttgttaaggtttacaagtcaggatcagtggggagatccttggacatcacccggttctctaattatgctgaacttcgagaggaactgggtcagatgttcggcattaagggtcagttggacgaccctgatagatcaggctggcagcttgtatttgtcgacagggagaacgatgtgcttctccttggagacgacccgtgggagtcatttgtgaatagtgtatggtacatcaagatactttcacctgaggatgtgcataagatgggaaagccaggaaacgatccacgctacctatcttagctacctatcttaaatcgatacatggagctctttctggctcccatgacgattctgcggcacactgtagcactgttcacgacggcctgctctactgtgctcgcatgttcgcccgtgtcatctctactctctagcatgcacaccgtgctcgtcttcagaagacgaactccccgtcgcttgtatccggtgcaggtcaccgctcctggactgatattttgtaggttccacgtaggaatcagtatcagcaactctatcctagtttgtggtaggctcgcgcggcgctcgttcctgtgtcgcatcaggatcttcggactaaaatgcgtagtcgaaaccgttctcgtgattcgtaagctattcatgtatttgaggattcctcgacatgctttcgacgatgaactgcaataatctgaatgcaggaggattgtttgagatttgtaaaaaaaaaaaaaaaaaaaaaaaaaaagaggggnnnnnnnnnnnngccccggccgcggcccccccnggggggaannccgcggggnncccccccacggggggggccccgggcgggcggccc

SEQ ID NO: 109188 - DNA, 1330 bp, Zea mays
  Clone ID: MRT4577_31075C.1
acgccagccacacacgacacgaaccaggtaaccagctgccgaagaaccctagcggaacaccgtgcaggagacggcggcgcgctaccggagacgggggatacggaggcatcgtccccctcggcccctcctccatccccggcgcggcggcgcaggcagccagccttcagaaccctgggctcaccatttctgcagggttttctgactcagattacttgttcactgaggggtgcaagcttaatcggccaccatggatgttgataagcaagaaacaatggaggagaccatccttgttggtgatgatctcatgcgagggccgccatcccctgtcataccgaaagagatcgcatcacatggccttgaagatgttgagctttgtgatggtatactcaagaaccttttcttatgcctacagatcaatgatattgagccattctgccaagatgaaattgtgctatatcgacagtgtgctgagaaaagggacaaggaaataagagagcggatgcaaaatagtgaatataaattgggtttttcaatgcccctggaagaagcgaaagagagagctactcaactccaatcagaagtaacactgctagaaaggcgcatgattcttgctagtggacttgagggtatggaaggatttcgccagagatggagcttgcatggacagcttgaagacacaaggaaaaggctagaagcactgaaccatggcatggcaaaacgagagaaccaaagttctacggcggagaggacaaaatctccagctaggaagaagtggttcttttggtaggtgatggtacggttgcattccattttgtgatttatgacagccacttgccctccccattgttcgagtgcctatttagattatggctatttcataggctcccttcaggaattaacgacagtttgtgttttctatattttggtggagtaagttggctaacacactctacctatgcacattgtggatttacagtacgtgttgtgtgcaatatgcaaactccaacgatggtccagctgtgtggtccaaatgggatgacttgttaggcaagttgcattctaagcggctaagcctgaagcaatgtgatagcagctaacaaagctacaatttgtttgcaacatgtacctctagggtctactccccctaaagtttgtgccatactcatgtgtttccatttgcatctggtcctctttggatgcaaagtagcattggataaagctagggttttgtaaaatatgttgttttttaaaagcgacgaactctgtttggatatgacaaatcttggtagtttataaaagccatggttttattcgataaactaacaacatt

SEQ ID NO: 109189 - DNA, 684 bp, Zea mays
  unsure (1)..(684): unsure at all n locations
  Clone ID: MRT4577_31076C.1
tttttttttttnnnnnnnnnnnnnnnnnnnnnnnnnnnnnnnngagctcgtgatcaatcaaggagtaggacaatgttctacgaagcagcattcacagcaagctgtactcgctctcctggtcctggagcaggtactgtgcatgtaccctggagtccggcggtcctccaacaagacatgacttgtttgctatttggtacaagaaaagcagcggctacacactatttctgctgagcgacgtgtgcacgcaaagcaaacctgttcggtgtcctttatgtcatatcaacgcatcagtgaggaaaacactgaagagcagagccccgtggtggatgcagtggagctcctccgtcgcccgtccgcttgctgtggctccgaccccatgcctcttaaaaattaaacacagggattgataaaactatttttagcgacaccattgtccaaacacagggagtagtaacaatatcacgccatgcaatgttgctgttatccttgaacatgaatatcattctactgatcgatcttaaactcctttatccagtgcatactgcatccatgcaccaaccatatatgcttggccactacttaataagtacgaggcaacgagaacaggcaagcgatatggagaagataaactctgagacgatgataccaccggaaacggaagagagactagagaggaacaggccg

SEQ ID NO: 109190 - DNA, 312 bp, Zea mays
  unsure (1)..(312): unsure at all n locations
  Clone ID: MRT4577_31077C.1
tttaggaaaaaaagaagcaaatgggggaggagagatccaaacggggttgcctgtaagagaagtaacggttcaggaacgcgggctgacagccaccactaaccaagcaagttatggtgccccacggtcataaggaaatgcaacgatgggcgagcgggggggtgaatgaagggagcaagggtgacgaaatgaggacctgggggtcgaggtgaccgagataaatcgggcatgaacagaccaaccattgtttggagaggcagctgcacgnagctgagtgctaacgggggacgagcgcgggggcaggcggagattgca

SEQ ID NO: 109191 - DNA, 262 bp, Zea mays
  Clone ID: MRT4577_31078C.1
cccacgcgtccgacttgtttgacgcactacggcacctcaacttgcgtgcctgcccaagactccagtttgtgcttccagtctgggtctcctccttccccagattggagatgctccacatcgccgactgcacagacctgaggcatgtattcgtgctggatgaagagcaccgagaggaacgcatagcgttccccaatctgaaggccatgcacctgcacaacctcccatcgttgtggcagatatgtgaggcctcgatgctgatgct

SEQ ID NO: 109192 - DNA, 297 bp, Zea mays
  Clone ID: MRT4577_31079C.1
ggcaggggacattaaggggaagggctctgacacgtaggagcctctaaagcactcccggggtgccatctggagaaaggacagcgacaagccaatctaaggacccatcaccagtcgactcaccaccgtgggaggcactaagactgtttactacgacgtcatacagaccgactggaaacccaacaccgcctacaccaccaaataaactaaccaaataataatatgtatcaaacgacatacttgatagacctttatttttaatttatattcaataaaaggatataaggtgcttgacaacaa

SEQ ID NO: 109193 - DNA, 241 bp, Zea mays
  Clone ID: MRT4577_3107C.1
acaaaaaaaaactacaaaaaaataaaaaaaaaaaaaaataaaaacaaaagggggagggtaaactggtactggcttaaggacttaaatttacaacctgcattattctatccttagccaggtacaagaatttctcattccccaacttttcaacggccgcactgccaaacgcttccccttccaaaccccaaaagacctgaaccgcatccaatttcaataatggggccttatcaaccccaggccc

SEQ ID NO: 109194 - DNA, 802 bp, Zea mays
  Clone ID: MRT4577_31080C.1
agtctttatttcaaacctttaatccataaatagtgaaaaagatctatacgcagattctgctggagatgagcttattcactcattcggaccaagacgacgaacttcgaatttcctcaattttcacgcgagcacctcggccgcctgcgccatccatgtcgtcgcccttctccgccgcttccgtggccgcggggtcagaggcggcagccggcacgaggaagctgcctgtgctgctgttcgacgtcatggacaccctcgtccgggacccgttctaccaccacatccccggcttctttcaaatgtccatgaaggaactactagaaagcaagcatccaacggcttggtcagaatttgagaaaggactgattgatgagaatgagatggccaaaaagttcttcaaggatggcagatcgtttgatttgcaaggtctaaaagagtgcatggtgagagcatatgaatacattgatggcgtcgaagatattctttgctgtttgaagaaaaataattatgaaatgcatgcttttacaaattatccagtatggtaccaattaattgaggataagctaaagctctcaaagtatttatcttggacattttgttcttgtagaactggaaagcgcaaaccttcgcccgagttttatcttcaagctgcagatcaactcaacgttgatccagcaagctgcgtttttattgatgataggatgataaacattgaagcagctcttagtgtaggaaatggttgggttgcagtttaaaagtgctgaggcactacagaaggacttgtgtgctctttggagtgaatatc

SEQ ID NO: 109195 - DNA, 768 bp, Zea mays
  Clone ID: MRT4577_31082C.1
ctcctcttgtttgtgaaggtgaagcacaagtacaataaggttgtgtgtgccctatcggaggttatgctcaaccaaactacaatacgaatgtacataatgtatggtgccctttctttgtgagctatgtcaataaattattgtgctaaaaaaaaaaaaaaaaaaaaaaaaaaaaaaaaaataaaaaaaaaaaaaaaaaaaaaaaagttaataaaaaaaaaatatttttaaattgtagcagtgaaactgcttatctgttttctttacacctgcagtgtcacaataattttaaaaagataaggggaaacaccagaatatatgatgccttttttgttctctgtgtacctcaaactgtgaccaaaagttatgcaaagaatgagctggccaaaaagttcttcaaggatggcagatcgtttgatttgcaaggtctaaaagagtgcatggtgagagcatatgaatacattgatggcgtcgaagatattctttgctgtttgaagaaaaataattatgaaatgcatgcttttacaaattatccagtatggtaccaattaattgaggataagctaaagctctcaaagtatttatcttggacattttgttcttgtagaactggaaagcgcaaaccttcgcccgagttttatcttcaagctgcagatcaactcaacgttgatccagcaagctgcgtttttattgatgataggatgataaacattgaagcagctcttagtgtaggaatggttgggttgcagtttaaaagtgctgaggcactac

SEQ ID NO: 109196 - DNA, 1100 bp, Zea mays
  Clone ID: MRT4577_31083C.1
attcttatttcagacctttaatccataaatagtgaaaaagatctatacgcagattctgctggagatgagcttattcactcattcggaccaagacgacgaacttcgaatttcctcaattttcacgcgagcacctcaattcggcacgaggccatggtctcgctgctccctcgcgctccctcactcgccttcctcgctaagtccgcctcttcgcagcggccgcctgcgccatccatgtcgtcgcccttctccgccgcttccgtggccgcggggtcagaggcggcagccggcacgaggaagctgcctgtgctgctgttcgacgtcatggacaccctcgtccgggacccgttctaccaccacatccccggcttctttcaaatgtccatgaaggaactactagaagccaagcatccaacggcttggtcagaatttgagaaaggactgattgatgagaatgagctggccaaaaagttcttcaaggatggcagatcgtttgatttgcaaggtctaaaagagtgcatggtgagagcatatgaatacattgatggcgtcgaagatattctttgctgtttgaagaaaaataattatgaaatgcatgcttttacaaattatccagtatggtaccaattaattgaggataagctaaagctctcaaagtatttatcttggacattttgttcttgtagaactggaaagcgcaaaccttcgcccgagttttatcttcaagctgcagatcaactcaacgttgatccagcaagctgcgtttttattgatgataggatgataaacattgaagcagctcttagtgtaggaatggttgggttgcagtttaaaagtgctgaggcactacagaaggacttgtgtgctctgggagttgaattatctcctcttgtttgtgaaggtgaagcacaagtacaataaggtcgtgtgtgccctatcttatcttatgctcaaccaaactacaatacgaatgtacataatgtatggtgcccttgctttgtgagctatgtcaataaattattgtgctaatctgaatcgtctatcaaatataactgatatgttaactgcacatattctctcctatgaagagctttttgttgtcc

SEQ ID NO: 109197 - DNA, 567 bp, Zea mays
  unsure (1)..(567): unsure at all n locations
  Clone ID: MRT4577_31084C.1
tgggacctctaaaacggccgcgctgggttttttttttttaaaaaaaattttttttgggttttttttttttttttttttttttttttttttgcattcgagtccaaacgcaaccaggtactgatcccgactgggttcctaaaaatacttttactgctaaaaaaatccctcggggggggggggaaanattcttcctaaaactccattttaaaaaatttggaaaaaaacccccccctttcgctccgaattctttattcctccaccggtcggcccaaatcccgagtttaccctgggctggatttacctccgccttggttcagttccagtgttccgggggctcggtccaccacgcctttgggggggggtggtccccggggaaaaacccggcggagggtttattgttgtccaggagccccgttttgtncttctccacctttgggaaactcccgtgggaaaaacaccccgccatgtgttttccgnctcgggggccgggcgcgtcnngaaaaaatacccctgtgccttcgggaccggggggcttcgncccgggcgggtccccgttttttagtaccg

SEQ ID NO: 109198 - DNA, 164 bp, Zea mays
  Clone ID: MRT4577_31085C.1
gcccggcgcctaggtactacccccgaccccgagctctgaaatgggccataaacaactccgtgattctggacggccatgtgagagcacgcggtcgtaccaagcacgccgttcccagtcaccacccggtcgaggagaggaggtcgaacggtcattccttacccaca

SEQ ID NO: 109199 - DNA, 425 bp, Zea mays
  Clone ID: MRT4577_31086C.1
ggaaaaccctcaccatcactttgggcttttttttgagggtaaaaaaagaaagccccctgctttcatggttttaaaaaaaaacctttactttgatcaaacctttcaagcctttttgggttgaacctttaatttttaccggttggttttcgacctttacctggtttggaaattagaccaccaaaagaaaatccttgcccattggttacctatggacctttccttctttttttaccggcggcaaaaacctcccccaggggcctaacccccctggcccccctattagaccaccttccccctttggggaaagcccggttcctttgaaccacctaaccttttttatttccctttaaaccgggtttttggacctttggccaattaaagggcctaccgggaaaggcaaggttgggggctggaatccgggttat

SEQ ID NO: 109200 - DNA, 349 bp, Zea mays
  Clone ID: MRT4577_31088C.1
aaataaataaaggaattctgttaatttagactaaaatatctccttcctacctttcatacctaactaatccaatcgtttgtcggggaccatgaagcccaacggagcgacaaagtccaccttagtacttcacgacaaaaaaaatctccaaaccctattgtagtcgcaccatgacagagccaccagatgcaccagccaccaagtcgtggtcacattttgcagccccacgtgccatggagacaccagcacctccggtgagatatcggggctccgcggcgcagctaggtgtccagacttgactgactaactggcattgcattgcatctagcctcgttgttgcgtcgtatgtcgt

SEQ ID NO: 109201 - DNA, 172 bp, Zea mays
  Clone ID: MRT4577_31089C.1
attataaaaatggggtttgtttttttaggaaaactaaatattttagtataaacaatacatattcttttctttcacaaaaaagggcattccatggaatacctaaaaatacccctgtcgtcgcccctgttctttttttacaaatattcccacgagcatggagggtttaatactc

SEQ ID NO: 109202 - DNA, 262 bp, Zea mays
  Clone ID: MRT4577_3108C.1
aacacgcgcacggcctcgcacgccattatctcaaccgtcacgctccatgaactgacgggggcttatcgctcgtacttgaagcgcatgctgcaccactagcatgtgagaccacttacatgtgctagaggttctgtctggaaagaaaccggaccttctactggcacacgcacatcatagaactcagttgctttagctacctctgacgtacaacacgctgccatccgacatgatcgcagctctgaacacttcatgcatgacaccg

SEQ ID NO: 109203 - DNA, 332 bp, Zea mays
  Clone ID: MRT4577_31090C.1
atgggcaatcacgattttttgttaatgacgcccaaatgcactcgggggactacgtggaagactacgaggagagagcaccactacaagctctgcaagcggacgatgcgttcctggacatgctcttgcctagcaagaacgctggagacaactgcctcaccgacacccatgatgtgaccggccaccaaacatactctgagatagacggccataattgcacactgaacgattgatttgatgagattactgatagagaatagtgatcaattgagaatgtcgtggtagggttcgcaccatcaatacccttgcgtattgatgaaaagcgagcttgacct

SEQ ID NO: 109204 - DNA, 2361 bp, Zea mays
  Clone ID: MRT4577_31091C.1
ggatcgggcatctcgaggccggccggggctctttactcatttcccgaagcttcgcatccgtccttcggtccttcctcacccgttcgtctgtctcgcctcacccacccacccacagcatcagaacggagggaattagggagcttcggccggatccgcaacatcggggaacggcgggaaccagggagctcccgccgcctagaaccggagctcccaatcgatccactggccgttgagccgacacttcaatggaagcccacgcctcgcggggccgccgcaccctggaggagattcggcagaagagagccgcggagaggatgcaacacgccgtcccgatcgcggcgtctcacgtcgactctcacgggaaccaaagagctggagctgagcttcttgctcgagttcaagaacttgaaaatggcaacacggaattggagagggaaaacaaaatgctcttgtccaagatcgctgagaaggaagttgagaaggacgcccttgtaaaccgtttgaatgatctcgagcggaatgtagtgccctctttgaaaaaaagcttgaatgacatttctttggagaaagatgctgctgtagttgctaaggaggatgctctagctcaactcaggagcatgaagaaacgactcaaggaagcagaggaagaacagtatagggcagaagaagactcggcctccttgagagcacagctaaataccctgcagcagcaaatgggccacacttacagtggatatacaatgggaacatcaagtgaggaatctgttgccatggaaaaggagatacaagatttacaggcacagctaaagcaagagtcactgctaaggcaacaggagcaacaacaattagctgaacaatcccagctgaggcaacaagagcaagaaaaactagccaaagagcaaacccgtattgcttctctggaggctgaaaagcaacagttggaagaccaaattactatgttgacaaagaaagctacagaggacgcttctgagtttgctgcacgcaaggcattttcaatgcaagatagggaaaaacttgaacagcagttgcatgacatggctttgatgattgagaggctagaggggagtcgtcaaaaactgctaatggagattgattctcaatcgtcagaaatagagaaactgtttgaggagaactcagccttatctgcttcttatcaagaagccattgatgttactgtacaatgggaaaaccaggttagagactgtctgaagcaaaatgaagagctccgttctcacttggagaaactaagacttgaacaagttagcctgttgaaagtaagcaatatcgctacccaatcagatgggcaaactgaaaacagtatctcaaacccaccacaaatggtcatcgagaatatttctctaaaggatcagcttataaaagaacagagcagatctgaggggttgtcggcagagataatgaaactttcagctgagcttaggaaagcagtccatgcacagaataaccttgcacgcttatacagacctgtattaagagacattgagagcaatctgatgaaaatgaaacaagaaacttatgcgacgatccagtgatacatgttgacatgttgtgaaactcagtcctctggcatggccgcatgggctccacgttactgattttcgtcgtggatgtatttatctcatgccatcttcaagatgctggtgcaaagcagttcttttcgtggccaccatttataagtagagttcagtcgagatcgttgtacttgtatcatactcatgtatacccgattcccagactggttcatctcgtaaattggaagcgatgtttggatgcctatgtatcaagtggatcataaacatccaaacaacgccttaaaatagatcgtttcgacattattaattttcctgcttgcaatccaggctctaacaacttctcggtcttgtttaaaaaaaaaaaaaaaaaaaaaaaaaaaaaaaaaaaaaaaaaaaaaaaaaaaaaaaaaaaaaaaaaaaaaaaaaaaaaaaaaaaaatggagaaaaagattggttagggcttgtttggtgaaaaaagattggttaggacttgttttggttacaacttccaagggaggtggaggggactggagggaaataaactaatttttcccttaatacccccatttcccttttaaccaaaacaaattattatccctgctttcagtccccaaattgggggcaccaactttttaaaccatgtctttttgggccccatgttgggttggcccttggatgggtccaccatgtagggtgtatttggttagagaaaaaagaggtaaaattatataaaaaaaaaaaaaaaaaaaaaaaaaaaagaaaaaaaaaaaaaaaaaaggcccctagggcc

SEQ ID NO: 109205 - DNA, 292 bp, Zea mays
  Clone ID: MRT4577_31092C.1
cgcacgcgtccgaacacaacgagaaatgatagcgtcctgatcgtcgccctcatcggcacccaacaccgcctcgggcacatgattcggcaccttgacgatcggaagggagctgcactcgccatgtacgtccctcttctgcgcaactcccgcgtcgacactcttcatcaggcccaagcctgaacgctgtagccatagccgcgatcgcacatacagcgtcacctcccaccttgcggtgtcgcacgatctcccccaaggtcagaggcctcaacatctggaaagacttaacccagct

SEQ ID NO: 109206 - DNA, 1032 bp, Zea mays
  unsure (1)..(1032): unsure at all n locations
  Clone ID: MRT4577_31093C.1
gtcagaaatagagaactgtttgaggagaactcagccttatctgcttcttatcaaaaagccattgatgttactgtacaatggngaaaaccaggtgtgccattggccttcttgatcacttagtgcatctatgttatgcaaccctttgcnataagaaaatctgcctcgnactttaacagnaaaatttcaggttagagactgtctgaagcaaaatgaagagctccgttctcccttggagaaactaagacttgaccaagttagcctgttggaagtaagcaatatcgctaccaaatcagatgggcaaattgaaaacagtatctcaaacctaccagaaatggtcaccgagaatatttctctgaagggtcagcttataaaagaacagagcagatctgagagtttgttggcagagataatgaaactttcagctgagcttaggaaagcagtccaagcacagaataaccttgtacgcttgtacaggcctgtattaagagacattgagagcaatctgatgaaaatgaaacaagaaacttatgcgacgatccaatgatacatggtgtcaaactcaatccacgatactgtggaatggccgcataggcacaagctccaccgtaggcctggttcggttgcatctgaatttgagacgcaaccaacaagcccttgctcaagatgctggtgaatgtattggtctcatgccattttcaagatgctggtggaaatcagttcttttggtggctaccattcataagtagagttctgtcgagatcgttgaacctgtatcatactgttgtatacccgattcccaccggttcatcttataaactgggggcaaatggagaaaaagattggttagggcttgtttggtgaaaaagattggttagggcttgtttggttacaacttacaagggaggtggaggggcctggagggaaataaactaatttcccccttaatccccacctttcccttctaaccaaaacaaatttttatccctgctccccgtccccaaattgggcgcccccccttttttaatcctgtcc

SEQ ID NO: 109207 - DNA, 192 bp, Zea mays
  unsure (1)..(192): unsure at all n locations
  Clone ID: MRT4577_31094C.1
ccggccgggaaaaatttaaaaaaaaaaaaaaaaaaaaaaaaaaaaaaaatttatctggttcttgggtactttggtctatgggttgaaatcggaacccnatttttccgttggcctaagattcttaantttctgggtgctggtatccacagctagaaactaagatagattctatggattcttggtgggctgggc

SEQ ID NO: 109208 - DNA, 669 bp, Zea mays
  unsure (1)..(669): unsure at all n locations
  Clone ID: MRT4577_31095C.1
ttcagctgagcttaggaaagcagtccaagcacagaataaccttgtacgcttgtacaggcctgtattaagagacattgagagcaatctgatgaaaatgaaacaagaaacttatgcgacgatccaatgatacatggtgtcaaactcaatccacgatactgtggaatggccgcatagtcacaagctccaccgtaggcctggttcggttgcatctgaattggaggtgattgaatccccttctattcaattttaactagggagagatttaatcccatccaatcttctctgatccagacgcaaccaacaagcccttgctcaagatgctggtgaatgtattggtctcatgccattttcaagatgctggtggaaagcagttctttcggtggctaccattcataagtagagttctgtcgagatcgttcaacctgtatcatactcttgtatacccgattcccaccggttcatcttataaactgggggcaaatggagaaaaagattggttagggcttgtttggtgaaaaagattggttagggcttgtttggttacaacttacaagggaggtggaggggactggagggaaataaactaatttttcccttaatccccacatttcccttctaaccaaaacaaattattatcccctgctctcagtccacanattgggcgcaaca

SEQ ID NO: 109209 - DNA, 461 bp, Zea mays
  Clone ID: MRT4577_31096C.1
gggccgacacacgcgtccaggagaacggagggaaccagggagctccggccgcctagaaccggagctcccaaatagatcgatccatcggtcgttgagcggacacggcaatggaagcccacgcctcgcggggccgccgcaccctggaggagatccggcagaagagagccgccgagaggatgcagcacgccctcccgatcgcggcgtctcacgtcgactctcacgggaaccaaagagccggagctgagcttcttgctcgagttcaagaacttgaaaatgggaacacggaattgattgatgagaagggagttgagaaggatgcccttgtaaaccgtttgaatgatctcgagcggaatgtagttccctctttgcaaaaaaacttgaatgacatttctttggagaaagatgctgctgtagttgctaaggaggatgctctagctcaactcaggagcatgaagaaacgg

SEQ ID NO: 109210 - DNA, 854 bp, Zea mays
  unsure (1)..(854): unsure at all n locations
  Clone ID: MRT4577_31097C.1
gnaaactaanacttgacaagctagcctgttggaagtaagcaatatcactaccaaatcagatggacaaattgaaaacagtatctcaaacctaccagaatggtcaccgagaattttctctgaagggtcagcttataaaagaacagagcagatctgagagtttgttggcagagataatgaaactttcagctgagcttaggaaagcagtccaagcacagaataaccttgtacgcttgtacaggcctgtattaagagacattgagagcaatctgatgaaaatgaaacaagaaacttatgcgacgatccaatgatacatggtgtcaaactcaatccacgatactgtggaatggccgcataggcacaagctccaccgtaggcctggttcggttgcatctgaattggaggtgattaagggcctgttcgcttcttcagctcatcaaaatttatataaattagagaagtaatccggttaggaactattccggggctctaatccgtgaaaaccgaacagggcctaaatcctcttctattcaattttaactagggagagatttaatcccctccaatcttctctgatccagacgcaaccaaacaagcccttgcttatttgcgatgtgaatgtattggtctcatgccattttcaagatgctggtggaaagcagttctttggtggctaccattcataagtagagttctgtcgagatcgttgaacctgtatcatactctttatacccgattcccaccggtttatcttataaactggggaaatggagaaaaagattggttagggcttgtttggttacaacttacaagggagttggaggggactggagagaaataaactattttttttcctc

SEQ ID NO: 109211 - DNA, 287 bp, Zea mays
  Clone ID: MRT4577_31098C.1
cacaccaacagctttaagtatccatactccaatggacgggtaagaacttgccctgtgtttctgccaacctaacagacgttttcgctgcatgtttcaacacacaatatcccacccctcccaaggtcaccaaatatcgtatcgacatataagcgccctagcacaccacccaacaaacaataaccatgtccgtcccccactactcagactcctgacccggcaattaatactacaccaagtcctgcaggcttcccaactttccatatagcaagtactcttagaacatccgc

SEQ ID NO: 109212 - DNA, 1940 bp, Zea mays
  Clone ID: MRT4577_31099C.1
cccgaagcttctcatccgtccttcctcacccgttcgtctgtctcgcctcccccacccacccacagcatcagaacggagggaattagggagcttcggccggatccgcaacatcggggaacggcgggaaccagggagctcccgccgcctagaaccggagctcccaatcgatccactggccgttgagccgacacttcaatggaagcccacgcctcgcggggccgccgcaccctggaggagattcgacagaagagagccgcggagaggatgcaacacgccgtcccgatcgcggcgtctaacgtggactctcacgggaaccaaagagctggagctgagcttcttgctcgagttcaagaacttgaaaatggcaacacggaattggagagggaaaacaaaatgatcttgtccaagatcgctgagaaggaagttgagaaggacgcccttgtaaaccgtttgaatgatctcgagcggaatgtagtgccctctttgaaaaaaaccttgaatgacatttctttggagaaagatgctgctgtagttgctaaggaggatgctctagctcaactcaggagcatgaagaaacggctcaaggaagcagaggaagaacagtatagggcagaagaagactcggcctccttgagagcacagctaaataccctgcagcagcaaatggaccacacttacagtggatatacaatgggaacatcaagtgaggaatctgttgccatggaaaaggagatacaagatttacaggcacagctaaagcaagagtcactgctaaggcaacaggagcaacaaaaattagctgaacaatcccagctgaggcaacaagagcaagaaaaactagcaaaagagcaaacccgtattgcttctctggaggctgaaaagcaacagttggaagaccaaattactatgttgacaaagaaagctacagaggacgcttctgagtttgctgcacgcaaggcattttcaatgcaagatagggaaaaacttgaacagcagttgcatgacatggctttgatgattgagaggctagaggggagtcgtcaaaaactgctaatggagattgattctcaatcgtcagaaatagagaaactgtttgatgagaactcagccttatctgcttcttatcaagaagccattgatgttactgtacaatgggaaaaccagcaggttagagactgtctgaagcaaaatgaagagctccgttctcacttggagaaactaagacttgaacaagttagcctgttgaaagtaagcaatatcgctacccaatcagatgggcaaactgaaaacagtatctcaaacccaccacaaatggtcatcgagaatatttctctaaaggatcagcttgtaaaagaacagagcagatctgaggggttgtcggcagagataatgaaactttcagctgagcttaggaaagcagtccatgcacagaataaccttgcacgcttatacagacctgtattaagagacattgagagcaatctgatgaaaatgaaacaagaaacttatgcgacgatccagtgatacatgttgacatgttgtgaaactcagtcctctggcatgggctccacgttaggccttgttcggttaatcccgttacccatggattgggtgggattggaaaaaattaagaaaaggtttgacttagttgggatttaaactcacccaatcccactcaatccatgtggattgggagctaaccgaacagacccttactgattttcgttgtggatgtatttatctcatgccatcttcaagatgctggtgcaaagcagttcttttcgtggccaccatttataagtagagttcagtcgagatcgttgtacttgtatcatactcatgtatacccgattcccagactggttcatctcgtaaattggaagccatgtttggatgccgaaaaaataagaaaagtttgacttagttgggatttaaactca

SEQ ID NO: 109213 - DNA, 170 bp, Zea mays
  Clone ID: MRT4577_3109C.1
acgcgctagctactatcttcgcctttacctgcttgaacttaccccccctacacaccgggtacactttgtgatttggagccagagaacttacaacaagctcgaggccgtgtatgggtgcttaaactcgccctccaagaagaataaaggcccatttctgccgtggaccacga

SEQ ID NO: 109214 - DNA, 1222 bp, Zea mays
  unsure (1)..(1222): unsure at all n locations
  Clone ID: MRT4577_310C.1
gaaatcggaaacaaaaaaaaaaaaacctaagcagagtggggaaaggcgtcttcgtactcgcctctctccgcgcaaccgagccttcgccctcctccttccccatttcgccagcggcgcagcccaccaaccacccccacccgccgccatgagggagtgcatctcgatccacatcggccaggccggcatccaggtcgggaacgcgtgctgggagctctactgcctcgagcatggcattcagcctgatggccagatgcccggtgacaagaccgttgggggaggtgatgatgctttcaacaccttcttcagcgagactggtgctgggaagcacgtcccccgtgctgtcttcgtagatctcgagcccactgtgattgatgaggtgaggactggcgcttaccgccagctcttccaccctgagcagcttatcagtggcaaggaggatgcagccaacaacttcgcccgtggtcattacaccattggcaaggagattgttgatctgtgccttgaccgtatcaggaagctttcagacaactgcactggtctccagggattccttgtcttcaacgctgttggaggtggaactggctctggccttggttcgcttctcctggagcgcctctctgttgactatggaaagaagtccaagcttgggttcacagtgtacccatctccccaggtctccacctctgttgttgagccatacaacagtgtcctgtccacccactcactccttgagcacactgatgtctctatccttcttgacaatgaggccatctatgacatctgccgccgctcccttgacattgagcgcccaacatacaccaacctcaacaggcttgtttctcaggtcatttcatcgctgacagcttccctgaggtttgatggtgctctgaatgttgatgtcaatgaattccagaccaacttggtgccctacccgaggatccacttcatgctttcctcctatgccccagtgatctcagctgagaaggcctaccatgagcagctgtctgttgctgagatcaccaacagcgcctttgagccttcatctatgatggccaagtgtgacccccgccacggcaagtacatggcctgctgtctcatgtaccgtggtgatgttgtgcccaaggatgtcaacgctgctgtggccaccatcaagaccaagcgcactatccagnttgttgactggtgccccacntggcttcagtgtggtatcaactaccagcca

SEQ ID NO: 109215 - DNA, 498 bp, Zea mays
  Clone ID: MRT4577_31100C.1
ggaatccaaacgcttaaacactagtttgaaacagcaacctattttgccacaacagcttgataccgggaccaactggagcatttgactcctaaaacctccagttgcatccttaagcgatcgacgaactcgccgagacaccccgaacattggactggccgttgacagcactgttgctgccgcggaggcggtgagcaccccgcacgcgctggacctgaacattgttagtagaaccaacgtggctgggctccttggatgacgacggcttttgcttgctttgccatgactgctccaccttgtcgccgttgtacgactgcgaggccgtccaggtccggtctgcggagtcgacggaattgggctcccacgagcacgtccaggcgttgccggcaaagctgttgctccctgctgactcctgcgggtcggtctccccacgaatgtcacgcaccgagacgtacttgtgcatgctcggctccatgagatcgtccttcacgccgaccttcg

SEQ ID NO: 109216 - DNA, 413 bp, Zea mays
  Clone ID: MRT4577_31101C.1
gagtgctgcagccacccaatccgtgggtgctgacagaaagcttgctatatttgataaaatattgtctgactcccatgatgctgggagctgaatccggaatgacctgtgtcctgctggcaacgctgaggatataaaaaataacctgaatggactggacaaggctttgaccgctgtcctaggattgagaactatagaacctacccagttacttgttcggataggaaaaagtaactgcccaacccatcgagatgaataaaatgagcgattgacaaagccagaacaacttcgtgcggctatccgatctgctaatccaggaatgctgggataacgccgcacccactttaaagacatatctatcatgtctttcctatacttcgtgtgaggccatttttttaaaagtgcaaccgaattga

SEQ ID NO: 109217 - DNA, 346 bp, Zea mays
  Clone ID: MRT4577_31102C.1
cgctccgaccatcattattcccatgtctttcaccggcattcgcgttgggacaccaattgctaaaaaggactgaacatgttaccacattaccgatgtgctcgctagggtgattcacatgtatataactggctgatgacgactggagggcacatgctatcaccagaataataagccttcaggactatgggtgcataaacagtgcgctgaaccgcttgacccaaatcagcaaaaatttagagcctgacaaactgggacaccagtatatacgtctgcttagcccaccgacgcctgactctctaatctcagatctgctgaaccatattgccaataatatgaatcaaatggc

SEQ ID NO: 109218 - DNA, 201 bp, Zea mays
  Clone ID: MRT4577_31103C.1
tagatgggggcgtacgtctacgtgctctcgttgccaacagccgacaagtaaccagcagtctcctaccgacataaacggtgccgacgaatgttacgtgctccaatacctcctgggcttaatctgcctcccgagctacgcagacgggccaagacacctagggacctccaatgaccatcactgggatgactcgacccaagatga

SEQ ID NO: 109219 - DNA, 308 bp, Zea mays
  Clone ID: MRT4577_31104C.1
ctgttatcctggccgatggccttcgaacagagccaccattgcttggctcatcctccccgacgttggtcccccctctctctctctctcccggtgctctgctggccgccgcgcccctggtcccggccccagcttggcctcctccccatgccgctcggccgcccatctccctgctgccgctctcccatggcgcgcccctggtccttgctcctagctcgcctgcgctcggcctccagctccagctcgccgagtccctctctgtctgcgccatggagctcgcccggccgcgacctcgccttgcttcctgttgc

SEQ ID NO: 109220 - DNA, 274 bp, Zea mays
  Clone ID: MRT4577_31105C.1
tctttttattctttcttcgtgggcaacaagggagcacttttaagggtttcgggccggttcgtggcctgttactcgttataactcgtcttcggtgcctttttttttgtagttgagcatgcttgagaatttggttctagttatttgcatttctgagcgtttccttgcacgttattttctaccccttttgtgaattgtgtttttttttcttcctttttttacctgttacattttcttttctattatcaattttttcttttctacactttttttattt

SEQ ID NO: 109221 - DNA, 286 bp, Zea mays
  Clone ID: MRT4577_31106C.1
ggcaggggaaatcaatgtaaaaaaccttaaaccgaaacacaggggggggggttaaaagggttttttttaccaattccaaaaaaaaatcccaataaccctcctttttggttccaaggggggcaggaaaattctgtacattgcacactttaaaaaaaaaacttgaaggcattcctttgacaatgtcataaaagggggggggcccttttctattttaacattgcctttggtgggggggccccacttttttttttgtccaaccaagggttgctatcccttaaataatttt

SEQ ID NO: 109222 - DNA, 228 bp, Zea mays
  Clone ID: MRT4577_31107C.1
attctgcttaaccctccgtcatccgggggacttcataaaaccatttgagggtgaccaacctctgatgggaatctactcaagatgctttaaccatctctgagcccacctaaagtacaccatggctcagtctcataaccgcacgatactatgccttccttatccttctgactgatcctttctccacactaccgagaccccggtctgccctactccacaggcaactacacc

SEQ ID NO: 109223 - DNA, 629 bp, Zea mays
  Clone ID: MRT4577_31108C.1
tcgcgatctaggaactagtggtttgcatcacctttgactggatctctacttcctccacaaacttgtctagcgtaccttgagtgacctcgtttgaggccttgacagccacctcggtcttgtcaggtaaattccctttgtgaacctcaccaaatcaggcgttgccaagagacaacgaattgttcatggttattttgccgagttcatcttttgtgaatatttttagagttttcacgttttaagcctctcacttccattctttatctcgatcgcttctagttctatctgcttcagcatatagcatagcataccccaattccaagtatgaaaaaatacggaatcgccaacaatgattccagtaaaaaatatggcagcagcatatacaaatcaaataagtttggtggaataactgcaacgcctaaataagaagttcaaatcaagattcatgtgtgtgaataactggtggcctaagcttttaacataagctaaggattacaaaaatttcaatggtttggaccatggtattgattagcattcgataattaccaacttttgacagcagcctcttatttgatccattggttacgtatatcctctataatagtagagatataagctgagtttttttatct

SEQ ID NO: 109224 - DNA, 115 bp, Zea mays
  Clone ID: MRT4577_31109C.1
cggcagcagcacgcgcgcgacgttcgcaatggcggcgcgggcaaccgtcgtcctctgcgccgcgttcctcgtcctgctctccgccaccagctccctcgcgcagtcccccgcggcc

SEQ ID NO: 109225 - DNA, 1127 bp, Zea mays
  Clone ID: MRT4577_3110C.1
cgtggtccttcacgcccggcagccccgacctgctctacggcaagcggaagctccgggaggtgtacgccctgcgcggcggcgggttcgagggcagggcatcggtgccgatgctttgggacgccgagcgctgcgaggtggtctgcaacgagagcatcgagatcgtcaagttcctctgcgacctcgctggcgacggcgccggtgacctcgacctgtggccgccggagctgcgccaggacatcgaccgctggtacagcatcatctaccccagcgtcaacaacggcgtgtacaggtgtgggtttgcgcagagccaggaggcgtacgacgccgcggcgagcgagctgttcggcgcgctcgacaggctggaggcccacctcgccggctgccgttacctgtgcggggacaggctcacgctggcggacgtctgcctcttcacgacgctcatccgattcgatctcgtctacaacacgctgttcaggtgcaccaggcggaagctggccgagtaccctagcctccatgcctacacgcgcgacatctaccagatgcccaaggtcgccgagacgtgcgacatggaggccatcatggcaggatacttcaagacactcttccccctcaaccccggcgggatccagccacacccgccggccacctgcgatagggagtcgctcttgaggccgcatggtagggaggccttgtcctctgctgctggcacgccgcttgaagcagctgcggtttcataattcattcaggctttgaacaaaacttctgaaactgcagaaagagtttatagttctaccagatactgatgcttcagcttcacaggatcaaatcacatcgcagtaactgccatgtgcaaattcttattttgtccatataagtcactggttaattatattggcaagatctgtgctgccaatggtgattatgatagtctctttggatgaagatatatttggttctgctcagtgtacctaaactagaatacttagtgtaaaaaatcgctcatgtttgaacatgtaaataaattttgtaaagcagttgatcagttgtataatggcatgtgttctgttcaatagaatccgttacagagacatcttttgtctgtgcttatatacatcagaactgtctgc

SEQ ID NO: 109226 - DNA, 1162 bp, Zea mays
  Clone ID: MRT4577_31110C.1
cggcgggatccgtcgtcgtcgtcagcagcttctgcttgctctggggggaaggagagagagagagcgagagagagatctagtagagaggctagctaggtggtcctcgaacgaagatgttggcggtgttcagcgggcaggtggtggaggtgccgttgtgattggcgccgtcgggctgccggacgccgtcgcccacggacgcgtgggcggacgcgtgggcggacgcgtgggcggacgcgtgggcggacgcgtgggcggcaccaggacgcagcagcatccatcgcgtgcgtacattaatctacggcagcgatagcgggtttgttgcagcagcatccatcgcgtgcgtacattaatctaagcgatcttcatccagccttctgctctgctccctcgaaatggaggcgacgagcaaggcgatggcttcaggcctcctcgttctgctgcttctcatcaacacaggctttgtcctgcccgtccattccgaggactgctgggccgacacccgcgtcatctgcaccaagacgcacaactgccgggacgacacttgcgcggggcgcggcatgccggacggccgctgccactgggagttccccaacctggtgcccttctgccagtgcctgcgccccaactgccactagtccgggcgcctcggattggctcacttcgccggcgatgatggatggtgcccaactgcgactgcccagtctgctccattcgttgttgtttaaggcataatatataaactgccaaattcacatgtattttgggatatttgttatcatactatgaaatgactgtgaatcgttgttctgatttgtctttcaccacatgttttccttgcatgaagtaatatacgatatttatgcaaaaaaaaaaaaaaaaaaaaaaaaaaaaaaaaaaaaaaaaaaaaaaaaaaaaaaaaaaaaaaaaaaaaaaaaaaaaaaaaaaaaaaaaaaaaaaaaaaaaaaaaaaaaaaaagaaaacttaaaaaaaacataaaaacgataaaaataaggtgactaaaataaaatacagaaacacaaaattcaaaaaaaattaaaactagtaaaacaccagtagacacctaattaaatggccaaaccgaatattgatcataacaaatacttacgtcaaaacaaagagttcttcacaattggccttttcc

SEQ ID NO: 109227 - DNA, 211 bp, Zea mays
  Clone ID: MRT4577_31111C.1
gtgatgctcggacccactgaaagcacatgatataaaaaatctacttaggcgtgtaacattgaccgagcatctgaagtcactgttacacgcctagtagtattttttgttcagacccaacgaaagcaatggaaaaaaaaatctactatgcgtgtatcagtacccatcgtctgagtcactgttactgatttgccttgcaaaatagaataaaact

SEQ ID NO: 109228 - DNA, 361 bp, Zea mays
  Clone ID: MRT4577_31112C.1
gtagtcggttctattctactatttacggttgctgctgccttaaccattgtcatgttatcatataaacacacttactgatttttttttctcgaacacgtgggagaaccacgtttcaatatattaagaagataagaaaaaaggtctagaaaagacccagtacaaaggtgccaagaaagcacccacggaaataaaaaaccaaaaatcaaactacagctaaacctgcctaagagcagcagccccgccaagaccccataacaaggcctcatcatggatggacagcaaaattgcgtgaatgtttggggaagcattgtcaaacacacacgcatttttatgcttccaaatctaccaagctactaaaatt

SEQ ID NO: 109229 - DNA, 1815 bp, Zea mays
  Clone ID: MRT4577_31113C.1
ccggccgggctctccctccccgtgcgccgcctacagcctaaacgcaccgcaccagacaagaaacaaggggagggagaaccgagagcggcggcgaccggcgagagagagggagggagggacgagatagattcataggtactagcggaggaagcgagtcaagggaaagatgcggactcccgcgatgcgcgttgcctaaaagttccatttcattccttccggcggaggccgggcaatacgctatctctggcgagagagatgccggcgacaggagaaatccacggcctttattagagagaagagatcctattcctacggttctcctcgcatcctgttgcttctgcgtgcggccagacgcgggcacgatatgcaggccgccgccgccgccgccccgtggacgacgaagaccctgccggtgtttgggaaccacctcggcaaccccacgcgcttcacaggcgcctcctcgtccttccacagtacgcccgcctccttcgccaagtggaggaacaaatgggactgccacaagagcgaaaaaggagcacgaaaggcatccaggaattatgagaggtatgtggttcggcaaaaacgagcagaaggaaagaaggccctaaaggattatcttctctatggaaagtcattgcctcatttacaggatggaagcacaggtagctttgctaactcacatgcaattccgaggttcaaaacgtttaggaaaggacctcaaactcactggtcatcgaattcatggcaaggcgtacacaatcacagaaagaataaaaaggacaaggaaaggttctgcaacttcttccatgatgaccatcatgtgcaccctgatgacatctttgaagctgtcttcggggcacattatggttttacttggtctcaaatatcgtgggaagggtttcacttcagggacaaatcgttcagatttagatggagcggccgtgaatcacgcagagagagaattccatgtgacagcgaagatgaagaaagcgcggatgagagcagagaaacagccagcgttggttcacatgctcacagggtcatccttggattacaaccatgtggtccactaactctagaagatgttaaaactgctttccgggcatctgcgctgcggtggcaccctgacaggcacccggggtcatcacaggtgtgtatccaaacaaattcaggccatggctgaggagaagtttaagctgtgcgtgaatgcgtacaattcactctgcagtgtcctcaaggctgcttaggttgtgtttgctgtcactggaggatgttagcttgttatggtatatcagttttgaagggctcagggcctgaacaatttggcggggaaaccactggcgaccatggatgcagtgcagtgggttgttttgtttcacttttcatttcgattgaaatagcaagggccaagctccgacgtcagggttgatttggtgattgagggggaaatggactaatttccccccaatcctctcgtgatttctggtcaccaaatcagccctgggaaacttaaacccccgggatccctgcctttaaaccctctgggatctctgcattttctcagggtgagcaatccatcggggtaccatttgaattaaacatttatttccttatgtgaggttttcctccctgtatttggcctcccttgcttccaaactagtcccaaaagggataggagcgccactgtttgttgttgtactaacttgtacactagtgtgaattgtaacatttgattcataaaagtggaacaaataaaaatacaaaggggcatgtgaggcatgagaatcctgcaaaaaaaaaaaaaaaaaagcggcc

SEQ ID NO: 109230 - DNA, 434 bp, Zea mays
  Clone ID: MRT4577_31114C.1
gtttgagctttcatcgtcactaaattctttttccccttgctcttgcacttagtgaggtggtggcttcgaaatttgaatgcctcatttttattcttctcatcttctctgtctttctcatccctttccacatgtgtgactactgactacatcacctaatacttaggttgaggttactccttttagccctgcctctcacaatgattgtgactagagtgtcaaatcttggaggcaagcaccttaagaacccagcatattttgctctcttgtgtgttctctagaaacatttggtggcaggtgtggtgtaaagtggggctgcattacctggcacctgggcctgagaacatgattttccaagattggtggagcaatgccgaaggccaggtttttaaagagaagagaaaaggttttaacacgttggtaatcctcgtggcttg

SEQ ID NO: 109231 - DNA, 379 bp, Zea mays
  Clone ID: MRT4577_31115C.1
atccatgtcaagtgagttagagaagaactttgctgttatgttccctgcttgctcaatcgccgcgaagctccatattgtcctgagcacaactattcttgacgtgcacagagaggggatgttgcatttcaggaaagctgcaagggtgctgattggcatgcttctgaagattgatggtgaccattttcctgagaccctgtgccgcatgtgcatgatcaatgccggccagggattcctgattctatggggcaccgcgaagagctttcttgacccaaagaccaccgcaaagattcatgcggtgggtaacaagcatcagagcaagctcctcgatgtgatcgatgctagtgtgccgccagaaattccaggtggtacctgccgatgt

SEQ ID NO: 109232 - DNA, 495 bp, Zea mays
  Clone ID: MRT4577_31116C.1
tgcatttccatttcgcctcaccggagatgagatcccatcgacgcgacgccgccgcctccttcctcctcctctcgtcggagccaccgccgggagggattcatcgcgagcggcggctgaattggaacaggtgaaaccaatgcagccgcacccgcagccagtgaggagatcgtcgtctccggcctccgggaatagcgtttttgatcgaagacgcttatgaagtattttcagaatgcggagatgaaaggttcgaagcagcctagaagatccatggacgaaaatactaatatgataagtagttttcatcgtacatatggagtgtatgttaaactaaagaaaaacttctacatggttcgtgggacaaaaatgatgatactagtgaattacaacttaaatatgtggccaatatcatgatcatctcagaaactggctggtcatcacagcgagaactggaatcaaataatcgaaatgccgacgtatcacagaaaaagataagcc

SEQ ID NO: 109233 - DNA, 194 bp, Zea mays
  unsure (1)..(194): unsure at all n locations
  Clone ID: MRT4577_31118C.1
cctggaagcagtggtaacaacgcagagtacgcgggcacgcgcagaaggggcaccggacagtctacaggacctgtccggtgcaccaccggacagcccagaggccccaccagttagagctccaacggtcagaacccaacgaccggctgacgtggctggcgcaccggacagtgtccggtggggcaccgnactgtccg

SEQ ID NO: 109234 - DNA, 546 bp, Zea mays
  Clone ID: MRT4577_31119C.1
atcccccaccgagctttgctacatataatatcatgataaaactgagctgcatgcacataagacgacaagtcgaggctccatcctcctgaaggctgcatcccctccgtcgtcctcgccctggtcctgctcatgctgagaacgccgacccgacccacgcacagcgacccctactacccccgctactgatacgacagcatccatctcctggccgcgatcactcgccgacgagcttccccttcttcgacaacggagaaaaggatcactcttctgctctgctctgtgatgagctacaaagtagaaatccgacggggagttcaatacaagacctagacgtgcacaatacaataaatcctgctggattgattgattgtatggaaaaccgttatgttattattgagatatcaatgtgactactgcataaagctgctcgcgctgtaacctgatacgatacgcctgtctgatggtaaaaaattaattgactactggaatttggtgacttagtgatcatgaaatatcttatttttgtaaggcagcagcaagagcgcc

SEQ ID NO: 109235 - DNA, 1290 bp, Zea mays
  Clone ID: MRT4577_3111C.1
tgccgctgcatctggagtaggagaggccttcgatctccagtagagaagtcattcggacatgtgggccacatctccaccgccgctcccagtccagctccggcgaccgccgcatcctcgcttcatcgcccgccgccgtaacaagcggctggaccgcatcgcggcctcacaggacccgctaaccgcgctgacccgggtgctgtggggaggcgcgctgccgccggcgcagctcgtcgtcgccgtgcgccacggctggaccacggcgtggcagctcctgatgcggcagctggcgccgtccgaccccgcgacgggcggcttcgcccgtgcccctgcccgcttccccgccgtcgtggggaagcccagctcccggctccacctctacgtgggcctcccctgcccctgggcgcaccgcgccctcgtcgtccgcgcgctgctcggcctcgaggcccgcctcccggtctccgtcgccgtccccggggacgacggcgcgtggtccttcacgcccggcagccccgacctgctctgcggcaagcggaagctccgggaggtgtacgccctgcgcggcggcgggttcgagggcagggcatcggtgccgatgctttgggacgccgagcgctgcgaggtggtctgcaacgagagcatcgagatcgtcaagttcctctgcgacctcgctggcgacggcgccggtgacctcgacctgtggccgccggagctgcgccaggacatcgaccgctggtacagcatcatctaccccagcgtcaacaacggcgtgtacaggtatatcagatcgtcaattgcagcaactggattctctggtcctcactgctagtggctttcaaattgtcaactgcagcaactgataactatgtcattctgtgaccaaattgtcaattccaaggtgtgggtttgcgcagagccaggaggcgtacgacgccgcggcgagcgagctgttcggcgcgctcgacaggctggaggcccacctcgccggctgccgttacctgtgcggggacaggctcacgctggcggacgtctgcctcttcacgacgctcatccgattcgatctcgtctacaacacgctgttcaggtgcaccatgcggaagctggccgagtaccctagccttcatgcctacacgcgcgacatctaccagatgcccaaggtcgccgagacgtgcgacatggaggccatcatggcaggatacttcaagacactcttccccctcaaccccggcgggatccagccacacccgccggccacctgcgatagggagtcgctcttgaggccgcatggtaggg

SEQ ID NO: 109236 - DNA, 186 bp, Zea mays
  Clone ID: MRT4577_31120C.1
ctgctgtttttgattatatacctcgacatagatctgtgcaaccaagtttattcaggcgacaatcaagcgggaaagaaaacctcgcactcgaacggaatcctgttcccataaatgctacacacagagaggccctgcttctacaaccgacagataaaagagctgctgtcgcacgtcacgagataccac

SEQ ID NO: 109237 - DNA, 620 bp, Zea mays
  unsure (1)..(620): unsure at all n locations
  Clone ID: MRT4577_31121C.1
ccgggttcgacccacgccgttctgcatctccgnnncgacgatcgccggcgccccccctcctccgaacgccgcggctgccgtgcgcgcgataggtgacggacggcagctgctatgtgttcttcatacaccgcacactcagtggaggaggatatatatactgtagtatatagctagagtaatattagttggtaagcatggatcgattggacatgatggacaacatcaactgccgtcgggtgatgacgaacaaaacacgcatcgaagctcaatcctcttcgtcggtcgacagagacagggagaaggaggaggacgaagcacaacaggacgaagtggccgaggcgatgaaggcacccctgctgggttggaatcacaatcaccacgaagcggctggcggcattggcaacaacaggaggcggcttctgtcaaagcagctgtcaatgaaggagactaccagggaggccaaatgggagaagcgccggcggcagatactgcggcgtagcagcatggtatcgctaaatgacggangaagcggtagcagcaagagcatcatcgacgaacggcattattgtcatcatgttatgaggtcttcgtcggagtgcgtaatgaggcgccctgactga

SEQ ID NO: 109238 - DNA, 331 bp, Zea mays
  Clone ID: MRT4577_31122C.1
attcggctcgagtgactctagagcgtgtttgtgtggatatctgtgcaccccctttggcggggcaagggtgcctgggttgcgtacaggcaaaaggaacgcgcggatgctgtcttgcgagcctttcgcgtgctatcattgtgcatatgtatgccgccgcgcacgcccctgacgctgacgtcgaaccttacgattccgtgatcctgaagggtttcgttgttcatactatttactaagagcagggtcggaacccggctggccttgccgtcatgtttgtgcacggccgtactggagcgcgcacagtagcccggcaccggaggcgttctgacagcgc

SEQ ID NO: 109239 - DNA, 402 bp, Zea mays
  Clone ID: MRT4577_31123C.1
caggactctcttcaagcttctcatctcgctcaaggggggtcatctgatatcagggagaggttgttgaaggccgttgctgcgctagccggatctaatgtcaatggcaccttatgcttttcacacgaagggtatagtgctaccaccgttactggaagaatcttttgcctcaagtgatgcttgcatgggttccatgtgcacgcgcttggcaacacctgcaacggctgcatagcaactgggccactcttcaatcctgctggcgatgatcattgtacactttaagatcttgaccgacatgccggataccactggaactggacagctttagaagaaacgcttgaatatgacgatatgactgtcaacttgatctcacatgctagaccctactagataattggccgagct

SEQ ID NO: 109240 - DNA, 1137 bp, Zea mays
  Clone ID: MRT4577_31124C.1
atggctgtagagaagaaggtagtcaaccctacattggctgggttttatgaagctatggagaagacgaacacagagaaaatcaccaatgaaatactggctgggttatctgaggattccggcgatagtgaaagttttgatttggagagtggaaacgaagatgccgaagatcggccctggcggccgagtcataccatgttcggaaaatcaaccatcaagcaaagtcggattgatgctatgaaaggaagatatttccgtgatatttctattgtgagggctgcaggagatagcactgcccctgcacccgaagtagacgaagttgttgtctacaggagcttcatgaaggcagggcttcagttttccttgagtaaatttttagttgaagttctgaagacttttgagatttaccttcatcagattacccctgaagctatcatcagaatggggattttcatttgggccatgaggagccagggactagagccgagtgcaaaatgcttctgtaacatgcatgagctgttctatgagacgaaggctactggcaaagagcaatatcataataattttggttgttacggcttcgtgcctcgctctgatgtgagctatccagtcccgacgtttcggaagaggtggccaggagcctggatggaagagtggttttatgtaaagaacaacttagttgaaagagaagatataaaggggatcatccaatgcactatttggtgtcgcttcggcatcagcatgccagccactgctcttggaaatgaaattgaagcatgccagaaggcttttaatagtttatgcacttttattggcacaagagacttagtccaagagcatattgcttatagaggaaagaaaagaaaagctattgcttcagccatctctgctacgccgaaaggtaaaaagattaaaaatttgacacaccggcccaggtacattgaaacgaccagtgtgccgaagcttaccgaggggccttcttccgctgttgagccagagctccccgctcctgctgaagcgacaacgggatcagccgaagaactaattctgaagacagcagcggagcagacagaagctgaaatagccgatgtgctgaattgtcctgccgaagctaaggcaaaaacgactgaaaagccataa

SEQ ID NO: 109241 - DNA, 1474 bp, Zea mays
  Clone ID: MRT4577_31125C.1
accctcgccgctccacgccctcgcaccgcacctatatctcgccctcctcctccccccccctctccccacccaccattcgcctgcgctctccgcttccctcccgccgccgccttcccccggtcttctcgcttcagaccagttaacataaatggctgacgcggaggacattcagccccttgtctgcgacaatggaaccggaatggtcaaggctggctttgccggagacgatgctccacgtgctgttttccctagtattgttggccgtccacgccacactggtgttatggtagggatggggcagaaggatgcttatgttggtgatgaggcccaatccaagaggggtatcctgactttgaagtaccccattgagcacggaatcgtaagcaactgggatgacatggagaagatttggcatcacaccttctacaatgagctccgtgtagcacctgaagagcaccctgttcttcttacagaggctcctcttaaccctaaggccaacagggagaagatgacacagatcatgtttgagacattcagtgttcctgccatgtatgtcgctattcaagcagtcctttctctatatgctagtggccgtaccactggtatcgtcctggattctggagatggtgtcagtcatactgtcccaatctatgaaggctatgccctcccacatgccattcttcgtctcgatcttgctggtagggacctcacagattccctcatgaagatcctgaccgagaggggatactctttcacaaccactgctgaacgggaaattgtccgtgacatcaaggaaaagcttgcatacgtcgcgctcgactatgaacaagaactcgagaccgccaagagcagctcatcagttgagaagagctatgagctgcctgatgggcaagtgatcaccataggcgcagagcgcttcagatgcccagaggtgctcttccagccatccttcatcggtatggaagctccaggaatccatgagacgacctacaactccatcatgaagtgcgatgtcgatattagaaaggacttgtacggcaacattgtcctcagtggtggatccaccatgttccctggcatcgccgaccgcatgagcaaggagatcaccgcgctcgcgccaagcagcatgaagatcaaggtcgttgctccgccggagaggaagtacagtgtctggatcggaggatcgatccttgcatccctgagcacattccagcagatgtggatctcaagggctgagtatgaggagtctggtccagctattgtccacaggaagtgtttttagacatcacctagccttatgctcttcgtggaaatatctttgtttgatgacatatctatgggtggttgctctgctatagcttgcagtttttgtgtatgccatatatatatccatgccctgtaacgttgtggagtcagctgagcactatatgaagtatgtagtttggtttgatatatattgattggattattactc

SEQ ID NO: 109242 - DNA, 332 bp, Zea mays
  Clone ID: MRT4577_31127C.1
cccacgcgtccgcttcaccttcgggtttctggacagccgctccgctatatttcaccggactatccggtgggtcatcggactgtccagtgtgccagggagcaatggctaagaaacgcaacggtcgactccaacggtcgcctgcaacgtgaacagtgcgcggacagttcgcgcagagtcagagcagcgccagaaggcgcactggacagtgaacagtacctgtccggtgcggcaccggactgtccggtgacccaagctgtcagagctccaacggtcaaaattgtcagaaccctaacggttgggtgacgtggctggcacactggacagtgtccggt

SEQ ID NO: 109243 - DNA, 884 bp, Zea mays
  Clone ID: MRT4577_31128C.1
aactttccagtgcggcaccggcctctccctcctttacatctcattcccaccgtcaccggccaccacccccgccgctcccacgccctcgcaccgcacctatatctcgccctcctccttcccccctcttcccacccaccattcgcctgcgttctccgctgcctcccgccgccgcctccccccggtcttctcgcttcagatcagttaaagtaaatggctgacgcggaggacattcagccccttgtctgcgacaatggaactggaatggtcaaggctggctttgccggagacgatgctccacgtgccgttttccctagtattgttggccgcccacgccacactggtgttatggtagggatggggcagaaggatgcttatgttggtgatgaggcccaatccaagaggggtatcctgactttgaagtaccccattgagcacggaattgtaagcaactgggatgacatggagaagatttggcatcacaccttctacaatgagctccgtgtagcacctgaagagcaccctgttcttcttacagaggctcctcttaaccctaaggccaacagggagaagatgacacagatcatgtttgagacattcagtgttcctgccatgtatgtcgctattcaagccgtcctttctctatatgctagtgggcgtaccactggtattgtcttggattccggagatggtgtcagtcacacagtcccaatctatgagggttatgcccttccacacgctattctacgtcttgatcttgccggtagggatctcaccgattccctcatgaagatcctgactgagaggggttactctttcacaaccactgccgagcgggaaattgtccgtgacatcaaggagaagcttgcatatgttgcccttgacta

SEQ ID NO: 109244 - DNA, 431 bp, Zea mays
  Clone ID: MRT4577_31129C.1
cccccctcgaggtaggttttttttttttttttttttttatataaaacgattccgttgccctctatgcccaagtatatccgcgtgtattagtggtgattgccctaagacagtctatggaacccgtgcgcaaataacaactcaggacattatgtcatgacgcgagattgttaaaagcttcgaacatcataaagtctctcaggtccttccttcctggacacgtaccaaagacacgagcaggcgggactggggtgcggcttaagacttgtgctgatttcggagagttgtcgggcgtgttcagtggtagttcctgtgccttgcttgtcctgcgagactcaacgcattcttgaatgcctccctggagggcgggaacttgaacttcaaagccaacgtaacgagggtgatcggctacgtcgcaatggtgggcatacagg

SEQ ID NO: 109245 - DNA, 284 bp, Zea mays
  unsure (1)..(284): unsure at all n locations
  Clone ID: MRT4577_3112C.1
taccatacataatttacatccattttccttantaataaattatggatcgcntcttttaaactatcggcgcaccctcacctaattctattnaaaacttttnatttaccaacaaaaaagaaaaaaccaacatgtaatcctcacctactggtctaccttatctaccgtccacttaattataaccaattttttttattttttaaaaaaaaaaaaaaaaacnnctgcctgttttcccaaaaaacccaaaaaaaaaaaaagttcggaccntttnnggggtccaagcttac

SEQ ID NO: 109246 - DNA, 816 bp, Zea mays
  unsure (1)..(816): unsure at all n locations
  Clone ID: MRT4577_31130C.1
cattgggaccctcgaggccggccgggtatacactacaccatcatcatgggcggcatcgaaccagaccacgagatcaagcactcccacgaataccgtgccctcaccacctacctatcanacaaacctcaacctctcagcaacgcccaggagtcattctgcaaacccaccgaggaatccttcatgagctcccagagcgcttcagaagtcgagactcatctctggcgtgtctggaaagccgtcgttgccactgccacacaaacgccacacgattctcccgctcagcagaaactggccgatttcgtcctggagctgcggaaccgtcctaccctagagcgacnaggcaaggtgtgcaaagtgtgggaagcggccgtgtggaaagatcttcctattctcggaccgcaaatgagagaggcatggaatgatgccgccaccgatcattcgcaccatcacgcccgcaccgcctggatcaacctgaacgctttcacggcgacactggtcaataccatccactcccggagcatcactttcccgcccgacaacgacttctccctctacgcaatctggaccatccgcatggcgctcgaggacaccgatggccagcanaagaccgacnagacctccttggaagcagcagcagcatggtttgcctacgcagcgcccactctttggaagctctctagcgaaggcnaagagttccaaggcaagattgcgaagcaaggccaagcgatgcanggcaaggagtggagaggattctccgaggnanaggtgggatcattgngaaaagaggatgaaggcgagcggtgataagggcttggt

SEQ ID NO: 109247 - DNA, 119 bp, Zea mays
  unsure (1)..(119): unsure at all n locations
  Clone ID: MRT4577_31131C.1
cgccactgcaccgccggcgaaccaagggaccgcaacgccgcggagcacgctgcaagagcacgagccgcaccacccaggggcggccgncagcnacnnacaacanggaggagggagaaacc

SEQ ID NO: 109248 - DNA, 260 bp, Zea mays
  Clone ID: MRT4577_31132C.1
atttaatatatttattttaaatacaagcaatgacgggggggggcctcaaaaaagaggaagaatgaacataaacagactggtattacacacaaccaacaggattgaaagagggtaaaaaatcaagcgcgacgcgagagacaagacaaatcagcatgaacagcgagagagaacgggacatttatatataggcacagggcgcagccggcgtaaaaatacatacatgaccatcatgattacaaaggacagaaggacaaatgtaa

SEQ ID NO: 109249 - DNA, 429 bp, Zea mays
  Clone ID: MRT4577_31133C.1
ggtctcttgggttttcccgggttttttggtaccgggcccgggtggggcccgagctttccgtacgggggggggggggggaccggggcgtacggggggggggggggggggcctgggggaaatccttagccgggggcgattccagggggaaagggagccgggggcaaaaggggaaaggggggggagcctaaggggggaactaacccacaaaaataggggggggagcacgggccgctaaaaagggggggaaccagagagggaaggggcttaaataaatggcccaacccccggggggaggctttttgggcaaaaacccccaggggaggggccctttccaaaagggaaaccggcaagagaaaagggccccccaggggggggccctaagagagggggccctagaccaccagggtgggttacaccgggaggccaaaa

SEQ ID NO: 109250 - DNA, 414 bp, Zea mays
  unsure (1)..(414): unsure at all n locations
  Clone ID: MRT4577_31134C.1
tccacgcgtccgggttgacggaggttttttgccttttgcgaggggggagagaaggagcaggagccgcaagcggngcccacttccggcgccttctacatgcacgatgaccggtttcaggaggagaaccgtggcagacgcaggtgtgtgtggatggcttaaaactgcacattcagttctagctgtagaatcacagttattattacttagttttaagttgggcgggaggcttcgggcctttagctctgagtccagcattgtcaaaacggcacgaccaaatgctctcgtactttcagctcctaaaattgataatagcattgaactaaatgctgactaattctaatttaagtctgcaatttttagtcaacaacactttgtctgtcattaatactaaaaaaaaatgatgataaatttcaa

SEQ ID NO: 109251 - DNA, 327 bp, Zea mays
  Clone ID: MRT4577_31135C.1
atggccggggccggccacgggctgacctccaactctatggccttctgcccgtccttgcctcacaagttttggcacgggcgggggcctcctggcagcggcatcgagcctgaggtcggcgttgccactgcttggtccctcggagcagaaggcgtcgtcgtcgccgctgctggagcgggtgacggcgcaccattcgtcggccttccgttgctccgcaggccttccccctcggagtggggttgttcgtacctgcggaggggaaccagagttccgtttgtaatggcacttcgaatgccagtgagttcgttcattgtggctgtcgaggcctga

SEQ ID NO: 109252 - DNA, 485 bp, Zea mays
  Clone ID: MRT4577_31136C.1
aaagcaaatttgccgagaccgtataatatttgtattgtatttaacagttataatgatacaacaaatggtacaaatgttacgattacaataacaataacaaggtaacgccaaatgtggggagaattacatgcactatgactgatcctgtaacttattcgtattttctaaatggtatcaaccggaaaacgacacacaaatagttggacaaaatccattttgcccccggtagttccacagactttaactttgccaccatattgttaattgcgtagaacctaactccattgtggctttgtgcttacacagtggagagttcctgtacgtttaaaacaatagctgctacaatgccgatgcacctgcccgtgagtatgcaatactacagaaagttgacatgctagtggcatagcgccatgcgtagcaatggacacagttattttgatacagggacttgtttttgaagaacattaataccacaatggagcaaa

SEQ ID NO: 109253 - DNA, 210 bp, Zea mays
  Clone ID: MRT4577_31137C.1
acccgtccgatcgtcataaattctttgtttagcccaagccgcgacttgagcgcgacaagcggggagctttctctctttttttcacatttacacacaaaacaaacctataaaaaaacaagcgcgatctggacacgctgagaagggaccaaaggccaaccagggaccgagacgcccaaggaggagcgcgccatcgcgagagcgcaaggctgt

SEQ ID NO: 109254 - DNA, 187 bp, Zea mays
  Clone ID: MRT4577_31138C.1
gccacgcgttcggagacgcgtcagtctggatgccaaaggggacactatctaagtagggggggggcaggacctaatttctttcacccgtaaaaccgtacgtactacaggaaacactcgtctgcttcaagctgagatagtgcagatatttctaggcaggagtcatcaccacttgaccgactacttaaag

SEQ ID NO: 109255 - DNA, 373 bp, Zea mays
  Clone ID: MRT4577_31139C.1
acacaaacacgcagcacacactaccgtatgattcagccgagcggttctgctgtccacacccatagcgccaaggaagatagagagattgctgttccccttctcttccaacgagccgcgtgtgctctccctcctcgagccgagatcgtgctacacatactatttgacgaaatggcgaatatctgctcgtataatggctgcctatggcggcaggaccaaccatggccgtcattgccctcaaatgcccaaacattgacgtggttacaagatacatgtccaagccccagacggaggactgaagcagtgacacactgccgatcaacccaactgcgctcgacaatcatgctgatatcggctcacatgcaatccgcagtat

SEQ ID NO: 109256 - DNA, 301 bp, Zea mays
  unsure (1)..(301): unsure at all n locations
  Clone ID: MRT4577_3113C.1
cccccaaaaacccccgggttcgacgccaccgctgcttaaaaaaagagaaaacacaacaacatggtggcgtggtgggcaccagacagttgcgtctcgggctctgacacgcaactcagcttggtgccttggttacttatctaacctgcagctctagttgtacataccggaattcgtgcctatctggacttctgacgtcagatttagaggattctttgttgggggccgtgcttttagtattgcccgagatatgttgatttgttctttgcttgcaattgtgtnaaaaaaaaaaattcaatccgcg

SEQ ID NO: 109257 - DNA, 164 bp, Zea mays
  unsure (1)..(164): unsure at all n locations
  Clone ID: MRT4577_31140C.1
gggtagactcgcatcgctgatntagagacagatcacagatagctcagtgaactgtgctcaatatcactgtcagatcctgcgagctcgtcatgatccacagaggntgagacgatcatatgcttctacacgcagagaagatggaatcttgagtcttagctcgtcgt

SEQ ID NO: 109258 - DNA, 199 bp, Zea mays
  Clone ID: MRT4577_31141C.1
acggaattcggttctacacatgatcactggtctccttgagctcaccttacaacacccgaggtacggtgcatcagatgtccctggacagtaaatctggctaaacgacaatgactgtcggccggatcggaaccacaagacataactcttgacccagaacgaggcgccgtgtcccgacttcctaacatcgacttatgccgac

SEQ ID NO: 109259 - DNA, 1230 bp, Zea mays
  Clone ID: MRT4577_31142C.1
cattgggacctcgagccggccgggaccttcacagaaactgcaaaaaggccgactcctctcttcgtcctccccctccctcctccatcccattccataccattccgccaaagaagaaccacagacgctcgctcccaactcccaagccaagccggatcccaaaatcggcacagcgcacccactccgctcagtcccttcgttcacccccatccatccagccagccatgggcggcaaggactgcggcaaccacggcgaggacgacctgcggcggtcgtgccggcgcctgctagcgatcctcctagtcctggccctgatcgtgggcgtgatcgcgctgatcatctacctggtggtccgccccacgcacccgcgcttctacctacaggacgcgtcgctccagcagctagacctctccaactccacctccccgtcctcgtccctcctctccacgacgctgcaggtgacgctggcctcgcgcaacccgaacgagcgcgtgggggtgtactacgaccggctggacgtgtacgcgtcgtacaagtaccagcaggtgacggtggccgcggcgctgccgcccgtgtaccagggccacggcgacgtggacgtgtggtcgcccgtgctgtcgggccccggcgtccccttcgcgccctacctcgccgacgcgctccgccaggactgccaggcgggctacctcgtcctccaggtcaaggtcgacggccgcgtgcggtggaaggtcggcagctggatctccggccactaccacctcttcgtcacctgccccgcgttcctcgtcaccgccggcggcaacggcgcgcccggcgcttccgggttcaggttccagaccaccacctactgccacgtcgaggtttaatagattaggagcgagaggaggaggagggaggggaaggaagcagagagaccatggtccatggctctgctgctcctcctgctgccgttgcctggtgtggtaataactctctctatctctctctctgtccgctgctggcgttactgctgcagtgatgcgggatgtaaaggaggggtaaaaaagttcctttcgttttcgcctccctcttttttttttgtttttttttttttgcatcttctccttcacctttccatatactactagtatgctctgtcgactgttgttcaaaggaagcttccaattgtcaataaacattttggatcggaggatcaattgcaattaaaaaaaaaagaaacgctcaaaaaaaaaa

SEQ ID NO: 109260 - DNA, 246 bp, Zea mays
  Clone ID: MRT4577_31143C.1
atggtctaagattaacaccggggtgtttttaaggaaacccaagggactttaaacaatacagaagtgaccaacaaggcaatggaagtaatgacgctgggggcggaaatcaactcttacgattgccgaaaacaggcgtccaacaccgcgcagaccggggagacaagcatcaacttcacctaaagggggggagagttggggaactccagggaggagggcccacccagggcacttgaccgccaggggcgc

SEQ ID NO: 109261 - DNA, 345 bp, Zea mays
  Clone ID: MRT4577_31144C.1
gtggaatcgaaatcattttgcttctgctttctttgtcttctttccatggcggagcggcagctggtattgtcctggtggaaatgtcagtgcagcctctttttgcttgtcttgttttgcaattgtttggctggcctccactttttgtccgatgtcgggggcgaacagggattcatcatcatatcgtgcgaatcttgctctggatgcacaagaaaattctctcttctactgctctttccccccccccacaaggcctattaacaaacacgatgcctaagctcatgatcaaaatctgatgggcatgcctgacctatctgcccggtcatgtcgtgatccaccttgcaaaat

SEQ ID NO: 109262 - DNA, 2727 bp, Zea mays
  Clone ID: MRT4577_31145C.1
ggtaccactcgggtttggccgggagcactcctctcttcgtctcctccccctccctcctccatcccattccataccattccgccaaagaagaaccacagacgctcgctcccaactcccaagccaagccggatcccaaaatcggcacagcgcacccactccgctcagtcccttcgttcacccccatccatccagccagccatgggcggcaaggactgcggcaaccacggcgaggacgacctgcggcggtcgtgccggcgcctgctagcgatcctcctagtcctggccctgatcgtgggcgtgatcgcgctgatcatctacctggtggtccgccccacgcacccgcgcttctacctacaggacgcgtcgctccagcagctagacctctccaactccacctccccgtcctcgtccctcctctccacgacgctgcaggtgacgctggcctcgcgcaacccgaacgagcgcgtgggggtgtactacgaccggctggacgtgtacgcgtcgtacaagtaccagcaggtgacggtggccgcggcgctgccgcccgtgtaccagggccacggcgacgtggacgtgtggtcgcccgtgctgtcgggccccggcgtccccttcgcgccctacctcgccgacgcgctccgccaggactgccaggcgggctacctcgtcctccaggtcaaggtcgacggccgcgtgcggtggaaggtcggcagctggatctccggccactaccacctcttcgtcacctgccccgcgttcctcgtcaccgccggcggcaacggcgcgcccggcgcttccgggttcaggttccagaccaccacgtactgccacgtcgaggtttaaattaggagcgagaggaggggaaggaagcagagagccagagaccatggtggctacctctctagctgctgctccacctcctgccgttgcctggtgcggtaataactctctctctttctatctgtccgctgctggcgttactgctgctgcagtgatgcgggatgtaaaggaggggtaaaaaaaattcctttcgttctagccccttgtttttttcatcttctccttcacctttccatatactactagtatgctctgtcgactgttgttcaaaggaagcttccaattgtcaataaacattttggatcggaggatcaattgcaattaacggtgcagccagcgaacgaagtggtcacacgttgatctcggagccagatcgaccgtctttggcgaacgggtggggtatgagtatccctcgtttgacccaaaagctagacgcgcaacaagcgcgtgatgtaggtagagtttggagttttgcttgggggcaaggagccagcagatcagatttggtgtgggggaagccgggaaccccaagtacacacacagcaagcacatggggactctccttctcctgtggtgatcgtcctctactgcccatgccaaagcggtggttggtcgcccagcagcactcatcattcttcttctctctctctgtctgtgtgtgtctctgatcctcactcaacagcagcacacagctgtagcttcacttagccagcaaggaacaccatattgggcgtgcatggtcatatactcaccatgtggtgtgtcagctggtttccttctgttttgtagtactacactagtaggagttgtgccagtttgccgatgcatccgcatgtgcgagtcagcagttggaagcatccatattctcttctgaaaacgaggaagaaaaaaaaatcacgactagagtacacggcttagtactagtagtattatttggaaatttgacgtgggaatctgttcctgcccatacagtagtagtagcctagtagtaggagtagcgagcgacagtagacaagtcacaagtcacaagtgccgccggtagcaatttttttttttttttgcattcccaaaagaaagctctttcctttcttcgatgtacactctcggtggcaccgtttccttttctttgtcgcgcttcaactttgcgcaaaagttttactattttttgcgaagaaatatatattaaaaagagagcatattcaatgtgggggtggcaatgaatgaacgatcgacaggtgccggtgtgtgtcgatggagctagtgccatccgcgcgcgtgtgggggcccccatccatatggcctgcagctgcggaagcggaacgatacgcattcaattccaattcgattcgattcaatttaattcaaaccactctgaagaccatgcgcctcctccctctgggtaggcaggcaggcagctgagcgatgtggaccaccctactgaacacgatggcacggccaattggccaaaccaggagtactcaatttacgctgtgcagtgcaggttaacaacaaaaaaaaaaaaccggcgactcttttccgatactcgaagacttgtcctccgccatccgcatgtggctgccgcgtcgcttctctttctttttttttttttgcttcctccgctttgagtcccgtttgcttacagcgcgaagcaaccccccatgcgtcgtcgtgtgtgtgcagtgcagtgcagcgcagctgtgctcgcgcgtatggccacaccaccaacaccttgatttggatttcgagagggccccgttcgcagcggaggaggtggcgggcttcttcctaccctgcccaccgtcaccgtctccgtctcctgtcgacgctcgcgagtcgtttaataatttaatctgcatcggttcggtaccgatcaccaatgattcgtcctga

SEQ ID NO: 109263 - DNA, 1230 bp, Zea mays
  Clone ID: MRT4577_31146C.1
cctcaggcggcgggacttattcacattggaacctcgattacgctggaacctcgacacaattcggcacgaggcactgcaaaagcactcctctcttcgtcctccccctccctcctccatcccatcacataccataccattccaaccaaagaagaaccacactcgctcgctcccaactcccaagccaagccggatcccaaatcggcacagcgcacccactccgctcggtcccttcgttcacccccatccatccatccatccatccagccatgggcggcaaggactgcggcaaccacggcgaggacgacctgcggcggtcgtgccggcgcctgctagcgatcctcctagtcctggccctgatcgtgggcgtgatcgcgctgatcatctacctagtggtccgccccacgcacccgcgcttctacctgcaggacgcgtcgctgcagcagctagacctctccaacgccaccaccaccaccaccacctccgcgtcctcgtccctcctctccacgacgctgcaggtgacgctggcctcgcgcaacccgaacgagcgcgtgggggtgtactacgaccggctggacgtgtacgcgtcgtacaagtaccagcaggtgacggtggccgcggcgctgccgcccgtgtaccagggccacggcgacgtggacgtgtggtcgcccgtgctctccggccccggcgtccccttcgcgccctacctcgccgacgcgctccgccaggactgccaggcgggctacctcgtcctccaggtcaaggtcgacggccgcgtgcgatggaaggtcggcagctggatctccggccactaccacctcttcgtcacctgccccgcgttcctcgtcaccgccggcggcaacggcgcccccggcgcttccgggttcaggttccagaccaccacgtactgccacgtcgaggtttaattaggagcgagaggaagcagagaccatggctacctctctagctgctgctcctgccgttgcctggtgtggtaataactctctctatctctctctctctctctgtccgctgctggcgttactactgcagtagtgcagtgatgcgggatgtaaaggaggggtaaaaaaaattcctttcgttctagccccttgtttttttgcatcttctccttcacctttccatatactactagtatgctctgtcgactgttgttcaaaggaagcttccaattgtcaataaacattttggatcggaggatcaattgcaatt

SEQ ID NO: 109264 - DNA, 744 bp, Zea mays
  Clone ID: MRT4577_31147C.1
gtgcggcgctgaggcggcgggcggatactcccttccaaattgcaaaagactcctctcttcgtcctccccctccctcctccatcccattccataccattccgccaaagaagaaccacagacgctcgctcccaactcccaagccaagccggatcccaaaatcggcacagcgcacccactccgctcagtcccttcgttcacccccatccatccagccagccagccagccatgggcggcaaggactgcggcaaccacggcgaggacgacctgcggcggtcgtgccggcgcctgctagcgatcctcctagtcctggccctgatcgtgggcgtgatcgcgctgatcatctacctggtggtccgccccacgcacccgcgcttctacctgcaggacgcgtcgctgcagcagagagaccatggtccatggctctgctgctcctcctgctgccgttgcctggtgtggtaataactctctctatctctctctctgtccgctgctggcgttactgctgcagtgatgcgggatgtaaaggaggggtaaaaaagttcctttcgttttcgcctccctcttttttttttgtttttttttgcatcttctccttcacctttccatatactactagtatgctctgtcgactgatgttcaaaggaagcttccaattgtcaataaacattttggatcggaggatcaaaaaaaaaaaaaaaaaaaaaaaaaaaaaaaaagaaaaaaaaaaaaaaaaaaggccccta

SEQ ID NO: 109265 - DNA, 774 bp, Zea mays
  unsure (1)..(774): unsure at all n locations
  Clone ID: MRT4577_31148C.1
cattgggacctcgagccggccgggaccttacagaaactgcaaaagactcctctcttcttcctcccccctcccttctccatcccatcacatatcattcctccaaagaagaaccacagacgctcgctcgctcccaagtcccaagccaagccggatcccaaatcggcacagcgcacccactccgctcagtcccttcgttcaccccccattcatccatccatccatccatccagccagccatgggcggcaaggactgcggcaaccacggcgaggacgacctgcggcggtcatgccggcgcctgctagcgatcctcctagtcctggccctgatcgtgggcgtgatcgcgctgatcatctacctagtggtccgccccacgcacccgcgcttctacctgcaggacgcgtcgctccagcagctagacctctccaactccaccaccacgtcctcgtccctcctctccacgacgctgcaggtgacgctggcctcgcgcaacccgaacgagcgcgtgggggtgtactacgaccggctggacgtgtacgcgtcgtacaagtaccagcaggtgacggtggccgcggcgctgccggccgtgtaccagggccacggcgacgtggacgtgtggtcgcccgtgctgtcgggcgggcccggcgtccccttcgcgccctacctcgccgacgcgctccgncaggactgccaggcgggctacctcgtcctncaggtcaaggtcgacggccgcgtgcggtggaaggtcggcagctggatctccggccactaccacc

SEQ ID NO: 109266 - DNA, 195 bp, Zea mays
  Clone ID: MRT4577_31149C.1
ttcacttcaagcacctacaaacatctgctgggagggcttcaaaaatgtatgtatttgcccaactcactactgaaggcacctattctcgcatggatgacgcagacacaaaaaatgttcaatggagtgaacttgctgctttaggcgagcgggcatgtgctcgacattcacattctatggtctcatatggcacaaatt

SEQ ID NO: 109267 - DNA, 374 bp, Zea mays
  Clone ID: MRT4577_3114C.1
atcaaccacaaccacaacattactttgtggagtaacaccaacaccatcaagtggacatgctacacacaaaaacatcagcatcatcatgatgtttatgttcaacaactgcatcgacaaccggagaaccttcaacaactgcatcaacagctcctacagcatcatttatgtgaaggtcaacaacatcattaccaacaatcacatgggcatgtgcaacatctcgaacagtgtcatgtgcaacacgaaggacagagccgtgagctacatcattaacaacattttcagggtcatgacaggcatatacaaccacaacagcctgatgcatatcatcagggccaggaaaaatcacaacagcaacactgtcattgacaggagca

SEQ ID NO: 109268 - DNA, 810 bp, Zea mays
  unsure (1)..(810): unsure at all n locations
  Clone ID: MRT4577_31150C.1
tttaatcccctcactgcattccctctgagcgccgccactccctgacatcgagaccggctgcccgaccccggtccggcgatccctctgcacccctttctttgcgctgccagccccaatctctcgcatccctgtcaaccatggcggcgtcagcaggcggaggcgcggtgcgcgcgctgtcccagaaggagcaggacatacagatgatgctcgcggccgacgtccacctcggcaccaagaactgcgatttccagatggagcggtatgtctttaagcgtcgcaccgacggtatgttctttcctcccgcatcccttcctttttgcctctccgcatgcgaatccatgtagatgttgacaggaaggaggccgctggcgctccagtgttacagttccgggcgtgaatatcctgggtagacggtctgtggacttgtgtcttcgtatttgtagtgtatgctatgacagaggacaaaatcttagtgggagctgaacttttgtagtccagatacaaatacgctgatacgacgtatggatatggatataaaaaacgatgtttttgttatatggatacgcattaatccaactgattatgtatatgcaaacacactttttatccgaatattttttactattttaaaaaataatgatggtcattaatataattataaaactctcggatatgtgcaatgaaaagcagaaaaaaatgcagagagcccattntaattttgacttaactgaggccgtgtttcgttggactggttacttaaaaagctgtcgtcttaaaatctactagagaaccaaatgtagctgattttat

SEQ ID NO: 109269 - DNA, 306 bp, Zea mays
  Clone ID: MRT4577_31151C.1
ccggccgggaatttattatatgactgtgcccgcgggtgtaccccacgggtaccataaacccgcgggtagcaggtttgggtaacatatgctacccgtcgcgggtaacaggtgcgggtacaggtttaatattaatctcgcgggtatgaatttgtaatctctctactcgcgggttttaaacccgttgccatccctatacactaaccatgcgtacctcgtacgtgttgtgcccccccccccccctgcttgttgccaattatgagcaacctttacaccttacttaccaaaaaaaaaaaaaaaaaagcggcc

SEQ ID NO: 109270 - DNA, 157 bp, Zea mays
  unsure (1)..(157): unsure at all n locations
  Clone ID: MRT4577_31152C.1
ccacgcgtccgtagagggagggcctaaactagggaggccctgnttatnccactcacatggtgatatgggtggaaaccctccatcattcacatnnagagggggatattcagggacatccaagtttaggccctaccctacggacgcgttgcgatcgcgt

SEQ ID NO: 109271 - DNA, 490 bp, Zea mays
  Clone ID: MRT4577_31153C.1
cttcggctcgagggagatatgaaacattttcttgacgccaattgagaaattacgatttaaaggtaacatatagccattgcgatctggcagaaatcatctgttccaaggtgaaatctacttttttgtgcgcgtcagtatttttatgcgcgcgaacacatgtatgctgttattctgttccaatgttagaacatattcgatggaaaggatccctgatgatcctgtccaattgatgtgcagaaatggcacccggacaaatgctcctccttctccatcagcgtgaagcacatggaggaagccaaggagaagttccaagagatccagggcgcctattcggtactctccgacgccaataaacggctcctctacgatgtgggagtatatgatgacgaggacgacgaggatagcatgcaggggatgggggactccatcggtgagatgacccagatgatcagccaggtgcggccgatgaggcaggaaagcttttaggagc

SEQ ID NO: 109272 - DNA, 371 bp, Zea mays
  Clone ID: MRT4577_31154C.1
aaaaaaagggatgaaaccaaaatctgtgaagagaggcaaagcatacatgagactaaccgggctgaggcatacactgtgctgtgcacgaccatatttataaagccaacattgacccaatagcaaaaggggggggtgtacagcagacacactcggtttttttctattttactcgacacataaatacttataataataatagagacaatataagcaattaacaagggcctacgcagattttccagaaaccataggtcgagctgaaactggctcctccggtttggtgggcatactctgtgaacactttgggagcgcaagcatcccatggccttgggaattctcgcagtgacatgggctcagctagaccccggagc

SEQ ID NO: 109273 - DNA, 225 bp, Zea mays
  Clone ID: MRT4577_31155C.1
ataaaacttaagggagtacatcaaacacctggcccagccttccaagctaatcaaaataatttattgacagcctcatgaaatccgggtaaaccttaaggtgacacgaactattattgggcggaacccttaacctgaccaaaactatgatcggggggatccctaaaacaaccaaaaccaccatccaaggagggccaattcctacgccacacattacgccgaaccaac

SEQ ID NO: 109274 - DNA, 257 bp, Zea mays
  Clone ID: MRT4577_31156C.1
gaggaaatgaatccgagcgccacagacaaccggatggcattctgacttttcggcttaaacctcctgttcgcccctagcctccgcttcgtcctgcccgccgctgccatgtataacgccggcggatacacctctaccccaagccccacgttccgcactggggaacaggcgaaggactccccgatccacaactcgaacatccagatcgcggacgcccccctactcctcctctaaggcttcagcagcctcctacgccccga

SEQ ID NO: 109275 - DNA, 1180 bp, Zea mays
  unsure (1)..(1180): unsure at all n locations
  Clone ID: MRT4577_31157C.1
ccccgcgtccgcggncgcgtgggcggacgcgtgggcggacgcgtgggcggcaccgcggtgcgcacgctgcgggacgacctgcccgacgtcttcgtccgggaatccaactacgatatctaccgtgaagacatcacatttgtcgacccactaaacacttttcatggcattgacaactacaagactatcttctgggcgcttagattccacgggcgcctactattcagagaaattgggcttgatgtatcacgcatttggcaactgacagagaattcaatagttgtccggtgggagctgtggggcactccacgtgttccatgggaatcgtatggctgcttcagtgggacgtcgagatacaaggttgacaggaacgggaaaatttacgagcacaaagtcgacaacttggcattggacttcccacgatcagtagcgaaagtgggcagcattgctgacatggtagtcgccacaccgagccccaatttaacgttctggaacgtggttgggacaggtgatggttgctcatggacaaagctgtatgaagccgtgctggaagctgtggaacgggaagagcatagttccacaggcattggcgttggagctctaggccctgttggctgcggatgtggctgcagtttttgaactggaaaactactgtagcttgaactgctgcagccagttcaagcgaagagggcccttaatcactagttcataggatggaatgagctccgggactagttgcttggtagtagttcttaggggaaatgtatagaagaatatatatatatatgggcacatgaatcacgataccactaatatttctctgtatactgtagctataggacagcaaatttagataaaacacatactaggtggctacatttgattacccttgtgaccttgtctcatacagtcatactgaggtagtgctttcactgctttcatatgcgatacatggattttgagtgtgatttgtccagtactagacacagtttaggatgtggaggaaaattgaacatcggcagttgagggaggtcaaaataagtctttttccttctctagatgtgttgtgtctggtttggccggaacataactgaggatttttctatcctcattaatagagataacaatgtcgtcttatataaatcatattgttgttcctcacaaacacagaatgattcatgct

SEQ ID NO: 109276 - DNA, 466 bp, Zea mays
  Clone ID: MRT4577_31158C.1
cgactcagctcggtaacttaattaaaggggatccggatttgttctaaaataaaaaaaattattttttttttttttttttttttttttttttttaaaaaaaaaaccggaccccctttaattttttgcccggaaaaaaaaaccgaaaaaagcccccgcccggggggggccctaaaaggggaaaatccgaaaattaaaataaaaatggggggcggccgaacattgtttaaaagggcccaatcccccctttggggaaaccttttaaaaatcagtggccgggggaaaaaaaaaatcgggtcggaaaaaccccggcgttcccccacttaaattaattgggaaaaccccccctttctaaaaagggggcaaaacaaaaaaaggcccgaccggttaactttcccaataaatggcgaaaaacaatggggaaagggccccccctttaacgggccattaaccgggggggggggggtgg

SEQ ID NO: 109277 - DNA, 658 bp, Zea mays
  Clone ID: MRT4577_31159C.1
cattgggtacctcgaggccggccgggagagcgcatacgacacccggagttgatacaggacgatcttccacgatctcgtcgatcttgcggactgcctgctctgattactgaactgctcgatgccatccgaccagctttcccgtgatgaaaacgagcacatgagcgaagctcgctgaccaggcgcaaaccgactacgatagggctagattcatggatcaacggagcctcgactgttgactcggaggagctcactgcgtacgatcgaaacctcttgtctgtcgcatacaataacgtcattggagcccgccgcacctcatggcgcatcatctcctccatcgagcagaaggaggaggggctaagccacgacgaccgagcaacactcatcaaggattatcgtggcaagattgacactgacctgaccaacatctgtgatggcatcctcaagctgcttgagacccatcttgtgccgtcttccactgcccccgagtccaagggcttctatctctagatgcatggtgcattactacacataccttgctgagttctagactggacctgagagaaaggacgccgctgacaacacgatggtggtatactacgctgcccaggacattgctctgagtgcaattgctccaactctccctattacggttggactg

SEQ ID NO: 109278 - DNA, 172 bp, Zea mays
  Clone ID: MRT4577_3115C.1
gcattcacgcttcctcgtattcgtctacgacgactgatcgatccggagggaactcgtcaatgccgtgttgatttcgctggatgataaaggctcaccattcgagagctacgccagacacgggcaagcttccatgagcgaggtgttagagggctaccagcggcagttctgggag

SEQ ID NO: 109279 - DNA, 1398 bp, Zea mays
  Clone ID: MRT4577_31160C.1
ttggtaccctcgacggcggctgggagaaacaatctttcctcaggcttcgctgcagctttgagagccactcaaatccccttccccttctctacacacacgacgaacgcaagctcccaataacgcatcccattggatttgaaagcttctacatgggacaccgagcctcgtagacgaagcagaggaaaccagcgaaatcgaagagcaaggaagcaagaagcagggagccatggcgttcctccttcccaagctcacaacgccgtcctgcaagttgcccccaagtcccctcctcaagccccagctcgctcagccggtccacggcggcggcaagattcaaggctccgtcttcggctctgttgcggcgcaggtcgcggccccgggccacctcagtctcctgctcctgctcagcgcctcgcagcaggcagccgccccggcggccaaatccacggcgaccaagaaccggggcaagggcggcggggatccgcaaaggtcggatttttacctcaacctcgggacggcggtgcgcacgctgcgggacgacctgcccgacgtcttcgtccgggaacccaactacgatatctaccgtgaagacatcacatttgtcgacccactaaacacttttcatggcattgacaactacaagactatcttctgggcgcttagattccacgggcgcctgctattcagagaaatcgggctcgatgtatcacgcatttggcagctgacagagaactcgatcgttgtccggtgggagctgtggggcactccccgtgtcccatgggagtcatacggctgcttcagcgggacgtcgaggtacaaggtcgacaggaacgggaaaatctacgagcacagagtcgacaacttggcgctggacttcccacgatcagtagccagagtgggcagcatcgctgacatggtagtcgccacgccgagccccaatttgacgttttggaatgcggttgtgacaggcgatggttgctcatggacaaagctttatgaagccgtggtggaagctgtggaacgggaagagcatagttccactggcattggccctgttggctgcagcttcggttgcggctgtggctgcagtttttgaaatgcaaactgctgtagcttgagctgcttgttcataggatggaacgagctccagggctagttgtttggttgttcctaggggaaatgtatagatcaatatatatgggcacacgaatcacggtatactgatatctctttgtatactgtagctataggacagcaaatttagataaaacacgtactagatggctatatttgattacccttgtgaccttgtgttatacagggccacaggggtagtgctttcactgctttctttcttatgcgatatgcgatacacagatcttctggctgtggtttgcccaa

SEQ ID NO: 109280 - DNA, 307 bp, Zea mays
  Clone ID: MRT4577_31161C.1
gagcttatctagtcggcggccgccctttttattttttgtgtttttttcaatgctttttgggtttgaaaccaatttatgccttttcaaggcggggaagccctccagaacgtcctgggaaattgataatttgcctggggatagaacacaagcaaaggatgcagcgacaatgtttggcaaacacgggggggactacgtgacgtccaaatgggaccggtctgtctgtttgggcgacaggcttctttagctcgtgtagttcggggacagggggggatcggtctcgaaagaaaccaagtactgcacgacccta

SEQ ID NO: 109281 - DNA, 326 bp, Zea mays
  unsure (1)..(326): unsure at all n locations
  Clone ID: MRT4577_31162C.1
cccnacgcgtccgaagtcgcggngaaagacgtggtgcaggtgacagagcttctcatgaacgagctgctcaggctcgacgccgtggtcgccgacggcgacgtcaaggcgcagaggcggatgcaggtgaagcgcgtccagaagtacgtggagacgctggacgcggtggcggccaggaacgccgccaccgtccgcaagtccggcgccaagccagcaccgccggcggcgccgccgcagcagcagcaagcgaggcagacgcggtgggagatgctggacctgctgtcgttggtgccgtncacgtccttggtcttgtcgacgaccaccgtgag

SEQ ID NO: 109282 - DNA, 223 bp, Zea mays
  unsure (1)..(223): unsure at all n locations
  Clone ID: MRT4577_31163C.1
acggccctaannnnaagaaaaacaaaacctncccggaaaaaccaagccggggggggggcaaaagtttaggagttttgtaaagnactgaaccatccacactgacagtaacaatctccttgggaacgggacaataagcttggctcctataaaaagtggtggaaatataatgggttactccctcctccatgtgtgaaataaatgacatccggccaggaagaaacaa

SEQ ID NO: 109283 - DNA, 245 bp, Zea mays
  Clone ID: MRT4577_31164C.1
gggggtgggtgtttttttttttttttttttttagacccacacttttgttggattttaacttattatggacacccgttacatattttggggcacgaccatttcaaacattttttggggcacggccctttcaacagagaggttttttcaggggattcaccttgccaaaaatacaaattccctgtgtttacacggcttagtttccattttttgtggaaataaaaaaattgttcacaaccttatgcaat

SEQ ID NO: 109284 - DNA, 407 bp, Zea mays
  Clone ID: MRT4577_31165C.1
gtcagtcatgacaactactgagctatgtatgtttaagcgcatgttgccgaatgcagccgtgtgacggacatggtctcgaccatgaccggtgcaagacgcatggggaaccatggtgccaactctcacaaggtcaggagtcccaggtcgaagtcggtgattaggcgcctgaacgcgcttacttcatgggcgtatcaggccgtgatctttcggctactagcacaaggttaggtgctcgcagggcttctataccggcagtattctctacgactccgcatgctttgaataatatttcggtgaagatcatcgatctactttgcaatgctagatctgacttcacttagactcgacttatgagcagacaagtgatactgggcatcctgaacaactactagctggagatgctgctg

SEQ ID NO: 109285 - DNA, 243 bp, Zea mays
  Clone ID: MRT4577_31166C.1
ttattttttttttttgaataaatgtttaatttatttaatttattttcagaatgtaggccatctaaataactataacactagtagattgttacgccaaagcactaacaacaggtgcaaagaggacaccaaaaccccgagcgggggaaaacaagacaagggggaagcaaaaacgggacgggcggggcagcaaacaagaaagacgaccagaaacaccccaaactcgccaagaaaccgggcccccag

SEQ ID NO: 109286 - DNA, 332 bp, Zea mays
  Clone ID: MRT4577_31167C.1
ctgttgcaattttgcccgggaaacccaaaaccctagaacccaccctttaatttttatcggcgcctgcaaattttaaaatttcggggggaccccttctggggtttattaaaaacttgcacaccccccgaaactgggtaaaaactttcaagggcaaaaaaacccttctcagggaggcacaccccacagggggcccggggtgcttaaaacctccttttaaaccccgagcctaaaggcctaaagggatagaaaccctttcttgggccccttttttatataagcattgcccagacttgaaacggtgaaaacttggggggcttttggaaggtttggcc

SEQ ID NO: 109287 - DNA, 449 bp, Zea mays
  Clone ID: MRT4577_31168C.1
ccggccgggacgagctctcgctcaccaacctcgtcgagaaggccgcgggcgggggcggcggagccgaagctacgccccgcacccaagacagagggaaaggaccggagcgccgcacagccagcagcagctaacgtcgatagcgaggagtcccgggcggaggtagttggtgggggcagcttccacagcatcaacgatggcgtcttgctcaccttctacatgtcgcgggcgcccacctggagcttcatcgtgcgccttgctcgaacgccatcgtccgcctccatctgccggagccccaacgtcgcatctgactgtaggaagaggtgattaatcaatcatctccgagctccaaaacatgtccgaagttcaaacgctacgtaggcgttagccatgtgacttgattgttctgtttaatctaatttcgcaaaaaaaaaaaaaaaaaatttgcggcc

SEQ ID NO: 109288 - DNA, 393 bp, Zea mays
  Clone ID: MRT4577_31169C.1
cgaagcaggtggttgctcgttttgtttgttttttgaggaggtgattaagtaagtgactgattagtgagtggctgctgcctagtgcttggttactagtagtggtagaactcagaactacatagatccaggaagcaagcaagcaaatccttcctgccatggcggcctccatgtacatagatcccatgtttttattaatttcgtctagctgggggtgggggggcgtgcacctgccatggcggcctcctttatttagctttatataaggagtaggatgtgtgtagcttgggattaggctgcaagaagataagcctgcttgtacaaatatggcttcctggaacaatgacattttgggggcgcaacgcaagaaagatgaaagaacaatccaggaagcag

SEQ ID NO: 109289 - DNA, 359 bp, Zea mays
  Clone ID: MRT4577_3116C.1
atccagtcggacggagtactggcaccgtaggaagcagcggctgtcaaaaagctgccgacgaagttgaggtggtggaggtgttggactgatacgaggcggtcgtatggagacggcgacagttacgacgacgatgatggggaacgcagtgacgaggcatgatgatgatgactgagttgatggggatggattaggatgctgtctgccttgtcgatatctacgacaaatacctcgacgacggcaacaagtgaggctgactgacgacaatcgatgatgactgggatgactacatccattacgacgactacttagaccaccaggaacatctctacggagaaaaccattcaggaggaacagctgcc

SEQ ID NO: 109290 - DNA, 519 bp, Zea mays
  Clone ID: MRT4577_31170C.1
taaaaaaaaaaaaaaaaaaaaaaagaacaaaaaaaaaaaaaaaaaaaaaaaaaaaaaattgaaaaaaaaaaaaaaaaaaaaaaaaaaaaaaaaaaaaaaaaaaaaaaaaggcaaaaaaaaaaaaaaaaaaaaaaaaggtttttccctccccggggggccgtttaaaggggcgatttttgcaaatttccttcaccctgggggccgttgggccttgcttttagggggcccatttccccctttaggggggcgttttccaattcatgggccgtgtttttacaccgtcgggcctggaaaaaccctgggtttccccactttattccctttgaagcacatcccctttttcccggttggggtattagcgaaagggcccgccccgttcgcctttccaaaaagttgccccccctgattggcaattggcccccccctgtagggggcctttaagcgcgggggttgtgggggttccccgcagggggcccgttacatttgccagggccctagcccccgttcttttcgtttttt

SEQ ID NO: 109291 - DNA, 719 bp, Zea mays
  unsure (1)..(719): unsure at all n locations
  Clone ID: MRT4577_31171C.1
cctcgnagccggccgggccgggggtctcgctatctacacacaggaaaccaagcttgtcatccgggtcgcatcgagataactaaaacaccatgacgcaaggttccgacgaaggtgctggcgctgcgcacccgtcgtggccgagcggcgccgacgccgacacacccgtcgcgcccacggcgggtgcggcggccgccatgacgctcggcagcatcctcaccgtgtccggcatcctcctgctcttcgtcatcttcgccttcgccctcgcctccctccaatattgcttcgagtcccgcagggatagggacagggacgcacggaccgggcggccggccggtagtagcaggggcgggatgatgcgggccagcaggggcggcggcgtcgacccggagctgctgcgctcgctgcctgtcacggtgtaccgtgcgccgccgcaaggttcggacaagggacggcagcagggcgtggtactggagtgcgccgtgtgcctcgccgagctccaggacggcgaggaggcccggttcctgccccgctgtggccacggcttccacgccgagtgcgtcgacatgtgtctcgcctcccacaccacctgcccgctctgccggaccaccgtcaccaagcccgacgcatcgcctccgacgccttctttggctcttccacccgtaccgccggagcccgcgaactactacgccaccgccagcttgcccgccaccagcgtgctt

SEQ ID NO: 109292 - DNA, 429 bp, Zea mays
  unsure (1)..(429): unsure at all n locations
  Clone ID: MRT4577_31172C.1
ctagccaccgccaccgccctcgccctgccgtcgaagccgaagccgaaccctcttctctttagggccctctatttgtttctccccgtgtgatccatccatgcgaggctcctgcagcatctagcaggtcgccccgtctggctccacgctacccgccccgctcccgccatgtctgacgatagcgacaggcagcggcaatgccgccggggcgtcaccgtcgacgtcgagctcgacgccgccatggcgctcgccgacatggccggggtcgggccgcccggcggagatcagcacccgccggtgcagctcgcccctcctactactactactactactcangaagacgaggaggagctggcgagcacgcggctgagcctggagctggggaaggtgggcattcaggccttcccgtgctccagcagctccagcgccggc

SEQ ID NO: 109293 - DNA, 324 bp, Zea mays
  Clone ID: MRT4577_31173C.1
acccgattaaaggcaatttttttagggaaaattgcccgggtgcaacaaagtgttgtctaaaccccccctttaacctttttttggggccccatccccccccctataaggacagtctctagtgttttgaaaaaaatgtctccccccaaaacaaatgtgggaaaaatccccctacataaaattttattttcttggatttgaaaggaaaaaaccttgccagatccttactgggtttgaccgggaacgaaccgtttttgttcgaaataatttttttccattaaaaaaccgggggggccgtgctttttttcaaaaaaaaagatttggttt

SEQ ID NO: 109294 - DNA, 1262 bp, Zea mays
  Clone ID: MRT4577_31174C.1
ggccgctttttttttttttttttggagttgccctttgtacggatttttttttgctgctaatccgttgacagtcaagaaaaactttgtcaaaagagaactggcaaaaaattatttatatgtattacatatagaaagtcgtttttattttccaattaaccctttattttatgtacccatccgtacatgctctactcaatttcctgcgaaattaatagggtaaactggtgttttgtctggactaaagagcccaaacttcttctccgtagggtccccgtccttctggtcctcgttgaacatggcgaacacgtacacctccatgggccccggcttcctcggcgtgcccttactggcatggtcgatgaggttctggttatacgtccgcgcattgtccacggtggcgccgttcccgtcggcggacggccacccggtctccgacaccacgacgtcgacgccgccgcctgcgccggccttgtccagcgcggcgcggacggcgtccaccatcgcgtcgaagaggttcgtgtacaccagcccgttggcggggtccgtgaccgtcgtggggctgggctggaacagcgcgtagtcgaggtcgatgccgccgtcgctgtactcgtacgcgaagtaggggtagacgttggcgagcagcggcgcgccgttggcggccaggaactgcgcgatgggcgacatcgcggcggggtccctgaacacgccgcgggacggcggcgaggagtcgtcgaccgcgtccatcttgaccgccgtggacaccttgacgctgccggcgaggccggccgacgcgagcgccgcgtgcacgttctgcatggcctgcagcaccggcgcggcgccggggacgacctcgttcccgaccacgacgtacctgatgtccacgtccgggtagtaggcctgcacgttgtcgcggacccaggacgcggcgctggccgggtcggcggcgagctcgccgaccttgccgttgccgacgtcgagggcgagcgcgatgcccgagccgcgcagcgccgtgaggaggtcctggtcggcgaagtagaagcgcatgctggcgatgccgttggacttgtagagctgcaccacgtcgctcttggacgggaggccgctgcctagcacgccgtagcacacgccgatggctcgcacgcttgtcgcaacggcggcgaatgccgtaacagccattgctgctgcgagcacgggagccacgcctcgagcagccatcgtcttcgatttttttttttttttttttttccagacccgggccgggc

SEQ ID NO: 109295 - DNA, 194 bp, Zea mays
  Clone ID: MRT4577_31175C.1
accgacatcagtatgaaaactgaccaataacggacaaggggtcatgaacacaattgctggcggtgttcactctggaggactctcacaatacattttttttcattggaaagagacctctaccacacgaaacacatgaccttatttgccattcgggtatacctaaaccgtacaaaacgatagacgtgggattgcat

SEQ ID NO: 109296 - DNA, 291 bp, Zea mays
  Clone ID: MRT4577_31176C.1
gcatatcgtctccgtgttgacccccaaattaaaggggaagacgattctatgtcagataatgatgattctggaagtgttgatgaggatgaggatgctagccgaagtgatgatggatctgatggttcccaaaagttaaaatttcttgagaatgaaagcagtatgactcgaaggaaggagaaaaatgcacatggaagtccaaataaatgtagtgaaattgatgaaagttattcaggtgaaaaatggcttttggcattgatggaaggcgagtattcagatctaagcattgatgag

SEQ ID NO: 109297 - DNA, 276 bp, Zea mays
  Clone ID: MRT4577_31177C.1
ccggaattcccgggtcgacccactcgttcgggtctcgctcaccaagccaccactacttcacttcacaccacaccaccgtcagcatccgctcgctagccaagtacactaaggccttttctacagcgctgaaccgtgcgctccaacttctcgccgcctgcgccgatgcgttcaagccagcttctcgtgtattccatgccaacggcctcaatacaatgcaatggcatggccactaggagccatactacatccatgccaagcacatgcataactcgcaca

SEQ ID NO: 109298 - DNA, 1158 bp, Zea mays
  Clone ID: MRT4577_31178C.1
ttgggaccctcccggccgggccggacaatccccgattccttacacgctaagccacgcaacgcaactagcagcagctagccatgacgatgaagtccagcagcggcggccatgtcatcggggtccaggtcacctccaaggcgcacgggatagaggaggtgtccagggacgatccgtccttcagcaagggcggcgacgtcgacgccgatcacctcgccgtctcgttgacgcaccccagcccttacgcgtctttcggctacaagcacacaggcagcaaaggccaggtgacccactgggtgagcaagctgagcagaagggcgcagggcttcagagagcatgtgaccttggggccgaagctgtcggagacggtgaaggggaagctgagcctgggcgcgcggatcctgcaggccggcggggtggagcgcgtgttccgccaggccttctccgccgccgacgacgacaagggcgagcggctgctcaaggcgctgcagtgctacatctacaccacgggcgggcccatcgccggcatgctcttcgtctccaccaggaaggtcgccttccgcagcgaccgccccatcaccgtcacctcccccggcccccggggcggcacggcgcgggtcacgtacaaggtggccatcccgctgcggaggatccgcagggtgcggcccagcgagaacgtccacaggcccgaggagaagtacatccacgtctccaccgtcgacggcttcgagttctggttcatgggcttcgtcagctaccagaggtcgtgcaagtacatgcagcaggccgtctcggagatgcgatgaccggtgtctgtatcgctgcccccctgtcggaacgatgtgaagagactaggatgttatgggtctcgcttcgccatcttttgtcgccaagcagccgtagctaaaagattgccctgtctttaattttggatcggtgcaattgtgttccttccgcgtacgaatttggaccagcatctctgttgttccaaagtggttgctctcgatctactagtacatggaccgaaaaaattaaccatttgtgcatctttgttgaatgcaacagttctatgtgtttctgattagtttatttctatctaccagtagtaggtaagcgtcagaatataaataatgcaaaatacaatttgacgtgcgctgtctt

SEQ ID NO: 109299 - DNA, 250 bp, Zea mays
  Clone ID: MRT4577_31179C.1
aggtcatggatgatgatgtacttctacaggaaatggaagaattgacctttgtgatctctacagcatcattggcctttagggcggcttgtgaagacactgtcagtcctgttcgtacgcgcatactcgatttcgagatatgcttgaaactatttttatccaacagatttaagtcctcacaagtcaccgtaaaggccaatgatgctgcggagaacacaaaggccatggatgatgatgcacttctacaggaaat

SEQ ID NO: 109300 - DNA, 566 bp, Zea mays
  Clone ID: MRT4577_3117C.1
aaacccacagtggcaaattactattacggggggggggggcccatataaaacccagggacaaaaaaacagtacataaaatagttaaataacgggaaacccaaatccccgtttaagggagacccccataaatagggcttacccaaaatagccaacatgcaaatttttttaaaactgaccaaatgcagaggcgggaattttgggggggggctacaaaagggggccccgggccctggaatgcccaaaaaaaaaattggaccaccaaacatggaaaaaaaagggggggggggaaaggcaaaatttcccaatgaaaagttaccgggggttaaaaattttcctgatacccaaccggggggaaccccccctaaattttggggagcttggttgccttcaccaccggattacccttggaaagggggcccctggcaaaagcccggaaataaaacttgcaatcgtgcttggcggagtagggggggagggcccaaaaaaagttcccacaccgggagttgaatcccgtaaggccaacccttttcctgaaggggctgcaccggttgggccctaccttcccc

SEQ ID NO: 109301 - DNA, 606 bp, Zea mays
  Clone ID: MRT4577_31180C.1
aattcggcacgaggggcacctctctctttatctctcctgcgggcctccctcagccgcagcagctacgactgccctcccctctacccagaaagcggaactagatagatagatcagccctatctttgcctcctcccgtacgactaggggcaagggcgcagatatcctgtcgaactttcgggctcgctcggtgtgacgctggctccgcatgggggacctggagatctctggggcggatcgcatggtgaaacggaccgccgcatcacgcgctggtgtgactctcaacaggtgtgccgatccgacgagccccggggatggacggcacgccgatctctgcgacctctaccagtgcgcggcgacccatggcgcggcggggaccggcacgcgcatgaagaatgcgaagacggccgccgctggcaccgaaatggcgaggcatctcacagacgacacggaagacgccttcgcgggcctgctggagctcgacgatgacgaccacgcggaaggctggcgacgcgcgctggagcgcgcgccgggtgcaccctggggcgatgccgggctatggaacggccgccttgaaggcctgtagcaccgaactcgcgtactggaaga

SEQ ID NO: 109302 - DNA, 679 bp, Zea mays
  Clone ID: MRT4577_31181C.1
cacttcccactcatctcgtcctcatcctccgctccccacccacccccacccccacccccaccccacagatctcgccgcggccaccgcttcctctatggccgcgccagcccgccgccttctcctgctcgtcgtcaccgtagctggagccctggcgctccccgtggcggcccagatcaaggaggagtccttcaaggaggacccgcgctcgtccatcatgttcgaaaaattcggcctcacgggccgccacgagaccgccgacatcaacaccttcaaatggggcgtggcgaaccgcggcgcatccatccgcgtcggccgcgacaccgagagggagggcaagggctacttcgaggaccgcaggccggcgtccaacatggacccctacgtcgtcaccggcatgatcgccgagaccaccatcctgtggaatggaaactgatcaagcatgtgcattctcgagggagcccactgtttttcttctgcacaacgcatccgccgtggtgtcgctttggttttgaaatttagattccgttgtcctaaaatttatcactccggtctccggtgtattgctcgggaccaataaataacgcctgccatgtttttttttttgcctgcgtcgtaaatgtacgtttggctgtgcttccagtttattgggtaaatgaaaaatgtaatggtctatcggtct

SEQ ID NO: 109303 - DNA, 1431 bp, Zea mays
  Clone ID: MRT4577_31182C.1
atccattgcgatacttgagacgcttcgctctctctctctctctctctctctctcgtgttcttctcgtcttctgcccgagtgatggccagcctcaccgacctcgtcaacctcgacctgagtgactgcaccgacaggatcatcgccgagtacatctggattggaggaaccggcatagacctcaggagcaaagcgaggacggtgaaaggccccatcaccgacccgatccagctgccgaaatggaactacgacggctccagcaccgggcaggctcccggagaggacagcgaagtcatcctctaccctcaagccattttcaaggacccgttcaggaagggtaaccacatccttgtgatgtgtgactgctacacgccacaaggcgagccaatccccaccaacaagaggtacagcgccgccaaggttttcagccaccccgacgtcgcagctgaggtgccgtggtacggtattgagcaggagtacaccctccttcagaaggacgtgagctggcccctcggctggcctgttggtggataccctggtccccagggaccatactactgcgccgccggtgccgacaaggcctttgggcgcgacgtggttgacgcccactacaaggcctgcctctacgccggcatcaacatcagcggcatcaacggcgaagtcatgcctggacagtgggagttccaagtggggccgtccgttgggatctctgccggcgacgagatatgggtcgcccgctacattctcgagaggatcaccgagatggccggaatcgtcctctccctcgacccgaagccgatcaagggcgactggaacggcgccggcgcccacaccaactacagcaccaagtcgatgagggaggccgggggatacgaggtcatcaaggcggcgatcgacaagctggggaagaggcacaaggagcacatcgccgcgtacggcgagggcaacgagcgccgcctcacgggccgccacgagaccgccgacatcaacaccttcaaatggggcgtggcgaaccgcggcgcgtccatccgcgtcggccgcgacaccgagagggagggcaagggctacttcgaggaccgcaggccggcgtccaacatggacccctacgtcgtcaccggcatgatcgccgagaccaccatcctgtggaatggaaactgatcaagcatgtgcattctcgagggagcccactgtttttcttctgcacaacgcatccgccgtggtgtcgctttggttttgaaatttagattccgttgtcctaaaatttatcactacggtctccagtgtattgctcgggaacgaatgaataacgactgcgatgtttgtttttttttttgctggcgtagtagatgtacgtttggctgtgcttccagtttattgggtaaatgaaaaaatgtaatggtctaccggtcttaaaatagtagtcattttagctct

SEQ ID NO: 109304 - DNA, 1570 bp, Zea mays
  Clone ID: MRT4577_31183C.1
cattgggtacctcgaggccggccgggacatccattgcgatacttgagacgcttcgctctctctctctctctctctctctctctctcgtgttcttctcgtcttctgcccgagtgatggccagcctcaccgacctcgtcaacctcgacctgagtgactgcaccgacaggatcatcgccgagtacatctggattggaggaaccggcatagacctcaggagcaaagcgaggacggtgaaaggccccatcaccgacccgagccagctgccgaaatggaactacgacggctccagcaccgggcaagctcccggagaggacagcgaagtcatcctctaccctcaagccattttcaaggacccgttcaggaagggtaaccacatccttgtgatgtgtgactgctacacgccacaaggcgagccaatccccaccaacaagaggtacagcgccgccaaggttttcagccaccccgacgtcgcagctgaggtgccgtggtacggtattgagcaggagtacaccctccttcagaaggacgtgagctggcccctcggctggcctgttggtggataccctggtccccagggaccatactactgcgccgccggtgccgacaaggcctttgggcgcgacgtggttgacgcccactacaaggcctgcctctacgccggcatcaacatcagcggcatcaacggcgaagtcatgcctggacagtgggagttccaagtggggccgtcagttgggatctctgccggcgacgagatatgggtcgcccgctacattctcgagaggatcaccgagatggccggaatcgtcctctccctcgacccgaagccgatcaagggcgactggaacggcgccggcgcccacaccaactacagcaccaagtcgatgagggaggccgggggatacgaggtcatcaaggcggcgatcgacaagctggggaagaggcacaaggagcacatcgccgcgtacggcgagggcaacgagcgccgcctcacgggccgccacgagaccgccgacatcaacaccttcaaatggggcgtggcgaaccgcggcgcgtccatccgcgtcggccgcgacaccgagagggagggcaagggctacttcgaggaccgcaggccggcgtccaacatggacccctacgtcgtcaccggcatgatcgccgagaccaccatcctgtggaatggaaactgatcaagcatgcgcattctcgagggagcccactgttttccttctgcacaacgcatccgccgtggtgtcgctttggttttgaaatttagattccgttgtcctaaaatttatcactacggtctccggtgtattgctcgggaacaatgaataacgactgcgatgtttttttgtttttgcttgcgtcgtagatgtacgtttggctgtgcttccagtttattgggtaaatgaaaaaaatgtaatggtctatcggtcttaaaatagtgctccctccgtttctttttagttatcgctagataattcaattttgcactatccagcgataactaaaccgaaatggaggaagccgtccttttagctctcaaaaaaggcgtccaagctgaagaaga

SEQ ID NO: 109305 - DNA, 329 bp, Zea mays
  Clone ID: MRT4577_31184C.1
cgaccgacgcgtgcagacttctactccacttcttaccaattctacttcatcttatggttacataaaattttgtgggggggcggtggcgacttcttatgtgtagtacctaatcttcatccgccggcttgcctgggccaccagcaacgagtcgctgtagaatgccttcgcctcctactgcgagatcctcaactccaaggtcatcaccgaccggaagacggcgaggtctcgctgcttcggattctttaccttctcctgcgataactccattctcgacgctatcgagaacatgaactgcaaggatcttgacagtcgtaacattacctgtaacc

SEQ ID NO: 109306 - DNA, 276 bp, Zea mays
  Clone ID: MRT4577_31185C.1
tcggcctagctgtacttgttagcctttcagaatgtcggcggtcgatgatgcgaggaggaacgtgtaccacgacactcgtccttgcgctagttaccatcatcgccatccccatggccaagggggacgacgagaagtgtggcgagtgctctgcgtgcggcagctcttactgcccagcgctatacccgtcgccggccccggcgacgtactaatactagagacgtccctcaaacgtgacctaccccaaggagtacttgtgatactaccagccctcatagt

SEQ ID NO: 109307 - DNA, 233 bp, Zea mays
  Clone ID: MRT4577_31186C.1
ctcgagccgatttgacgagtgggcgcccgctgtcggctttgtgccttgaagcctccgatgcacgagaaaacaaggtgagttggaacccgagacatgtctgaccagcatggcccgtagaaaagtttgccccggccggctaaaatttcccgtgctcgtactttagccgtgcacttgtgcgtccatgaccgtaggtaccgttacgtgaacccgttgccttctctatatttcttgtc

SEQ ID NO: 109308 - DNA, 469 bp, Zea mays
  unsure (1)..(469): unsure at all n locations
  Clone ID: MRT4577_31187C.1
ttacaaatctagcctccccaacttgcttgggactaaaaggctttgttgctgctgctgctgaaacaaggtttctgttctttgataacaatatagcattggaattcgtgaaggatttattggttactagatttctgtctagcaatactagagggtagaggtgaaatcaattacgtgttcattattatactgccttttttttctttctacgtggtatgctaacattatatacttctagcattcatctgaccttggaagaatgatttgaaatatttgaccatgttgttcatgcaccattgtagatatgaggagataccaaacttaacatctggctgcactgagtttgttgaatccgcacaacaaattttggaggagnaggaagcttaatcaaacattactagccaaccacactacattgcttgacttgcttgaaattccacaattgatggacacgtatgcaacttttatctta

SEQ ID NO: 109309 - DNA, 721 bp, Zea mays
  unsure (1)..(721): unsure at all n locations
  Clone ID: MRT4577_31188C.1
tactcgccgcctacatcacaccccggggggcgggggcgcgtgttccaccatgagccaagggagggagatccaagnaagggagaaagaaagaaagnggccaagnngccaagnngtggcccaatggnagccccgccgnnccgccgccccgccgcccccccggtcccctttggcgcgtaggtgctcgttggtggnntcgcctttccgtcgccccgccttgcgtggggaggggcggctgttttttttcttttcacgncnnncgtcgcccttccaatcgcgagggcgcgggcgtacgaggccccgtgccgtgcgggagtcgtacacaaggtgaaaacttggnagnngagctggtntnngccagaattctttagnnagtcgnanngcaattnnncaactcgnnnggcggctttgccattttctgggnannagcgatgaagcaagaacnnaaggaaannatgatgatattatgtcaggagaaaagttgnngcaaggaaaaaaaagaaaggagcggtcacagaaaagccgtgtgagtccttgagaaagcaaggcgaatcgaagtcctttatgctgagnngaaaagccgactttgaaaatatggacggttgaaggcttaaagnaagaagaaaccaaaagaaagaaagaaaagaacaagggggtgacccctttcnnagctgcgaatgcctgcttttagcgagggaacacactgannattgttgaagaacgc

SEQ ID NO: 109310 - DNA, 147 bp, Zea mays
  Clone ID: MRT4577_31189C.1
cgctcaccggttatggaccagggaagcacgaaggttttcaatcataacgcaaagaacagtaagaattcttgcgttgctatggcacctttgtttaatttttcttgttcttgttgccattctcgacgatggggttaaaaaaagacaggg

SEQ ID NO: 109311 - DNA, 389 bp, Zea mays
  Clone ID: MRT4577_3118C.1
ggatgaagtatatagatgtttgtatgtagaatcacaagccttggtatacaatgaggggtacatggctatttttaaggcttgctagggcggttgctacagtacgttggctgctacagtaaggccggctgctgcagtacatgcagctgtttgacagctgcctactgctgctagctagctgtcagcaacagctaattgtctagaagtctaaagactcatctatactattctaggacattaagcacaagagcacatacattaattctaacctagagccacaatgctattgaaacatttcctctgagatttatcaagtctcctagttgatctcctccaccactctgcgaagttcagctcttccctgctaggagacaattgatccaggcccaaag

SEQ ID NO: 109312 - DNA, 464 bp, Zea mays
  unsure (1)..(464): unsure at all n locations
  Clone ID: MRT4577_31190C.1
cccccaccgacccagcggagccggcgccgggggggggcggggggcgcgccaagagngaacccgccgggggaccgcgcaccgacgacggagcgagcagaagccaaaaggcgcagcnccccgcgncgccgacgcgcccaggngcggcngggaaagcagaagcagcccgagggacagaagaggcgcgncgccgagcggggcgaccncggccagaggcaggacggcccggcnacgcgncggagccccgggcccccccggaagagcgaaccccaaaccccncnccggcgcacaaggcgccggcaccacaaccaaagcagcggggagcgcgcngcgncacgccgcggacgcgggcgagggngcccgggacccgcgnacaggcccggcggacaggcgccgccggcccggccccggccgggcgcgggcgggcgccgccccccgcggccccccccccggcccgccccgccccc

SEQ ID NO: 109313 - DNA, 183 bp, Zea mays
  Clone ID: MRT4577_31191C.1
gacccacagcgtcagcccacgcgtccgcccacgcgtccgcccacgcgtccgcggacgcttgggcggacgcgtgggatggcgccctcgtagaccgctagttcggtccacgacttcagtgtcgacgatgctatcggcaatgacgtttacctcagcactgtataacgggaaggttcttctcattgt

SEQ ID NO: 109314 - DNA, 581 bp, Zea mays
  unsure (1)..(581): unsure at all n locations
  Clone ID: MRT4577_31192C.1
cggacgcgtgggcggacgcgtgggcgcgggcacgcgacaggggcttcgtcgctaaacactacaaacacagagagagagagagcaacaacatctagcacgcgacaccgcgtcctcgatcggactcggaggcgaacgctcccatggcggcggcggcgggcgcgggcggcggcgcaggagggaaggtgtccttcaagatcatcctcacctccgaccccaagctccctttcaaagtgttcagcgtgcctgaggcggcgcccttcaccgcggtgctcaagtacgccgcggaggagttcaaggtcccgccccagacaagcgccatcatcaccaacgatggagttggcatcaacccccagcaaagtgcaggcaacgtgtttctgaaacatggttcggagttgcgcctcttcccccgcgacagagttggagctgcggttgtgccttcctattagaggatacaaatgcataattaatgagtgaagtgagagaaataaaactttggtgttagctctgcttggttgtacaattgntatacaaagataaataagtgaacctaatcggacatgtctncggtgtatgctcttggg

SEQ ID NO: 109315 - DNA, 2167 bp, Zea mays
  Clone ID: MRT4577_31193C.1
gaccggaggcgtatcgtcgatctcgtcgacgagtacaggaacggcacgttgcgctggaccgacttctcgtctgccgtcatggcgtcacacaccacccgcattgggtacctcgaggccggccgggacgggcgcgaacttgacacgcgccccctgccccgccgccgcagttctcacctcccacggccacgccggcacgtccgctcgcgcgcacactgtttttttttcttggtaagggccggcggccgggcagataatcgtaaaggaaggcgaggcaatacacccaccgagagagaagaactaagctttggacacggaagatcgcaagagcctcaaccacactattcaggtggcctaggactctacgagggacgttcgtcgtgcctcggatgagatgggtggcggcggaggaggaggaggaggcgggaagtccgagaaggcgcggcgttcgtcggcgcgggtgaggctgtgggtcgcgcgcgccagcaccgtgctgctctggacgtgcctcgtccagctcgcggcctaccgggagctctgggcgcccagcgtgctctccaggtggcctggctgcctcaaccagccgcacgtcgcgcggaggccatcggagcgtgtggcggacgccggccagacgcaggcagcgcgcgctttggtggtgctcccacccaaaagaatctacaggaacaacggctatctgatggtctcctgcaacggcgggcttaaccagatgcgagcagcaatttgtgacatggtaaccatcgcaaggtatctgaacgttactctcatcgtaccggagttggataaggcttcattttgggctgatcccagcgatttccaagacatattcgacgtggactacttcatagcgtcgctgagagacgaggtccggatcctgaggcagctgcctccgaggctcaagagaagagtggagatgggatccctccggtccctgccaccagtcagctggtcagacatcggctactaccgccgtcagattctgcctctggtaaagaagtacaaggtcgttcacctgaacaggacggatgcccggctcgcgaacaacggcctgcccgtggagatgcagagactgcggtgtcgcgtcaactacaatgccctgagatttacccctgaaatcgaggatctgggcagacgcctggttcgagctcttcgccggaacgggccctttgtggtccttcacttgcggtatgagatggacatgcttgccttctccggatgcacgcatggttgcagcagcatggaggccgaagagctcacgaagatgagatatgcctacccatggtggaaggagaaagtgatcgactccgacgccaagaggaaagacgggctgtgtccgttaacgccggaggagaccgcgctggtgctgcaggcgctcggcattgaccgcggctaccagatctacattgccgcaggcgaaatatacggtgggcagagaagaatggctgcgctcacctcggcttatcccaacgtggttagaaaggagacgctgttgccttgggaagtcggcctgttccagaaccactcctcccagatggctgcgctggactacatggtgtccctggagagcgatgtcttcatacccacctacgacggcaacatggccaaggtcgtagaaggccatcgcaggtacctggggtttagaaagacggtgctgctggaccggaggcgtatcgtcgagctcgtcgacgagtacaggaacggcacgttgagctggaccgacttctcgtctgccgtcatggcgtcgcacaccagccgcatgggcgaaccgtccaggaggcagacggttcctgacagacccaaggaagaggactacttctacgcgaacccgcacgagtgcctgcaccagccggaagatgtctcggccttgtgatacaggccctgccgcggtacagtacagtggatgatgcgcgggctttcggaatccagaaccacatgtatatgtaatagactaatagcgcattcgacagcgttgcgttggcagaggataaacgtaaacggacgaggatgtgagttaggtttcggtacagattcatggaacggtggttcgccgattcttttttctgttcagaagaataagcagaccctttcgttgttgttcttgtacagcagacgaagtcgtgaagataaaaacaacagcagcagaaacgtcgtg

SEQ ID NO: 109316 - DNA, 273 bp, Zea mays
  Clone ID: MRT4577_31194C.1
accgataaaaaacccgtcgcccaacatcaccatcactagacatcagcaggttttttcatatatattcctgttaacaagggcgggatttatcccagtgcgggaactctacaattttatttttaattctcaattctattcatctgtcatcataaatccatattcttaattaaatatttatcataccccaccaaaactatcttcttttaactcattttctaaaatttcttctaataatattatttttctcttttatctattattccatactatttc

SEQ ID NO: 109317 - DNA, 1217 bp, Zea mays
  unsure (1)..(1217): unsure at all n locations
  Clone ID: MRT4577_31195C.1
gtgaatcagttccttcgtgatgtcagagaactaagaacgtgggagaaaagaaaagancataaggaagcccaagctgtactagctgcagctgcagctgctattgcatcctcctcacggaactcaaccgtgagaaaagatgcaaaggaggatgcaccaaagagttctcccaaacttgctgctggatcttcaagggttgggcaacggacttcattgccacaggctaatgattcatcaaagtcatccaacagcaaaatatcatcggataaaaaatctggaagttttcatatgccaatttcctcaaaagaaaatgggctatactgtgatgtatgcatgcgaactgaaactctgttgaaccgaatatttgtctgctccagatgcaaggctgctgtgcacatagatgctagaaatctggaaaattctattgggccctggaactgcgaactttgtgaagatgaagacatttcatcagaagctacaagtacaaccgttagtgataaatcacattgtaatggcaagttaccctttgcacagtgtggcatgtgccatggcacatcaggtgcttttagaaagactgtagatgggaagtgggttcatgctttctgtgctgagtggttgttggataccaagtatgtaaggggacaagatagccctgtagaaggaatggaaaaccttgtagagggaaaagacacttgttgtctctgcctctgcaatgttggcatgtgcttaaggtgtagtagtggggattgcaacattactttccatcctacttgcgctagaagttctggtttatacatgaacacgaaagggtttggtactacatcacagcacaaagcatactgtgacaaacacagcgtagaacagaaagaggctgatgcgcagcaatatggacctgaggagctcaggagcatgaaacgaatgaggtatcagatgcaagagctcattactcactgccacttatgaagagatcagtctgaaaccaacaaattatctttagctaccttgtgaaaactctgtggtttgcttgtatcattcgagttagctatttacagttttgggcatacattatgctgccacagcacttcatggggcagaactcatcagtcgttattcatagaggaaacaatatatttaggaattgtttttcttatgcaaccaaccttatgcattcctgacttcctgtactcatgttccatgcagtacatgtttatttggatgtt

SEQ ID NO: 109318 - DNA, 596 bp, Zea mays
  Clone ID: MRT4577_31196C.1
ttttttttttttttttttaaaataatttatgtgtcatgtatgggtcatgaatttttgacacaatacctaatccaacaaaaaaactgactcaaaacccaaaaaaattccgacctaacaaaaaaaccgactgagcagagtcagacatgagccgtgtctaaagactaacgacccgaccttgatctgaaccaaagcaatccaatccaacgtttgaacaagcctagatccaacgctgagaattggtcttggttctactacgccctcatcacaggcccgaaacagataccgagaactagaagactcaattttctgcgcggcaggcacggcagcaacaaaggctccagagtccagacaactgctctgcttcacgaccacgagattgtggtttcggtaccagattaccagcaactccgtgaggcaatgccaatgcggcggccggcgtgaatacctcaaccttgaaggaggatacagtgtcgatggcctgggcgtgcgcaccacccgttcggcaaaatgtccccgagaggccgataaacctcgcatttacgcggcaagtaaagcaagtttcattgagttattattactgtcatagtgccatacga

SEQ ID NO: 109319 - DNA, 482 bp, Zea mays
  Clone ID: MRT4577_31197C.1
ggggaaattcaaaaaacactggatcatggggggccccctcatacaactttccccctaaaatttaaaggtccccccttacaaattaactcccttttgaaccaacctctcttggttcttggggatcccattttggccccccccccaccccccataataggccccccctaaaccctcaaacaaacccaaccccaaactaccctgggctttccatttccccccccaaatgccggaaaatccccaattcagcaagacatagcgaagcccaagccttaggacccccccccacaggccatttgtccaagggaagagctttcgaacccccaggggcaggggagcagcggcctaaaactggaacccgctcggatgggacttggtaatccgggccatgcccaccgccttgccgtttttgaaccttttcgggttggggaacccggggcaacccccgacgttgaccatcacaagggtaatcagcccccccatgt

SEQ ID NO: 109320 - DNA, 1990 bp, Zea mays
  Clone ID: MRT4577_31198C.1
aagatcccagaacacaatatcacaatacaactactggggcaagtatacattcatggctttacaaaacttatgattttttgacaataaatggtaattgagcaggtttatctggacatgaatggtcatccaatgtagtcgggagtaagatcaatcaggtgaaattctcccttcatgcatctttctctccagccggcctatcctcgacggaggccagattatgtgcgtaacccgcccttgaactagacctaagggaatctgaagaacaagcacaaatacaaaataagtcatactgatgcagcataatttgtcaccaacatatggtattggtttctgatatgcagctgttgtaatgagttatctgaactattgacaaaggatgcactctctgggaagcagacagaagcacaaaatttgaagccaagaatgaactgtgccgaatttatgctttctcaccatctcctctacagctctactaactgttcactagttgtacagcatggacacatttgaactgatgattactgaagaaaaccagtatctgtctaaacaagcacacaacgaagctcattggtagcagatttataactcaatagtttcatacttggcagtcaatgcaacacattttttttcagaaaagggaacaaaattttgttggcagttctatgattgcaatacagtaacataaataggaagaaatcattgcaacttgttgagcctcaaacattatcaccaaggacacaaagtgtgtgctcctaacttgtggtgcaataatgtacttgcctgttgagatataggttgtcctataactgttgtagggcagacccagtgtcacaggctcccatattagcaggtcgggggataggataaactaaggcaagccttcccctgcaaatgaggaggctgctttgaagttcgaacctacgacatggagtgagacagctctcatcattgcaccaggtctgcccttctgtcctataactgttgtagtttcgctttattccctgtttttcagttttttttgttctcattggtatatagggtctgtttggttgagaggtagatgtgaaaaaagttgtttgtgaattgtaaactgtggaaaaagttgttgtgggctgtgagctgttaaaaaactacaaaatgtttggtggaaactactaaaagtcgttaaaagttcttcgatatatgttttcacagttccatccgaaaagtcactaaaagcaggtccagtgatgctttcagatttgcactgtgagaaagtcagcttttagaaaaagctgcttcctagatacaaccctttgattggcttttgccttttagtggggtaaaagccaaaagtcaaatcaaacacacccttatacaaacatcccggcccaactctctgggcccacctaaagctaccagtctgcgggccctgaagcaactacgcgttcggcttgggcgcgcccgcgccaccgcgcgccgctacgacccggcgccgcaccacggcgtacgccacgccgatagccactagcgcggctgctgcggcgctgacgaacacgcctgtcaccttgtggttgtggcgccagtgcgtctccacgggcgccacggcctcttcgtctaggtcggccttcgctatgctcgccgatgtccctctgaccgcggactccctcagctgctcctgtccgcgagacgcgagcgccggcaccggcgcgacgccgtgagctcgtcgggcgcgcgctctggggtggaagaagtcgtaagcagccggcgacagagcgagcgggctctcgaaggagagcccgtgcgggtgcgctgcggtgggcatctcctcgccgcggccgacgggtagaagaacaagcgcgatcgccgtcgccgcggccattgtggtgatcttagccatggctcgagctacaccttcggttgagctggagcttgatcttattggtcacataagttcggacgcgtgggcggacgcgtgggcttagttctagatcgcgatctagaactagct

SEQ ID NO: 109321 - DNA, 284 bp, Zea mays
  unsure (1)..(284): unsure at all n locations
  Clone ID: MRT4577_31199C.1
gaagaacggcgnngangaggagaacnncgnggncgaccncaagaagggcgaggncaccagggggccgnaccagggaaagccggangccacnnncnccnncacggacaacgannnccnnggaancgccaccggcaagacgaaaccgcagaaagcanncanncgaggggcgangaaaancaaggggagcancagngcggcgcagaagnncaccccggacaacgnccccaagccngcgaagcnggagaagggnnccacaagangnanngccagccanngaaacaccg

SEQ ID NO: 109322 - DNA, 744 bp, Zea mays
  Clone ID: MRT4577_3119C.1
ccggccgggaaaaaaaaaaaaaaaaaaaaaaaaaaaaaaaaaaaaggaccctccaccatcagaaaaggctagaaaggcaactagggtttgctacgtcgcccaccatctccacccaggaccgccgccctcatccgtctcccccgtcttcctcgccctcgtctacctcgtgctcgtcggaaaaagcagctcagtttcatcacaagtttgttttgggatctttcgcctcaagtttcatctagctaccttcaacaaatccttcaatctccatggctacatcggacaagaaaacaaggggctatgttccttggaatgatgagatggataaggtactccttgatacatttgtggactattacaataaaggtgatagatgtcagaatgggtggaagtctcatgtatacacagcctgctgtgaagaatgtttgtgagaagtgtaatgtcaccattacaaaggaaaatattagctctcgcagcaagacctttgataagcactacaatatcattaatggtttgttgtccactagtggttttggatgggattgggagaagaacaagctcaaagttgatagtgacactgtatgggatgagtacgttgagaggaataaggaagcaaaaggatatagacataaggttgtgaagttttgggatctactcagcctagtgtacagtaaagaccaagcaaatggagagggtgctaaaacagcagctgaaagttcaaaggaaatggcaaaagagtatgatacc

SEQ ID NO: 109323 - DNA, 1122 bp, Zea mays
  Clone ID: MRT4577_311C.1
attggctatctcgggtgcaagtgattggttggatggctttttagctagaaagatgggcatcaattctgtatttggatcatatttggaccctctggctgacaaggttaagctaacactttctagatttatttctatgttaattggtctgctaagctgatgtacaatatctatggtgctgtttaggttttgattggctgtgttgctgtagccatggttgaaaaagaccttttacatcctggtcttgttggcctcgttgtcgtaagagacttgctccttgtgggtggtgctttctacaagcgggcttctagtctgggatggaagtggaatagttggtcagaatttgttaacctagatgttattcatcgtgaaaaggttgaacctctgttcatcagcaaggtaaacacagtcttccaattaatgttggttgccgctgcacttcttcagccagaatttggcacagaggagactcagaattatattgcacttctgagttggcttgtggctactacgacaatcacttccacaataggttatggtgtgaagcactaccgaatcaaaccaaggagtcggtgactgttgctgcaggctattcatggattaatttgctgctgctgatgacatacatcaagtgacttactgacttgtatcaagcatgctgttgtttcttaagcttcgtcaacttcccaatttgcagctgcacaactataggtcttgttgcccccctttgtcctcatggatttccttaacggcaaaattttgggcaatattggagaaaggagtgaagaacggtctcatgaattgaatgtaatcggtgcatgatttgtgcggtaggcctctggccgtcctcctgtagctgttaagtcgtggtgactacttttgcctagttttggcctaaagtgtccatcaatttgtcagagatcaaactagccgaacctttgccttttgctttgtccagacacattagctatattgcaggtgtacatatgtacttcagaatacttgaacttggcaaatggcgatcgctaggtgaaaaaaaaaaaaaaagcggacgcgtgttaaatgcatttacaactatggtcatgcatcaatgcaactgtctagcagggcttttttagcccccgg

SEQ ID NO: 109324 - DNA, 474 bp, Zea mays
  Clone ID: MRT4577_31200C.1
aaacattgggatttttttttttaaaaccggttttaaggccattcctggggaggacacagcttctagcgtttaacacacaggacctagcaaaaaggccatcaaaaaaggcaaaagggaatggaacaccggacgaaggggcaaaagccacggccttggcgggggtaaaccctccgttagacgacgatagacgggtgtcactacacgaaccacttttagtcggatacttgctcagcctattgacaacaacgttgggccgagggacaaaacctctgtaaaaagatggccaatatgtgggtcaacctgggcaccacgtgggggatcatctgaataatataaaaaattatcggactaatattaaaccctcttggacatccactaaacaattaagggttcaaacctacgacccaacaccgttttacgaccacacacccatgaacccttagttgacacgctctatgaaaccttccacggacg

SEQ ID NO: 109325 - DNA, 277 bp, Zea mays
  unsure (1)..(277): unsure at all n locations
  Clone ID: MRT4577_31201C.1
gggtcgaccccgcgtccgctagttctagtcgcggcggccgcccttttttttttttttttagcttcgcatcatttccaatatgcacatgaagtatagtagtatatacatagcgttgcactctaaaatctgaatacaccaacatttgtatgcaacagtagttacatactttttttctaatgcaataccatgggggggggggggttttccanactggtggggacaactttaggtataagttaaaaagatagctccacttcaatatgttttggttggggtt

SEQ ID NO: 109326 - DNA, 670 bp, Zea mays
  Clone ID: MRT4577_31202C.1
attttgaccttcgtcgctggaaatatgttcgagtatgtcccacctgcggatgctgttctactcaagtggattttgcatgactggaaacacgaagattgcgtcaagataatgcgccggtgcaaggaagcgatcccagcgaaagaagccggaggaaaggtgataatcatcaacatggtggtgggatatccggtgactcagcccaaccattccaaagaggcgcaggttttgttagatatctacatgatgggctccgatggaatggagcgagaggaaaacgagtggagcttgattttctccgaagccgggttcagcgactacaagatcactccaaccaatgggattcgatcaattatcgaagtatacccttaaatgtacttacttccacttcggagatactatctccttccgtcagtacgtgtttattagtcttgcacgtgtaattaacttggtaaattagcagccaagatacacgtgcaagacttataaaccggaaaggaaggagtcgtcatttgatttgtaataaatctcaccaggaactctctgtattattgcatttaagttttactttttgtttatagatttttcaaatttgcttctctttagtttatttcattttttccactcattgtaccaatcctatgaaatctacataaattgttcttttctttgc

SEQ ID NO: 109327 - DNA, 153 bp, Zea mays
  unsure (1)..(153): unsure at all n locations
  Clone ID: MRT4577_31203C.1
gtcgncgncgccaacgccgtactcacggtgtacccgattgcggactacagcctagtcctcgtcgacgtacgatgtggctgcacgcccggtggctactaacagcactactcctcctacagcatcgagttacagagcgagacgtacttcatcatc

SEQ ID NO: 109328 - DNA, 733 bp, Zea mays
  Clone ID: MRT4577_31204C.1
ctcgaggccggcaaggctggcttttgctgcgtctttcctttgacgtcagcgagcgaagaactacttctttccctccctctctcatcattctcagatctcccgctccctccttcccttcatctctctgaatcctgctgcccacctcgccgtcctcgcattccgccgctcgctctcgcgatccggcagcttcctcttcgccgtcgttcttgcctcacctcgtccgctatcctgtaagctgctgctgggtcacccgtggctggactcgaccccgccggcgccgcctccgggggctgggttcgccggatgtttatcggctcctgatccatccggatcccggatccgccgcaaaggcaccgcctttgtaggttctccgggcccatgcaggagggtttggcgattcggcggtgaggcagggctctggtttagttcttgcgttggactagcccggagatgcttcgtggaacggggcacggcggcggggatgcgcggaggcgggcactgcgctcgtcgcggcggcgtctgcccgggtggatctggtggcttctcgggatcttcctccttgtcgggctcatgctcttcgtccttcaccacaaccaaaaggagcagttccggccgcccgtcgtgcaaagtggcgtagctgtgatacctgtttgatgagccttttgaaattgcacaattgagagttgaagatgccacagagaaatcagatgaatcatgaatagaataggatact

SEQ ID NO: 109329 - DNA, 397 bp, Zea mays
  unsure (1)..(397): unsure at all n locations
  Clone ID: MRT4577_31205C.1
gccggcctttcgccaaaggaaggcacaagtgcgctacgcacgcagccaaagaaaaggcgcaaaaggccaagggatatgacaaggacggaggcaaggcgaccggtagctttcttcggcggcgaagtaggagctaggagggggtctgaagaataccaacaaaagcttcggtcacccttaggtttaatttggaagaacacgttctctatttctatgtccgaataaacacagcaaagagaagtgcacgcggcgtgtacagntgacacgcacacgcacacgcacacgcacggagagctgaggagctcccctcccccgtttggccgtttggcgccgctgctacaaaagtagtgggttcacttttgtcgggctgcatgcttcttttcttcgcttgtttgtttgc

SEQ ID NO: 109330 - DNA, 601 bp, Zea mays
  Clone ID: MRT4577_31206C.1
ccggcgcccttcctcgagtttttttttttttttttttttttttttttttttttttttttttttttttttttttttttttttttttaaaaacaaacggggccaaattggttaattacatatattggcggcgcttgttttttaaataaaaaaaaaaaaaacgtggggttggcaaaagtggaaaaaccctacaggggggttttaattcatctaaagaagggccccccttttaaaaagaaggggggtttttgaatcggccggccggctggcggggagccaaacaaacccagaagggatcgggttgacctttgtggctaaaaaggcaaaaaacgggaagccaacgtgggggggccccattgggaaccccggcccggggggggaaattttttgaaaccccgtttggaatccaaggcccagcccgccgttgttgaattggcccaaaaccctccccaaaagggacccccccgccaaagggtttttaacctttatgccctggccgaagggggccggccctttttgccggggggccccgaaaaaggccgccaacccgtgtttttgccgccaaaaaaggggttggtgggcgccccagggggcgcaaaccccc

SEQ ID NO: 109331 - DNA, 279 bp, Zea mays
  Clone ID: MRT4577_31207C.1
acccatccccaattccccatgcgacccacgcgtcctcacacacttttaaactagatctacatctctatctgcccctctatagcatacacactcacgcaccggggcatgcgacgtattagctcacctataatgacaccaaaagccaattcactaccccgcgtttaataacatcaccactgcgaaacccatcttattaccctacgtaaacaccttgctttacacacctgtctcgacagctgaaaaaacatcaccgatggccttacccatcagcctcccaaa

SEQ ID NO: 109332 - DNA, 648 bp, Zea mays
  Clone ID: MRT4577_31208C.1
ggctgcggaaccaatctccgacccgtaaaccgaccgaccgaccgctcgctcgctcgccccccctcgcctcccgttctcttgccggcgatgacgccgccggcggcggcctcgccggggcggaagtctccggccgcggtcctcttcctctgcgtggtcactatctcattactcatgttcatactccttgcctcctacaccccccgccttcagccccacggccgcagcccccaccgccgcctcaagctccaccccaagaactccgccgccgtcgcttcttcctacggggccggcgctgtccacgattccggaggaaaccgccacgcggcgcccttcgacccggccatcgccgagctggagcggcggctggaggacaaggagtgggagcgcgagcactaccgcatcctccatggcgacgccgagaaggacgaccacatgaaggagtgggaggagttcctcaaggaggaagaggacttcatcaacgacgacgatcgcttcaacgtctccgaccgcatccgcgcgcttttccccaagatcgacctcagccccaaggacggcttcgtctccctcgatgagctcatcaggtggaacctcgatcaggccaggtctgaccagctccatcgctccgccagggagatggagctctatgac

SEQ ID NO: 109333 - DNA, 231 bp, Zea mays
  Clone ID: MRT4577_31209C.1
gggggcaaattccacctcctatgggttttttaaatcgaatacaaataattccctgggaagagagcgcctccacttcacttctactttcctccggagaaaagaatgaacaaaagaattgggccaactaaaaattggacaagcccccccctgcatatatatgggtatctatttacacccgccttgtccctggccagcccgttgagcatggggaacatgccgaccatgggcgcc

SEQ ID NO: 109334 - DNA, 290 bp, Zea mays
  Clone ID: MRT4577_3120C.1
ccagttcaaattgaattccagagtaacagccggagacgagagaagaaatcggctggccggtcgtggcagtcctgtaaatagaccgcggcaacgttatcgcggagataaaagcggccagcggacgtgggtgccggaggtgcctcgaagcgcgcgaagtggtcgtcagctggattggtccctcccccactgctggtgggccatctgcagctttattgctgcgtgggaccatgtgtctgttgagccagggtgggttggggtccggtggggggagtcatttgcccctactcttt

SEQ ID NO: 109335 - DNA, 275 bp, Zea mays
  Clone ID: MRT4577_31210C.1
ctcacgcgttcaatatagccttcaagatattcgctatggcaggggctatagcacattcaagatagaatgcatgtgtgcatgcgtatgcacatgagaatgcagataatatatatgacagtctctacgagtgatatatctagggatataatgacggatggcatgtccttcatcatgaacgtgatcaagaaagactttatacatgtctgcatacataagtacaaattaatgatgggatcaatcatttgtgcagacgagcatgttgtagagcatgtttt

SEQ ID NO: 109336 - DNA, 524 bp, Zea mays
  Clone ID: MRT4577_31211C.1
tttttttttttttttttttttttttttttttttttttttttttttttttttttttttttttttttttggggcccaattccaatggggggggggaaaaattttttttaaaaaatataaagcaaatagtttgggggaagggacaatcccacaaccctccacattaataaaacagaggggccacattttaaaaaaaaaatttgggtgaagaaaagggggggaaaaaaaatacttgttttcggttcaccccatgcttttttaaaaaaaaaattttttttatttttaaaaaaaattagctcccaataagaacaaaatttagctaacttcttcaatttaaccagaaaattacgggttttagttaagggattggcctaaaattggcttggcaaaagggggttaaaagagggggggggatataaccccacagtttgtggaaaggccatattttgtgcggggggaaaagttttttcctgggttttcccacaattaagggaaaccccaatttttttttttggggggggaggggc

SEQ ID NO: 109337 - DNA, 456 bp, Zea mays
  Clone ID: MRT4577_31212C.1
gggaaaaaccggcccagggtttcccggggttttacccaaaccagcggggggcaaaagaccccgggggggggggggggccatccccaaggggaaagacaccctaacaacccccccccggttttttttattgggggggggggagttaaaaaaaaaaccagccaacgccaaattttcgaaaacggggggggtccacgccccaacaagatatttaaacccacctccccctaaaccttccttattccaaggggcctccccccgggaggcggggggcaaaccacttttttaaaaaggggggaaccccctaccccgcctgggaaactttttatttggggcccattaatgtttttgccccggggttactgatcgagggggggggccggggccctactgatccaccggggatggaggggacccaactggtagcgggtaaaaaacccctgggagagaggggggggg

SEQ ID NO: 109338 - DNA, 450 bp, Zea mays
  unsure (1)..(450): unsure at all n locations
  Clone ID: MRT4577_31213C.1
nanaattttatttttatttccaacaacgaacaaactagggacgggtttttttttagaaacccgcacgaaccctaaaacaaaaaaacattgaagggccccataccccggaaaggccaaacttgcagcgctggaaacaattataagggggggcgccaattcacattaaagccctgcccaaccctagtattacgggggggggcaggcaagggccaacttttgccaaaaaaaagggagacaacatagggccccccctaggaaaaacaaatccaggtcccaggggcgcccccaaatggcacccttatccaacctcaacatcataaataacccttcaacaacccaggattttttgtgcctttttgaaaaccccccctctctacatatctggaacaggtcccttcaaggccgaaactttgcgggctaaggctttgaacaaacttgaaaacctggccc

SEQ ID NO: 109339 - DNA, 115 bp, Zea mays
  Clone ID: MRT4577_31214C.1
gaagacatctgaagaggcgttaatctcatcatatgccattaggctcacgagaggactttaggggtgaaaggtacttggaaaaccgaaccagcgtctacaggcctaagagggattt

SEQ ID NO: 109340 - DNA, 1637 bp, Zea mays
  unsure (1)..(1637): unsure at all n locations
  Clone ID: MRT4577_31215C.1
acgagtcgcaccctcgagcaagatccaaagcacgcacgcattcccagcgtccggcacacggaggggtcgcgtttctctagtctcgttctccactctcactgactcaggcgacccgcggccgaccatgcgggcagcagcggcgtccctggtgctggtaccccgcctcgccctcttcgtcctgctgctgtccggctccggcgtgccgactgccctgtcgaagtcgacgctggagtcctgcgcctcctccagcgcctgcccggcgctgctctcctacacgctgtacgcggacctgaagcttgcggagctggccgcgctgttcgcggccgacccgctggccatcctggccgccaacgccatcgacttcgcggtcccggacccgggggaccgcatcctcccggcggggctcgcgctgcgcgtgccggtgccgtgcgcctgctccgacggcatccgcaaggccacctccgcgcggtacgtggcgcgggcgggggacacgctggcgtccgtggccggcagcgtctacggcgggctcaccacggccgactggatccgcgactccaacggcatggccgaggaggaggacgccgccctcgacgccgggaccacgctgttcgtgccgctgcactgcgcctgcttcggcggcgccgacagcggcgcccccgccgtgttcctgacgtacccggtggccgagggcgacaccgtgccggccatcgcgcggaggttccgcaccacgggcaacgacctgatgagcgtcaacgacctggccaccgccgacgtcgccgccggggacatcatcgtcgtgccgctgcccgcgtgcgcctcgtcgttccccgcgttcgcgtcggacgccggcctggcggtggccaacgggacgtacgcggtcaccgccaaccgctgcgtgcagtgcagctgcggccctggaaacctggacctgttctgcgtgccggcgccgctggccgactccacgtgctccagcatgcagtgcagcaacagcagcatgatgctcggcaacttcaccctcctcatgaccagcgccggctgcagcgtcacctcctgcagctacggcgggtacgccaacgggaccatcctcgccacgttaaccacgtcgctgaaaccccagtgcccaggcccgcaccagttccctccgctgatgccgccgccgacgtcgtcgttcttcgagacctacctcggcccgtcgccgacgccgatggcgtccgaaggcggcatgggtccgcagatggctggcatggcgccgacaagcagcccgccggtgagttcagggccgccgacggcaggttcacacgtcggcagaccttgcacaggtcgcttatctctgcctcgtcgccagcctgctgtggtagactggtagatgggctgcctgcgagatcggaaaggggattcttttgcacgggagcagtcagttatttttctgcgcggcgtgtaattttttttgtcatccttcgttctatctgtcgtccatgtattatcgcgaactcatgcaaatacggagtactgtattcgtctacgaaggaaggtgacaatggccggggattgtgtgggagctattactgtaggtctaattgaggacgacacgagatgagataatgttgttctgtttttcaaaacaggtcgttccttnc

SEQ ID NO: 109341 - DNA, 504 bp, Zea mays
  Clone ID: MRT4577_31216C.1
gggaccatcctcgccacgttaaccacgtcactgaaaccccagtgcccaggcccgcaccagttccctccgctgatgccgccgccgacgtcgtcgttcttcgagacctacatcggcccctcgcgtccgcggatggggtccgaaggcggcatgggtccgcagatggctggcatggcgccgacaagcagcccgccggtgagttcagggccgccgacggcaggttcacacgtcggcagtgacgctcttgcacaggtcgcttatctctgcctcgtcgccagcctgctgtggtagactggtacgttgggctgcctgcgagacagcgagaggatactctagcatagcttgttccgaaaggggattcttttgtacggaaacagtcagttatttttttgcgcggcgtgtaatttttttgtcatccttcgttctatctgtcgtccatgtattatcgcgaactcatgcaaatacggagtactgtattcgtctaaaaaaaaaaaaaaaaaagcggcc

SEQ ID NO: 109342 - DNA, 400 bp, Zea mays
  Clone ID: MRT4577_31217C.1
aacaaggtcctccatgtgcatcgtctcgattaatttggtgtgaccggctgtcgtgtatacttgagtgaatcaacgaggaaataaatattgctttctagaggctaaaaaaaaaaaaaaaaaaaaaaaaaaaaaaaaaaaaaaaaaaaaaaaaaaaaaaaaaaaaaaaaaaaaaaaaaaaaaaaaaaaaaaaaaaaaaaaaaaaaaaaaaaaaaaaaaaaaaagggggcggcccctttaaagaaccaaagtttacttccccgtgcatgcaaagaaaaagtttttttatggggccaccaaaattaaattaactgcccgcggtttaaaaacggggggacgggaaaaaccctggggtaaccaaactaaatcgctttgaaaaaaatccccttttcccaagggggcg

SEQ ID NO: 109343 - DNA, 679 bp, Zea mays
  Clone ID: MRT4577_31218C.1
atcaaatcaacattataagtcaacgcctgaaaaataattataacaactggaaataatcagcaacaaagcatcatgcactttcaaatgaatcatttgcctttcagctgatacaatctcatcagcattctgtgatctaccaaaagttcctacaccagaatcacaaggaccaactcgagtggaatacgagaccaggtctgcacctcctgccatccacgttgaacacgatgccaggctgcacggcagcagccttccccagatgcaagttcagaaatccctccacctgaaacagttgcggtttttcctcagtgcctctacgcaagctcacgccccatccaaggtcaccttccggcgtatctgacagtgtgagggcccatctcagcaaacgtgagcttgacttcttgttcaactcgatccaggccccgattctggagtcctcatcaatttccagctcaagaccaacgcaacctccagcagttggtttcctcttccgaggaactacactgggtccatgcaaagcagcagacatggtcaactttatgtcatcagggaactggtacgagatttgcccaaactctgtacagactctgctggcttcaccgttgtttactggcctcgcggcaactgaaatcagctgcccaatagaaacagcgaagttcttcgatctcatattagccgccgc

SEQ ID NO: 109344 - DNA, 483 bp, Zea mays
  unsure (1)..(483): unsure at all n locations
  Clone ID: MRT4577_31219C.1
gctctgatctctagcgacctctagtctgatcaaaagcctaacacccagcgcggaacatcaaaaagcggagggctgagcgcagaaacacgaccttagcgtccccccgttcaaggtaccatttatctcagtatttgcattcgcttgattttgcagaattacacaattttgtgctgtagttgttttgaacagtatattccttttgaaactatgcaagggaatttcgccgccaaaaaaaaaaataaaaaaaaaaaagtacctcggggggggggggtctaagttttttttccggcgccatcgctaccctcgcgtgtgggctagggctccgtgcctacatctacccttgcccctccaacatccgttcagccctcttactgcagttacactctggtgcattatgttgacaaacaacatctacgctcaacaacagactaccagcttgncgtatccgaaacctatgcttttctacttctcagcaaactagca

SEQ ID NO: 109345 - DNA, 212 bp, Zea mays
  Clone ID: MRT4577_3121C.1
ctcccactttcttctaaagcttatatcaatccaccaccaaacgtatcttaggtgcaccatcagttttctcaattagatcatccctcaaatcagtcgtctatattagtacattcgcttattaaactcaaataattactgtaagaactaagagcaattgaaatactgaaaactcttgcattatctaaactccctactaacaattatacatattt

SEQ ID NO: 109346 - DNA, 487 bp, Zea mays
  unsure (1)..(487): unsure at all n locations
  Clone ID: MRT4577_31220C.1
ttccggaatcctgtttgatttctcatacctcacactgtanggatctcggcgcgcggtaagccctccggtcgctgctgtcctgtgcgccctatactatcgctgaaacggactgctgccacttatccggtcgctatctcgcatgtgtccaaccgcgccacctgcacgcagcttattcgtcactggcgacacccaatgtcgaacaggacagcagagcggatcatgtacgcgcatgctacagatgatcgtcgatgcgcagcgccacctacggctacctatacacaaccatgctcggtatctagcgctcagtcgaggccttgtactcttccgaaaaaagaggagttaactcttgatccgcgccaacgatccaccgaatgatagctgagatctatacgtacgacattacataatcagaatcaaatctctagcgatctcgatgagatactgtatagtatatattctcacgctatgctagacactctcacgctag

SEQ ID NO: 109347 - DNA, 360 bp, Zea mays
  Clone ID: MRT4577_31221C.1
gggggccatttaatttaccgcccaaaaaatctaaagacccccgttcccaacattttccattaagggggggaaggcccgaaattgattgattttttggatcgaccgaacattcccccccagttaccttttttatttggcattgcggacccccccaagaaggggcccccttgtcttgtttgcctcccatttttgcaacctatttggggcttcccttacccccttggtccaagcaggtttctagggggccccccctataatttccgcttgtattcagggccctccgaatattccaacccaaatggccctaaaacccggcttgaaaaaaaaccccttcctggcgcccagggggaccccctcttt

SEQ ID NO: 109348 - DNA, 306 bp, Zea mays
  Clone ID: MRT4577_31222C.1
aaaagggggcttaaaaaagggggccctaaaaaggggcccttaagaaaaagggttcaagggatactaatgaatccccctgggggccaaccccggcaaggactccccaacaacaggggcccaaaaagggggcccataaaggaaaagggggccttaaaagggggccttcaaaaagacatggccccaggccatttgttctggcaattaaatttccccagggaaaccccggagggttttgggggggcttccggcttggaccagggccttccgggggggttctttggggcgggtattgtccggggggggggc

SEQ ID NO: 109349 - DNA, 499 bp, Zea mays
  unsure (1)..(499): unsure at all n locations
  Clone ID: MRT4577_31223C.1
tccgtccgaaccctattgcaaaagaaatttgtttgtatttcctaaatttaatgtgtgnnatgatatcatattgtgggtgctgactaacaagatcgtaatgtgtggagatagtttacgtagggaatcattatatacagnnaaattcgagaatgctcttatgatgcgnngggagctctgaagtnnatttccttaggagtttcaaggtgcaagcaacttccaagaatggcgaccttcatcatgccaaacaanaatacatacaangacataccttaccaagttntggaataaanggatgccaaancccatcaagacacctcatgggaaccaatgtgcatctcgacctcgacacgggagattatatattctacaggtgcataaaggttcaacacaaaccaataaaagattgaagttagggatcaaattcaaaggagcaaagaaaccgagtatgccctagtctggcgcaccggactgttcggtgtgccacccgacattgttcggt

SEQ ID NO: 109350 - DNA, 1130 bp, Zea mays
  unsure (1)..(1130): unsure at all n locations
  Clone ID: MRT4577_31224C.1
aattcggcacgaggcggttgttggtcacacaagagtcaaacgctcccttccctgcgccgatggtgacactcccaccccacaccccactatccaatcccaaccggaatcgcctgcagccggcgcccggctccgccagatccatggcaccgccgcttgctcgcctcattctgatccttctcgctgctgccgtcccactcttggctgctcccacggcggcggtgtttccgaaagaagcacttccgaccaagtccgggtacctccccatcccgcccgtcaacgcctctctcttcttcgccttctacgaggccacggacccggtcacgccgccggcctccacgccgctcctcctctggctgcgaggcgggccggggtgctccagcctcgtgggcaacttcttcgagctcggcccctacttcgtgaaccccgacggcgagaccctctcgcgcaaccccttcgcgtggaaccgccgcttcggtctcctcttcatcgacagcccgctcggcacaggcttcagcgcggcgccgtccccggccgacatccccaccaaccagtccgtcatcgccgcgcacatcctcgccgcgctgcagtccttctacgccctggacccagccctccgcgcgcggcccttcttcctgacgggcgagagctacgcgggcaagtacatccccgcggcgggggcgcacatcctggacgccaaccgggcgctgttttttgcgctgcgcgtgaacctccgcggcgtggccatcggcaacgggctcacgcacccggtggcgcaggtggccacgcacgcggactcggcctacttcctgggcctcctcaacgcgcggcagaagcgggagctggaggcgctgcagtcggaggcggtgtcgctgacacgggcccagcggtgggccgcggcgtcggacgcgcgggggcgggtgctgtcgtggctgcagaacacgacggggctggccacgctgtacgactacgcgaagcagcgggactacgcgacggccgccgtgggggcgttcctgaaccgcgccgaggncaaggcggcgctgggcgcgcgcggggacgtggcgtgggaaggatgcanccacgcggtgggtgcggcgatgcacgcggacgtgatgcgcaacgtgctgccgcag

SEQ ID NO: 109351 - DNA, 247 bp, Zea mays
  Clone ID: MRT4577_31225C.1
atcctgggcgtctagactgccgtgaggaacagtacccgtgcacacgcctctagtccatacacaggccttccacgcagtgtctcaacgaggtctgcttctacagcctgcgccgcatgcgcgtcattgacgaggagatctgggttcatacagtgtgtgcccagtaggagctcctgcgatctgagctctttcgggacaagttctccggatgtggcgtaatggccagcaggcgcctgtgccaatacgtggg

SEQ ID NO: 109352 - DNA, 359 bp, Zea mays
  Clone ID: MRT4577_31226C.1
tacatattcaccaatcgacgttcctcgtgcggtgtgttatagaaggaggcgggcccgaaaagtaatacaaccttctactctgggtgaacatggggaaaacgccgatgcggatgaaggcggtcgtgtactctctgtatctcttccagcaaaaggtaatgccgagtctgaggaaggacatcaccaccaagatccatcacatggtcaccaagaactggatctccgttcacgctcctcctcacctacgtcgttcgcacctaccaatactccatttagtacaaggagcaggagaagcttttcaacagatattaaatgcgctgcccttgacagacaacactctgagtttttatgatggctttcat

SEQ ID NO: 109353 - DNA, 177 bp, Zea mays
  Clone ID: MRT4577_31227C.1
gcacgctgtaccctgtgatcacggactacatattgctgaacccgtgctacaacgcctctgggggagagcgaccggaagtgccgtagctgtcactgctgctcaacgactgtaccttgagggacttccctgcggagaactacatcctacggctgtacccggactgcatcatgtgcctgt

SEQ ID NO: 109354 - DNA, 241 bp, Zea mays
  Clone ID: MRT4577_31228C.1
ccctttatttttttttttcaacagactgcacaaagttcggatagtttgataaagcggagggtatctacaccatctcttacttttgaaagatcttttgttgcaattcaacgactaaaacatatatcatatagccaggcaccaggcagcggcagaaacaaaaacgaagcgctacgaatagacctaggtatagcacgtttacagagtagaaagggaaccctgtcacaaatatgacaagtgtatt

SEQ ID NO: 109355 - DNA, 483 bp, Zea mays
  Clone ID: MRT4577_31229C.1
tctatcccatgaagtataacagtatattttcaggactaaatgttcttgtgaaagaagagggaccttcgtcactttggagaggctggggagggaaattttttggctatggtgttcagggtggctgcaggtttggcctctatgagtatttcaagaagaggtactctgacgtgcttgtagacagtaacaagagcaccatatacttccttagcagtgcctctgctcaaatcatagctgatgttggcctgtgtccgtttgaatcggtgaaagtccgtgttcagactcagcccatgttcgctaaaggtttggttgatggctttccaagggtgtatgcaactgaaggcctatctgggtaagctatcatgaataagatatatattgtttatcccaatttgatgcattccgcgtgtgcttgaaaatacaagccttcatctaccatcctgagaaaagtatatttcttgctctattgcagcttttacagggggc

SEQ ID NO: 109356 - DNA, 272 bp, Zea mays
  Clone ID: MRT4577_3122C.1
atagataagacctactgatgcacgactgtcacgtcaatgcttaaaattcgaatcgagctccagggaccatcaaagtgaacaactaattgtgtaaccctgggaggatttgcaagcaccagcaatacagtcttgggtaatccttgatctgtctaatgccacagtgccactgcaccagagcagctgagaactttcttgtagaaagcccatggcagtttggcgttagacaagtgtgtcgatgttctttcaaaaaaaaaaaagtataagaacaacag

SEQ ID NO: 109357 - DNA, 300 bp, Zea mays
  Clone ID: MRT4577_31230C.1
cacatgttgcctgagtccccccatggcggagccccggaagggagctggagctgtcacctctgtctccggcacctgaaggaaaaggcttctgcttacatcaccctcacctaggccggctcggctcgccgcgactctggggtggtgctcgcctacctgcctctccgagctcctcaattctcccccaccctgaacatcccgcagggggagggggagagggggaagccgagagggggctgggccaccccctcccctctgtgcaagtggaatgtctgccctgtgggtgggtgggcccggcagggc

SEQ ID NO: 109358 - DNA, 169 bp, Zea mays
  unsure (1)..(169): unsure at all n locations
  Clone ID: MRT4577_31231C.1
gattgtgaatataacggtttcatttaacgggttaccctctttctgaatctggcgggatgatcgcaccatttaacggaggatcacgcctcnnatagctctaacaacagcagaananncggcacangaangngggtagcatgtactttttttttttatttttattacctct

SEQ ID NO: 109359 - DNA, 377 bp, Zea mays
  Clone ID: MRT4577_31232C.1
tcggtgactctcatcatcaacagtttcttccattcaaccaactaactgcttagaactcttgatctgtatttgcgccaacatcaactaccatacatccttctttctgctgactacccccagcattttcttacatgtcaacacacactggaggtttgaactctactgcttatttacagcagcaacaactactacccttcaggcagctatcgtggtgtgagccctactgccttcttgtctcaaccacacttggtgtcgaactaccagcacgctgggcctaacgctaagcgccctcttgctccccaacactgtggtgtcattgaaccaacttggtttggctgacccaacagcattttgtctgcaaccccttgttgacggag

SEQ ID NO: 109360 - DNA, 456 bp, Zea mays
  Clone ID: MRT4577_31233C.1
tttttttttttttttttttttttatgattaattagaacatgagtgggtaaaagaagtgatcaagggcacaacttgcctgggacttgagattccaggtatcaggatgatcttcaggtgacacgtgtcctcacagcgatgatgtcgcagagaaaccggctacggagcgagcaggcgctacggcggggcgacgctttttggtctgccagcggggccacaacacgcggcaatggcacccgtggccaggctcccaatcgcacggcgcgacacacacaacgaacggcgaagcgggtatgcgtacagcggcaccaaatccgatcccagggatcacccgccactacgcgccggtcaaggatagcagcagcgaccgacggcgacatctaagcctagcagcggcggaatctctctcgagtccacccatggtgcggtcagtacacaggagggcttggctggtcgaga

SEQ ID NO: 109361 - DNA, 355 bp, Zea mays
  unsure (1)..(355): unsure at all n locations
  Clone ID: MRT4577_31234C.1
gccggaaaaaaaacccgggtcgacgagcgcacatgacggcggccgccccttttttttttttttgggaccttttttttttttttttgcttgttgagccccaaacaacaccacgaaaccaagagaaaaaagggggcatgcccccaagcgcgcccgaccccatgcccgcgggaacaaatatggaaaaccgccacaccgcgagaaaaagacacccgatgcaagtngatagggctcaccgccaaccccacctaaaaaaaccggcaccggctcccccgagagagcccgaaaacaaaccccacggggatgcacaacatgcgcaccaaccacaagaacatggcccggggcgaggccacgacca

SEQ ID NO: 109362 - DNA, 659 bp, Zea mays
  Clone ID: MRT4577_31235C.1
tgggaccctcgaggccggccgggctatctttccttctctccgggcgctcagtcgggtcttcctctcgatattgatcgcttcctatatgtcttcattatgatgcatcaccatgacaaatacacgcttgtatgctgtaatttggcccctcgcaccctttcccgcgatgtagactatgttttcaccatatatcggaagaatactcgaagtggactggaatcgtgactatgcattcattgaattcgacgacccccgtgactctgatgatgaccactacgacctaaatggcaggctcatcaatgtcagtcgcattattactgaatttcctaaagtagatgctcgtggttatgccggttcccgcgattacatgatgaacaagacctccaccacgaacatgtcattgttttaactgtagaatgcatgctcactgcgctaagggactgcaaggatgacgactgctccaacaaacgctaccgctatagtgaatcctgccatatagagagaaatctgccataacagtccgaggaatctcatcgtccgtataaaagctattcacgatctccatccccacgtgatggacgtgaccgcagcagtcagctacagtatgaagcccggactatatccgatccagatccccatctggatctttcatgggtggacgc

SEQ ID NO: 109363 - DNA, 774 bp, Zea mays
  Clone ID: MRT4577_31236C.1
cgggagaactaacttttctatcccaattttcaatcttttttaaaatgtcagatctcaaggcttctgttgtcgagacccagaacggcttccatgtcgagggctacgagaagattgaatatgacttcaccttcctcgatggcgtcttcaaccccgccaacaacaacctggccaagtgctatgagcgttggggtcgttgtctggctgtcatggacttgaacatcttcaacatctatggtgatgagatgcaaaagtactttgaccactacaacctgccattgaccatccacaagaccatgattggcgagaaggccaagtcaatggagacccttctcagcatcgttgactcgatgactgactttggtattatccgcaaggagccggtgcttgtagtcggtggaggattagtgactgatgttgctggatttgcttgtgccgcctaccgcaggaacacaaacttcatccgcattcccactaccgtcattggcctgatcgatgctagtgttagcatcaaggtcgcagtcaactatggcaactacaagaaccgcctgggagcgtaccacgctcctatgcacaccttcttggacttttcgttcctcaagacgctgcctgagggtcagttgacttgctggacaagtactgcgagaagttgatcacttcccgcttcggccgtgagggtgatgacaaggaggtccttcaggcagctgatgagatcaatcgtgctggtatccacgagatgctgaagctcgagacaccccaccttcacgagattggcct

SEQ ID NO: 109364 - DNA, 353 bp, Zea mays
  unsure (1)..(353): unsure at all n locations
  Clone ID: MRT4577_31237C.1
tcggagggcagtncgtgcagaaactcttagcctgtcggggccgtagcgtccgcatcatagaccacttctgagcctatagtcgagctgtacagccttgtgtagacacccaataacttgaaccatacaaggtgacaggagctctctcaccaggtgtgctaccatcattacccttggttgtgccacaatgatttatgctatgactacaccaacctttggggaaggaaacgggactatactttttttcacaacatggacctcaactagagctagcaaaccctggtgcttagtgttagtaccactggttcctgcgatcctagcacgtaagcacactgaagtctgcttcctattcgctg

SEQ ID NO: 109365 - DNA, 836 bp, Zea mays
  Clone ID: MRT4577_31238C.1
ggccggccaggttggatacctcgaggccggccgggagactaacttttctctcccaattttccatcttttttcaaaatgtcagatctcaaggcttctgttgtcgagacccagaacggcttccatgtcgagggctacgagaagattgaatatgacttcaccttcctcgatggcgtcttcaaccccgccaacaacaacctggccaagtgctatgagcgttggggtcgttgtctggctgtcatggacttgaacatcttcaacatctatggtgatgagatgcaaaagtactttgaccactacaacctgccattgaccatccacaagaccatgattggcgagaaggccaagtcaatggagacccttctcagcatcgttgactcgatgactgactttggtattatccgcaaggagccggtgcttgtagtcggtggaggattagtgactgatgttgctggatttgcttgtgccgcctaccgcaggaacacaaacttcatccgcattcccactaccgtcattggcctgatcgatgctagtgttagcatcaaggtcgcagtcaactatggcaactacaagaaccgcctgggagcgtaccacgctcctatgcacaccttcttggacttttcgttcctcaagacgctgcctgagggtcaggtacgcaacggcttcgcagagttgattaagatttcaacatgtgctcacaagccaacatttgacttgctggacaagtactgcgagaagttgatcacttcccgcttcggccgtgagggtgatgacaaggaggtccttcaggcagctgatgagatcaatcgtgctggtatccacgagatgctgaagctcga

SEQ ID NO: 109366 - DNA, 576 bp, Zea mays
  Clone ID: MRT4577_31239C.1
cacagcggactatgaggcgttcagcctctagtgcgctactcccgtcgcaactgaggaagggccgggctacccagtcatctcctatgtctatctacacgcctgaccgggggtgcttaacgcgataaccatgggactgacctgcggctaccctgcctaagcggtcgaccatgaggcgtgtgtgtgcgctactcagcctggtgtggcgtgtcaacctgcccatgacactgaacaacggatgagcctggcccttcaggacgcgctgctaactgaggccggacggggtaacgcaggactaccacacgaagaagacggggctggggttcacctggaccccgacgacctccacgccgggggggataggcggaccgatgcttcaatagggacctgctacacgaccgtccgaggaacatggaggagcgacactgtccaacaaagccggtgatcctccacgcacatttgcacagagatgtcacagccaagcaggacacgcccaccataaccgccctatcgctaatgatatacgacagtgcactgactgagagcaggggatacatcacataagctactgttgacgga

SEQ ID NO: 109367 - DNA, 831 bp, Zea mays
  Clone ID: MRT4577_3123C.1
tgggtacctcgaggccggccgggaaacgcttccgctgcgacaccttgccatctacactccttgctcttcaatttttactatttattcccagtatttccgccatgtcaaatctgatgtccccgtgcatcttctggagccttctgtttctaggcctagcagcatccttccaggtggtgaattctgagcaactccactccaagaacagcaaagcgacgcaaggagcagtagctcatgtgtccggaaagcaagatgttatcggcacgtttcaattcagcagctcagaggaatccgactgggtcaacatagttatctcgatgcgcggcttgttgcagtacaatctgacggaaggctttgctttccacattcacgaacatccggttgttgataataattgctccagcacccttggccacttccacatcctgaatacaaagcccagctgcacttcgcaagtgcccaactactgtcaaccgggggagctttccgcccgtcacggtaacctaccaggcctagtggatgtgtttacagaaagatataacgacaacgcgctggagttaaccggtgccaattctatcatcggccgaagcatcgtcattcatggcgcgaacatgagccgcattgcgtgtgggtgcattgagtcttagatccctggttcccaggttacttcccgattttcaagcaatccgttcgttggatgggcaagcaagatgtggtctaaagctcttatgcgcaaccatgcttaatgagttcaacttctaaatggtagcaagccagctttccaagtggtttgatatccagatcatcccaaacaatgagtctttcactccgctc

SEQ ID NO: 109368 - DNA, 322 bp, Zea mays
  Clone ID: MRT4577_31240C.1
atcagatttccagttcacactattcgaattttttatattcatgctccgaaaaacacaaagaaacagtaatttataatataaatccttggcgaatgtatcccgctcacgtatatgttcacacaactccttctgttgcggaagacccaacgtgcactcaatagcatgtgagtttaaagatctcattttttctacgatggaccatacatctaattggaggcacatgaacatttctctcatcttttttttgaacccaattcaaacggtttccatcccattaacatttgacatcttattacctatcctgttaaaacatatatgttct

SEQ ID NO: 109369 - DNA, 447 bp, Zea mays
  Clone ID: MRT4577_31241C.1
ctctctctctctctctctctcgcctgcgggggattattctctactctgctctgctctcccactaccactccagcgctgctcccctcgccgtcgacgctgccctccccccgatcgatcgatcgctccctctcccgcgccgccgtggccatggaatccggccaacccaactgcgccgccgcagataagacgcagaacagttctgtaccacctgtggaaggtgcagctggaggagggactagctatggatgggtagatggaggattacaggcgtcgagtttaggtaatggtgctattgatcctacaaagatacactcagcagatcttttgcatgtctggcctatgccgagctcagcaaaagttagccaacaagaagcacctcgacctctggaacatgttaaccttttggcagcaagaaatgaaagggaaagttttcaaattgctttacgt

SEQ ID NO: 109370 - DNA, 287 bp, Zea mays
  Clone ID: MRT4577_31242C.1
gccacgcgtcgggttcggtgcttaagagatcttaatcgtcgagaagaccctagagagcatcaatcatacgcactgcaccacatggggcattagtttgctgtcggctaggaaggtgccatgcaccagtgtcacgatgggtgacctgaacgttgtgtataggacggccaacaacaagaccatggctatatgcacgaacgccaagggtaggaccaagggttggcttaaggagcttgcatgcttttagacccttcgtcgactgacccacatctctagagatataatttttt

SEQ ID NO: 109371 - DNA, 382 bp, Zea mays
  Clone ID: MRT4577_31243C.1
ctcccgcatgaactaatcaacactgctaatctgttgaacctctccttagccctatccgggggttcacgtatcactgccgaacactgtcatgccaacagctacttgaagaacgacctcctgagcctgatcagtgaccatgacacatccgttacattcccaaggaatgcatacatgactaacactgacgacagctgccgtatcatctcatatgctgacgacgatcgcttgtgctctagggccaccaaataaactgagaaatctgacagcctggacgagacatgcgactgatgcttgcagtgcattatgacatgtatagcatgatatccagcatgtaatctgccacgttactgcaaacttacgttcccatacgagggcagcacac

SEQ ID NO: 109372 - DNA, 185 bp, Zea mays
  Clone ID: MRT4577_31244C.1
accaaacctcggggtagagttttatgagagggagaggctaatattaactaatgcatcaacagtattacttaatttatctacatattccatttattagctcgagatgaacgatcccccaacctaacaattaagatttgttaaaaatatttattgttcacatcttaacctacaaaatctaaaattca

SEQ ID NO: 109373 - DNA, 332 bp, Zea mays
  unsure (1)..(332): unsure at all n locations
  Clone ID: MRT4577_31245C.1
aggccggccgggccgggagcttctagtgacataaacttaaaaagctgaaacaaacggggcacagtcacctttaccgcacgccgacaaggatggcgtcgtggtcgtcgccctcatccgccgccgccgcctcgggcgcccgattcggccccttcccgagccgagcgcagcggctcgtggcgtatccgtcgctcgcccgcggaacccccgcctcgacgctcgtcctcaggccccacccggacggccgtggccatggnctcctcgcgcacaccggttcctcttcctcgcggaggcgcgncgtccgcgccgaggacgagggcctcaacatcgccaac

SEQ ID NO: 109374 - DNA, 258 bp, Zea mays
  unsure (1)..(258): unsure at all n locations
  Clone ID: MRT4577_31246C.1
actcctaagggcgattgggttcctcgaggccggccggggttcttcttctatttattagcccagcgttctccctctctcgtgggcgtggcgacgacttggaggccatcgctgccgncctacgncaggtggccagatcatctgcggncccttcgccggcgacgatcaccatccatcngaaataggatcaagcgcttgaanttacagcgagatggaaantgatagaaggnannttggnnnataacgctnnnagaagagccc

SEQ ID NO: 109375 - DNA, 494 bp, Zea mays
  unsure (1)..(494): unsure at all n locations
  Clone ID: MRT4577_31247C.1
tgacattgttagccatgtgctcatgaactctgatgacacttctaaaattggtggtcgctgcctgcatggtacacatgatttggggactcagctagattctgatgctcagagctagattctgatgctcagaggttggtgcaagaaaggaaagagttgcatctctcttcatgaaagagagggacttggttctgcaaaggctggtctgctcgcaccagttggttctggaaatcatagaggttctgaagaagggtctcaagtacaacataaatctgacttgaaagtgcctcagttcaagggttcagagggttcatcaaaagatgaaatgtatcggaatcttatttatgcatttggcaaagataatcagacgtcggtaaatcttgctggtaagcacagcttgctcagtactggggtttcacaaaggatgtctgtgagtattggtgattcattggctgaaaagcctactgctcatgcanatgagctggcgcaaaatctag

SEQ ID NO: 109376 - DNA, 342 bp, Zea mays
  Clone ID: MRT4577_31248C.1
acgttccttaagcattagactaataacataagtcaacgttgatgcttgtgtactataccatggtgtgttcctgattatgcaagcagctggtacatgtaatgtttgcacggacatgtataccgggggaagagggttgcagactaagaaacaatgcatttatgtctagtaacagatacaagcactccgaaagctaatgatattgacatcaacgctgacagacccgagtcatctagcctacactacaggtcacagctctacttgagggctgccaatgacgtgggctgctgcttcacctggacttgattgactgtccagatatatgtaacgttaggctcatgcgat

SEQ ID NO: 109377 - DNA, 180 bp, Zea mays
  Clone ID: MRT4577_31249C.1
ctgttacctagagcttgtaatgatagaaagcagttgtagtacgttttaaccataaaagagtacactaagttgatccgatggattatctattagaaatcatttgtgcattatgtattattttcaaatatttcttagatatttcctttcttattagatggatttaaaaatgagatttgttat

SEQ ID NO: 109378 - DNA, 543 bp, Zea mays
  unsure (1)..(543): unsure at all n locations
  Clone ID: MRT4577_3124C.1
cctcgaggccggccgggaacggcgtccattccgctcgtgcagncgtgcgttttcctagtcgcctctcctcccgcggtcagggtaacgccgcgtgtctcccgtcgatactcgctcacacctatggccgcaccgccggccgcctcgctagtgacacgcgccgccctcccgccgcgccttcgcccaaccaccgcttctccccttggccccgccgtcctcggtcccagcagccgccgccggtacctccgtctccgccgctcgccgtcgctggcggggactgccgcggcggcggcgagctccccatccgtgccttcctcgtttccggggcccgggccaggtatcggcgatgttcttgcagtctaccactctactccgcggccaccggcgagcccgtcctgttcagagacctgtgggaccaggacgaggcgtataatctcttgggtctatattttggtgctggtcgcacgttcttcaatccgggcagagcaaaagtgtttccacaggattgaatcccattagcgacgcgatgaaggaatgcatacgcac

SEQ ID NO: 109379 - DNA, 1278 bp, Zea mays
  Clone ID: MRT4577_31250C.1
cggccgcgtgggctcacgggtagctcatggtcgagcgtagcatgcaggaacttatttgccgtgcgctcccaggtctccgctcgcgtgccttccagtctgtctcacactagctgctgtgggacgatcgaagtgggtgtgtcagctagctagctgcgccgtgaccacgcacatgaccgcagtgcgcgcggggctgatcaagggaaagtgatcggatggagctggagctcgggctcgcgccgccgaacccgcatcagccgctggctgccgccgccgagttcgtcggtctcctcagcagctcggctggctcgtgcgggaacaagagggttctcggcgacgcgttcggggccgccaaggcggccacgcttccgctcttcgtctgcgaggatggcgacggaggcggcggcgaccgcgaccgcgacggcgtcgtcgaccatgaacagcaaagcaacaatgtacccaggaagaagaggctggtggggtggccgccggtgaagtgcgcgcgtaggcgtagctgcggcggcgggtacgtgaaggtgaagctggaaggggtgcccatcgggcggaaggtggacgtgtccatccacggctcgtaccaggagctgctccgcacgctcgagagcatgttcccttcgggtaaccaacaagatcatgcagaagacgaggtggtggtctcgcacgagcgccgccgtcgccatccttatgtagtcacctacgaggacggcgaaggggactggttgctcgtcggagatgatgtgccgtgggaggtctttgtcaagtcagtgaagcggctcaagatacttgcgtagccgacggtcggcgcctcagagacgtcgtgtggtccgtctcaccaggatcggagcagtgtagtactcctgggcgtcatctgcgtaataacgttgtttctgtcctgtgtgcccgtagcagtacgtactgtcctatagtaagctagctttatggggtgcttcagctttcagagcatgacgaaagcactgattagctgctgtcatcacatttggttcgtctttgtgtcgtacggtatcgctggcgtcagtgtcgcggcagcctaggtgatctaagcatacttactatctcaagttacttttggttcccttagcttgcatggtaattcatataccgtatacgtgtgtgactagtatttgggtttgacttttcactctgtataagatatatattatacgagcgagtttatcgactgctaaaaaaaaaaaaaaaaaaaaaaaaaaactcgggactagttctctctctctctcctcgtgc

SEQ ID NO: 109380 - DNA, 756 bp, Zea mays
  Clone ID: MRT4577_31251C.1
atttacagctaaagcaaaatgctctatcaagttccttagaataaacaagccaatccctgtcacaactttctccatttgatagaattctattatagaatagtgaagaaaatcttctagaaaacctgtccttaggccccttctgaattgatagatctcttttaggtccgttttgtgctaaaatgtcaacttgtttaatattaagtgaatcccaatatcttggatcaaatatatcaggctgaaaagaatcaccagcatccgaagaaggattcaagtcttcgctgttattgcctatctgagtatttgtgttgttagggagagcttcctcaacttcgacattattttctagaggatctatacgattaggatcaatgtcaatattattatcagttgcttgcccctggtcaggtgtcggattatcagatgacacttgtgactgttttgtaacaaacatatccatatctccttgctaatattggatcaatttctctattctttgttttttcttacgcttttgccaacctgattcaaattttctagaacgatctgtagaagacatggcttcaatcgttgaacactatttcagtagacgtctagatgaaaagattgaaaaaacaaaacattagagatcaacccagacccactacagtgttgtgattgtgaatgaattgtaaaactagataggaacagatgtcagatcgtttgttgtggttgtgaattaattgtaaaaaagaatgactattaataccttcatggcct

SEQ ID NO: 109381 - DNA, 311 bp, Zea mays
  Clone ID: MRT4577_31252C.1
cgcgacgaagcgacggaatccgcgggcgagggccgccgcgatctttcccaaaaagaacccggatctaaagcgggggctcaaacccgagagccgcgacgcatagcgacacgagaagcgagcgagcaccatcagcagccacaggaaaggctcaacgtcaaagacgacgcccgccgatgcaaacagagaccagtgcaacatgcccctgccgagcacggccgcatccacgtccgggcaagggccaaaccgacccgcacggagaccaggacgctcacaacgaccgcacggaacggacggcggcggcaaaggcccag

SEQ ID NO: 109382 - DNA, 630 bp, Zea mays
  Clone ID: MRT4577_31253C.1
tctcggacgcgtgggcgagcgagagagagaggtttgccaccttcgcaactgtgccaatggcgacctgctgcagcatctccctgccgtcgtcgccatggctcctcctgctggcggtcctcatcatcggcgacgccgcggctgtgatggcggtgccccccaccaggccgctgctgcgcatcgccgagccgccaaccgcgccgggcacggcagcggggcccgccggcgcgtcgcggcccgggggcggccgaggcgggaggccgcctgaccggtcggtggccggcgccgaggtgatcctcgccgggttcgctgccgcggtgatgatcatcgtcttctgctatatcagggtcaccaggagaaacagcggtggcggcggcggcggcggcgtaggagtgggagggaagcagcagcgcttgtgaggatcctaccctcctaacgtcctaggatttctttttctcagttcaggcgctttagaggcttgtagtaaagggtgtgtgtggtgggatactgggatgagaagacggtagaggtagtagcttggtagcaactgtttcaggttcgccagatcagtctacccacgagaaaaatgatctgtagtgtgtttgtgaataacagtaaacatatatgttctat

SEQ ID NO: 109383 - DNA, 158 bp, Zea mays
  Clone ID: MRT4577_31254C.1
gtgcacaacgcttcaagtatgtatcccctttctgttcaacaaaaacacgttcttcatggaacgggaggctgtaatccttcttagcatgggacgttggaagcaactataacgttcctatcttgggttttgctacaccgtagccacatacctgttgtgct

SEQ ID NO: 109384 - DNA, 411 bp, Zea mays
  Clone ID: MRT4577_31255C.1
tttagcttaaaagtcccggttagattcacggtaggttgcacatctataacgaagctaatccatggtgaatctcagatatacattttttttatctagctttgccaaacaggccattaataaatacgagggaaactggagctttaaataaataactagagttcaggttttggaccattataacacactacccctaaaaatgaagctttagctttcctcagagaaaaaaaaacgaaggttcgcttgataaatttcacattaagcactagtttgaaaactccatttttacaaggaatttttattttgctaaggaaaaatgaactaatttaccttgctgaaatagaaatccctccaaaaaatgacgttcccaaactagtcctaagcaaccctatttttttaaaagaatttttattt

SEQ ID NO: 109385 - DNA, 214 bp, Zea mays
  Clone ID: MRT4577_31256C.1
ccctaagcttccacaggcgcacgcccacgtgggagagtgcgttcaaggtttttcgcgcctaactcgctacttttcgaaaacgcataagatatttaccaggtgatgccggcgaaagacaccagcctttcaaagagggcgccattgcatatattttgaactataccctatgctttctcgcaagttgtagctgaaataccaaattttttcgtcgaga

SEQ ID NO: 109386 - DNA, 391 bp, Zea mays
  Clone ID: MRT4577_31257C.1
gtaaaacagatacatatgaattaaaatctcccttcatcatagtccggttttcataaggggggggtccaataaacttcagcagggggcggggggcacaaactggtgctataacacactgggggaatgggaccaaaactggaacaattaggccttggtcaggttttcctattccctaaggaattggaaagggttggtaaaaaatttgaaggatttggacttggtgtggaattaatttcactcaaacccctccaatccatatggggggggcaaaacctatttaatttaatacctttcccccaacctatctgatacaggccttagcttaaaatacactttgcccgcagggagaacccaagatgagaccgcaaaatgaatcccccgcgaccttggt

SEQ ID NO: 109387 - DNA, 531 bp, Zea mays
  Clone ID: MRT4577_31258C.1
ggtgtacaaacccgaaagacccaacccatataaaagggccactgcatcctttgcaagggtgccaagcattacaacgctgtcagaaaccacttgcgtacacaggggaacaaaccaagccagaggatccctatcagctcttgccctgcgcccgcaaaaaaccaatgcaggtggacaacccaaattaaaaaccaggtgtcacgaaaagaaaactggattcgctcattgatcggagcacccacatacaaaggggggagcctttccacaagagacttaagggaccttggaaacaaacaaacatatgatgcaaatctgccacaaatactctggagaagaggacgggcacataagttgccactaccgtaacaaccacgaacttgcgaaatcctagaagcacttgccgggaacaatagacacgccagacttcatggactcctccttcaatgtccacatcagcaggaaagtgctcaccaaggttaagatctacccttctatgcagacactgcacatgctgtcatgcggcgcaaccacctt

SEQ ID NO: 109388 - DNA, 289 bp, Zea mays
  Clone ID: MRT4577_31259C.1
ccttttttttttttttgctcgtccaaactagctttgggggtgacttagagtttttaaccttttttggctgaggggaaaaaaaccccccgctgaacaaaggatacatgccctgaaatgtagaaggacccaaactacaatgagtattatggcacaacccacggacggttcgccatgaaaccccgggggcattttttctgaagcaaaaaaggttgcggctgcttcacaaccatagggggaccaaacaaatggccggggccatacatgggggggacggcaaaaaaggcgttgg

SEQ ID NO: 109389 - DNA, 1133 bp, Zea mays
  Clone ID: MRT4577_3125C.1
ctcgaggccggccgggctagctctcgtgcagtcgtgcgtcctccatcgtcgcctctcctcccgcggtcagggtaacgccgcgtgtctcccgtcgcatactcgctcacacctatggccgcaccgccggccgcctcgctagtgacacgcgccgccctcccgccgcgccttcgcccaaccaccgcttctccccttggccccgccgtcctcggtcccagcagccgccgccggtacctccgtctccgccgctcgccatcgctggcggggactgccgcggcggcggcgagctccccatccgtgccttcctcgtctccggggcccgggccaggtatcggcgatgccctcggcgacgtcgaaatctactccgcggccaccggcgagcccgtcctgttcagagacctgtgggaccaggacgagggagtgtctgttgttgcgctgctaaggcatttcgggtgcccatgctgctgggagttggcctctgttctgagggacacaaaggagagattcgattctgctggagtaaaactgattgctgttggtgttggcactccagctaaagcccgtattcttgccgagcgcgcgtataatctcttgggtctatattttggtgttggtcgcacgttcttcaatccggccagtgcgaaagtgttttcacggtttgactcccttaaggaggcggtgaagaattatacaatcgaagccaccccagatgacagggcaggtgtcctacaacaggggggaatgtttgtgttcaaaggtaaagaactgttgtacgcaaggaaagacgagggcacaggcgaccatgcacctttggacgatgtgctcaatatctgctgcaaagttcctgtaacctaacccgacggcttgtcccacagctcagtagtaggtacttggaaagcactttcggcgtccttgattcctgaacttccaggatcgcctgctgcaagagtgtcttctccaccaatgtgccgatattttcttttgagatgcttggtttactttgatatctttttggtgatggatcgtgagttgttggcttgttgcattatgaattgcgtactgtaagtatccagtttgctgtttagcacttatacaattcgaaagcaaagttcgaagtcctaaaaaaaaaaaaaaaa

SEQ ID NO: 109390 - DNA, 361 bp, Zea mays
  Clone ID: MRT4577_31260C.1
aatatgggtgggttttattttcaattgggtgggtctttaatcatctttgtttaatcttttttctcttaagcagccctctaaagccaaaccaaaatattatctgaaaaacctatgattagccgccggcgcttaccaaagaaactgggtaaaaaacccaccctccccccgccttgcaaaaaagggggcccccccagaaagagaacgaaacaaacgcccccccttagctggattcctcacacatccatgagggcaccgtatggccagagacccggaagaaaacacccccccagaatggtagctctttgaaaaaaaaaataccctttgacaaaattaccctggggggaccttgccccccctgcaa

SEQ ID NO: 109391 - DNA, 396 bp, Zea mays
  Clone ID: MRT4577_31261C.1
gcgcaagcgcggcagtcgagctcgccgagctcgcgatcaccggcagctcgctcgctcgccaatcgccatggacccctgcgcgttcgtgcgcgtcaccgtggaccagctcctcctcaagctccccgccgtgccgcgccccagctccagcgccggggtgtacccttccaactcgccctgcttctgcacgctcaccctccaggaccacccctcctcgctctcccgcaccgcgctgctcccgctcgcgtgcgcctcgggccccgccgcggcggcggcgcacgccgaccccgtcgtgctcagcctcgacgccgacgccgtgcggaggctctcggcgcgccccgccgccgagctggtcgtgttcgtgcacgcgggcccgacggggaccacctgcggcatggg

SEQ ID NO: 109392 - DNA, 218 bp, Zea mays
  Clone ID: MRT4577_31262C.1
gcccccggatgttcattacctttgcttcgtaatccggcctctcctagctccatgttccaccaatccctcaaaaaagcctccactacctaccggaaggtccttgactccaacatcattctagaccgggagagacagaggcccgacggttttcacttctttactttctacatggatgaggagatgcggaaccccttcaacagcatgaacactaaggagtt

SEQ ID NO: 109393 - DNA, 390 bp, Zea mays
  Clone ID: MRT4577_31263C.1
acccaggaaaacaaaaggcaataaaaaggggaaacagtctatttttgataaacacaggggcggagctaggggggggcccatcgttgtataaacagcatatgggcggggttacttgggcaaaatattaccccaggaggccaggaccttaaagactattccaaaaagaaaaaatttcttttaaagcccttttatttaaggaacaagggaaaatcatgtcacttttttatgaaaggtcatttgccagctgaaaaccaaaggggttccgggagggttggagactcttcactgaaagtgaatagttggccctggggcccaatttaatggggggggcggggtgggagctaaaccaggtgccactcctcccaccggtttggggggacaatttttcct

SEQ ID NO: 109394 - DNA, 241 bp, Zea mays
  Clone ID: MRT4577_31264C.1
gcatgcgtacaacgtcgtctaacgcatcgtaaactcatgtgctccccctggcaccgactggttctagagaaatgatgtcattctcttcaatgctgctaaagggggactcaacactgtcttaaaatgacggtagacgtgtctaggtcagtaataagagtgtgtaaaatctgaatgagatacgaatacctctgcaatgatgaaaatctaatgatgcgcgtatctcattagataacaaggcggt

SEQ ID NO: 109395 - DNA, 273 bp, Zea mays
  unsure (1)..(273): unsure at all n locations
  Clone ID: MRT4577_31265C.1
tccggnccgggnagggcgcacctctggtgtaccagttatcgtgcctacggtaaacgctgggtagccaagtgtggagaggataactgctngaaagcatataagtagtaagcccaccctcggtgcttacgtagtatacttctgtctggattcacctttttttcgcatattgtgttaatactctgtaaattatcaaactggcttcctcaatgctcgtgtaattaaatgaaccgttgagtgattaagctagaaggcaagatatactttctatggagt

SEQ ID NO: 109396 - DNA, 761 bp, Zea mays
  Clone ID: MRT4577_31266C.1
gctccacactgagcttctcccactgccgtttccttcccaaaccctgctgccgtctcctttgattccacggcctgccacgcagctgcagcaaaactcctagtcaacccttcaactcgcctactactcctactagccccttttcttcgatctccgcaatctacagctttgcttctcccggctcgagcggctagggtttcgggagtgcgcggtgagacggcatgacaacgcggggagctaaacgcgcggccacctccgaccccgccgcacccgatggcggagtcttcccatcagcatgtgatggcaggacccgctagtttagatcctcggcgggcggaggctgctagcaaacatgtgagggcacttaatacccagtttgcaagctgggttcaattgcagctgcaaaatcatccagctgaactttgggaggacggccttaaggattacatatcacatgcttctgaaatcatggaaaaattcaaggatgttgtcaactggctaaggcaaaatcaagcaggttcaatagttgtttcatccccaagctcactgaaggatgataagtccaatctgccagcagcagatgatagcaaactcttagtacagccaagttcagataacaaacagaaggctccaattatggcttctagttcttcatcttttcagaactcaagcttaccgaaccttttttcatcgccttctcagcaaaaaacaccagattacagtggtatgtttgctgacaagaagaacacgtccagtgatagcgg

SEQ ID NO: 109397 - DNA, 2053 bp, Zea mays
  Clone ID: MRT4577_31267C.1
ccacggctcatattctcgtctgcttatccgctcccttctctcccgataaaccagcaatccgcatattcgcttgcctttcttgccctacgccgccagcgggttcccacggcccaccaccctccacttctcaccactgccgtctccttcccaaacccggctgccgtctcctttgattccacggcctgccacgcagcagcagcaaaactcctagtcaacccttcaactcgcctactactcctactagccccttcttttcttcgatctccgcaatctacagctttgcttctcccggctcgagcggctagggtttcgggagtgcgcggtgagacggcatgacaacgcggggagctaaacgcgcggccacctccgaccccgccgcacccgatttaccaagtaagagagtaatggacggaccctcttttgatgttcacagggcggagtcttcccatcagcatgtgatggcaggacccgctagtttagatcctcggcgggcggaggctgctagcaaacatgtgagggcacttaatacccagtttgcaagctgggttcaattgcagctgcaaaatcatccagctgaactttgggaggacggccttaaggattacatatcacatgcttctgaaatcatggaaaaattcaaggatgttgtcaactggctaaggcaaaatcaagcaggttcaatagttgtttcatccccaagctcactgaaggatgataagtccaatctgccagcagcagatgatagcaaactcttagtacagccaagttcagataacaaacagaaggctccaattatggcttctagttcttcatcttttcagaactcaagcttaccgaaccttttttcatcgccttctcagcaaaaaacaccagattacagtggtatgtttgctgaaagaacagatagcagtaagccagctttcaaataatctactcatatcattggtggaaagaacgatgttggtaaacccctcctgaatgctctgatctataaggggataaaaaggatacttcagaagaatacggttgcttcgatatttcatacttcagatgctgacagcagcaaaactatccgttttggtggaaacaaggggataattggtgacacgaatacgacaagtggtgacagcagtaatccttttcagtttgatgcaaataatggttttccaacatccaatgcaccatctattttttcttcagttgcccaaagttttaaccaacagaggccacctctgttttcaatgaatcaacaatcagtcctcccaggaaaccaaaatacttctgaagcttcagctgacgcagatgaagatgctgaacctgagaagccaagcagcccttctgtaaagaaggcagaagagaagggggtagttgttgttcatgaaaccaaatgcaaggtgtatgtcaagcatgatgatgccactaagggttggaaagacattggtgttggtcagctctctatcagaagtaaagaaggcacagagaaagcatccaaagaatccactcctaccattgttataagaaacgatgttggtaaaatcctcctgaatgctctgatctacaaggggataaaaatgaaccttcagaagaatacggttgcttcgatatttcatacttcagatgcacaatcaagtgaatcagctggtgacacagttgtagctcgaacatacctgttccgattgaaaaatgtagaggaggctacaaaactatcgacagcaatcaaggagaatgcgccctcagactagttcttacggcatggattatcatctcgaatctctgcttttggcacgagctgtaagatctgaaggggacaccaccgatggccactgcggcaggctaaaagatgccttgcagagtttctttctttctttttttgttctcctagctgcatcaagatatcttgcttgtaacttgtaaggctgactggctggttatgtattagtactttcatgtaccatcttttgcattgacaagattattgagcatgcttacagcccaaaaaaaaaaaaaaatcatgtcaccgcaggcagcaaagcaagtggcaatggttcaagtc

SEQ ID NO: 109398 - DNA, 1874 bp, Zea mays
  Clone ID: MRT4577_31268C.1
gggctgtaagcatgctcgataatcttgtcaatgcaaaagatggtacatgaaagtactaatacataaccagccagtcagccttacaagttacaagcaagatatcttgatgcagctaggagaacaaaaaaagaaagaaagaaactctgcaaggcatcttttagcctgccgcagtggccatcggtggtgtccccttcagatcttacagctcgtgccaaaagcagagattcgagatgataatccatgccgtaagaactagtctgagggcgcattctccttgattgctgtcgatagttttgtagcctcctctacatttttcaatcggaacaggtatgttcgagctacaactgtgtcaccagctgattcacttgattgtgcatctgaagtatgaaatatcgaagcaaccgtattcttctgaagattcatttttatccccttgtagatcagagcattcaggaggattttaccaacatcgtttcttataacaatggtaggagtggattctttggaagctttctctgtgccttctttacttctgatagagagctgaccaacaccaatgtctttccaacccttagtggcatcatcatgcttgacatacaccttgcatttggtttcatgaacaacaactacccccttctcttctgccttctttacagaagggctgcttggcttctcaggttcagcatcttcatctgcatcagctgaagcttcagaagtattttggtttcctgggatgactgattgttgattcattgaaaacagaggtggactctgtgggttaaaactttgggcaactgaagaaaaaatagatggtgcattggatgttggaaaaccattatttgcaccaaactgaaaaggattactgctgtcaccacttgtcgtattcttgtcgccaaatatgcccttgtttgcaccaaaatggaaaggtttgctgctgtcactggtagtatccttcttgtcaccaaatatgccattattcggaccaaactggaaaggtttactgctgtcaacaggtgcatccttcttgccaccaaatatgacattatttccaccaaactggaaagctggtttactgctatcactggacgtgttcttcttgtcagcaaacataccactgtaatctggtgttttttgctgagaaggcgatgaaaaaaggttcggtaagcttgagttctgaaaagatgaagaactagaagccataattggagccttctgtttgttatctgaacttggttgtactaagagtttgctatcatctgctgctggcagattggacttatcatccttcagtgagcttggggatgaaacaactattgaacctgcttgattttgccttagccagttgacaacatccttgaatttttccatgatttcagaagcatgtgatatgtaatccttaaggccgtcctcccaaagttcagctggatgattttgcagctgcaattgaacccagcttgcaaactgggtattaagtgccctcacatgtttgctagcagcctccgcccgccgaggatctaaactagcgggtcctgccatcacatgctgatgggaagactccgccctgtgaacatcaaaagagggtccgtccattactctcttacttggtaaatcgggtgcggcggggtcggaggtggccgcgcgcttagctccccgcgttgtcatgccgtctcaccgcgcactcccgaaaccctagccgctcgagccgggagaagcaaagctgtagattgcggagatcgaagaaaagaaggggctagtatgagtagtaggcgagttgaagggttgactaggagttttgctgctgctgcgtggcaggccgtggaatcaaaggagacggcagccgagtttgggaaggagacggcagtggtgagaagtgg

SEQ ID NO: 109399 - DNA, 555 bp, Zea mays
  Clone ID: MRT4577_31269C.1
gggtacctcgaggccggccggggccgggtaacacccccattccaattttctccgtcacgatggagaggcatccctcccttctcgcgagtcgtgctctctgtccccctttactacatttcctcgccggactctctcatgcccggctgaccccgcgcagtaggtgccactcatattgctcgaggctgaggcggactctgaggctgtgcagacatgaacgttcgctacgagcgcggcgatgacttcaaaaagaaggcggagaagaacctctcgggttgcgcccccatcgactccaatgacaatgacgccgccgacctcttcgacccggctgttgacgcctccgaggtcgccaagaactgctaccagagctgcatcagattatctccggattgcctaatctgtgtttgtaagaacatagaaggtgtggcggtgcctcagaatacctcggaggcgcccaaaatcgctacaaaaagctgtcacctcaggaaggtgcgcacgcgctataactgcctgtgcatcttttcttgcagaattgatgcgccgaacactgcctgcaag

SEQ ID NO: 109400 - DNA, 507 bp, Zea mays
  Clone ID: MRT4577_3126C.1
agcaccaccaccaccacctgttaccaccacacgcaggacaaggagccaatccccgccggcggaccacggggagtccccctagtacacccctgccacgacgacgcgtgcgggggggcggccgtatacgattccgacaagtacacgaaggaggagaaggagcacaaccacaagcagcacctctgccaggccgactccatcaacgccagcaccttgacactgtacaaaaaccacgaggccaacaaggacccatagcacccccaccgccacaagatcttagaggtaggccagggcgcggcggccataaggtcccgcagctctcccttccacgagcaccacaagaagaagaaggaccacaggatgccctggaggccggcggcttagaagaaccaccacttcttcggctgattgatcctaccgtatcgtcgtccctccccgtgtgctacgcatgacgtcgacagtgatatcgagcgcaacaacagttccactcgcttacgtatgtatgctctc

SEQ ID NO: 109401 - DNA, 372 bp, Zea mays
  Clone ID: MRT4577_31270C.1
tcgagcggccgcccgggcaggtactttcttatttctgggaagccacaaacatcagacaaaaaactttattattgaactataactcataagaaatctaaaagagggcaccaccaatgatgggttgttggtagaatgctgcagactgctgcaaatcaagagtgggcgaatgggatcgctagcacaagttgtaagagggggccagccctagagggcatgggcctgtaaaaacaccaacagctactgctgtgataaggatgatgattggctcacacacactggctatataagtgatatgccatgtggcagtggctgataaatcctatagagcaaagcaatcaggtggttacatgccaaaaacacctgtggggagag

SEQ ID NO: 109402 - DNA, 144 bp, Zea mays
  Clone ID: MRT4577_31271C.1
tacgctattaatttcgatcgagatgatttccactattcagctgaagatctccgggttatacatcgtggtcatcagctcgtacgcgactgcggcttctagcgcgcgcaggatgttgcttgtcaactcatagggatcggagggcag

SEQ ID NO: 109403 - DNA, 380 bp, Zea mays
  unsure (1)..(380): unsure at all n locations
  Clone ID: MRT4577_31272C.1
aaaccatacangttgttctaagtatgctctttagtaaaaaaatactaagttctagcaccaaagggggagggaaaaaaaactttgtggtgggagtatgtttttggactatcctatatttcgtcctttctctactatgtttcataatggttgtactactataattatcctggctctttaagtattgctttaaaggatcaatataatttgcttttcatacccaaaaaaaaaaaaaacgggcttcctctctacattatccaaacttacctacacttccttgcgacatcataccttttttattttgtaccctacattcaatttactttccaatatttcacaacgtttttacttttaaaaccctggccttactcaacttattcttt

SEQ ID NO: 109404 - DNA, 195 bp, Zea mays
  Clone ID: MRT4577_31273C.1
tcgcgcccgtgtaccgggcgccgttgcttgagcttcctgggcttatataagataaactttgaacgggggcccccctgcgaacccgaagcccccgaattggtttcggggcaaaccgaaggtaaacccccggggggccagggggatccaggaggccttgccgaaccacttggaccccgcgggagggccggtcgtccg

SEQ ID NO: 109405 - DNA, 565 bp, Zea mays
  Clone ID: MRT4577_31274C.1
aaaaaaaaaaaaaaaaaaaaaaaaaaaaaaaaaaaaaaaaaaaaaaaaaaaaaaaaaaaaaaaaattttaaaaaaaaaaaaaaaaaaaaaaaaaaagaaaaccataaaaaaaaaaaaaaaaaaaaaaaagggtttttccctgggccggcccccccctgggggggatttttgggattttccttcccccggggggccgttggggcttccttttagggggcccatttcccccttttgggggcctttttccatttcctgggccgggttttcccaacgtggggccggggaaacccctggggtcccccaccttaacccctttggggcaattccccttttcgcaggggggtttaataagggaagggcccccccccgttcccctttcccaacgttggcccaccctaatggggaatgggcccccccttttacgcccccttaagcccgggggggtgggggggtcccccccagggggcccttttattttgcaggccccctaagccccgctctttgggtttttttcctttcttttttcgcccggtgggcgggtttccccctaaaattttaaaagggg

SEQ ID NO: 109406 - DNA, 487 bp, Zea mays
  Clone ID: MRT4577_31275C.1
cctatccaattatttccccattctttttttttaaaccttgggggcaagctttccccaggaaaaaaagccaaccacccgcccggaaaagggggaaggctggaggcgggcgggggcccttcaaaaaggacttcccaaacccatgtaaatttgccccgccccaccaaacctggggggagggcaaacccccccacccttcaatggccaaacccccaggctacctttccctttcggcccccctggtttttgcaaactaaacccaccacccctcctgaacctaaccgaatttccactccccatccccttattaacccacccaattttttggtaaccccatttgctggagggaaaccctcaaacttccaaaaaaagtccaacttgccatttccgcccttaataatggggccaacagcctaaaaaaggcccccggtcctaagaggccccaacaatttgggatagttctcctttaatggcgaccccgtggtacaac

SEQ ID NO: 109407 - DNA, 244 bp, Zea mays
  Clone ID: MRT4577_31276C.1
cccacgcgtccgtgccctgcctgtgcgctgacgacgacgaactgaataatcaagtactcgctggtggctccatgggcggtgcgcagcacgtacaggttcgtgaggagcgggagcggggagcggaacctgctctccttcgccaggctgccggagctccttcttcggcttctgtacaaacagttctggatcaccgagtgctgccaccagacggtccggagcatgcacaggatcggtaacaagagcc

SEQ ID NO: 109408 - DNA, 1179 bp, Zea mays
  Clone ID: MRT4577_31277C.1
gggtacctcgaggccggccgggttttcctgtccgactcccagccgtcgtctgctgcggactccgcctccattttgctctgtttcttgcaagttgctcttgcggtagttcccccaactgccaccatgcagaacgaggagggtaagactgtggacctctatgtccccaggaagtgctcggccacaaacaggatcatcactgccaaggaccatgcctctgtccagatcaacattggccacttggatgcgaatggcctgtatgatggtcacttcacaacgtttgctctctctgggtttgtccgtgctcagggcgacgcagacagctccttggacaggctgtggcagaagaaggctgatatcaagcagtagattttacatctagtttaccaagaattggacactgccttagctatgttttgaattcatgtcactatatgcaatgttgtgatttcagctggtaccttaaatctgaagatttagtatctttgttgggtaaaaaaaaaaaaaaaaaaactcgcccctctccctctctcccaccccgcagccgccgcgcaggtagccctagcacccgcgacgagcaggatctgcccagttgctcttgcggtagttcccccaactgtcaccatgcagaacgaggagggtaagactgtggacctctatgtccccaggaagtgctcggccacaaacaggatcatcactgccaaggaccatgcctctgtccagatcaacattggccacttggatgcgaatggcctgtatgatggtcacttcacaacgtttgctctctctgggtttgtccgtgctcagggcgacgcagacagctccttggacaggttgtggcagaagaagaaggttgatatcaagcagtagattttacatctagtttaccaagaattggacactgccttagctatgttttgaattcatgtcactatatgcaatgttgtgatttcagctggtaccttaaatctgaagatttagtatctttgttgggttccttctgagtttgatgtgtggtgttcgtttaattcccttgtacaaccccatttagggggtgtttggttgctcctgctaaagtttagcccgggtcacatcaagcgtttgacttttaaataggagtatgaaatatagacccaaccaactggactaggttcgtctcgtcttttaaaaaaaaaaaaaaaa

SEQ ID NO: 109409 - DNA, 237 bp, Zea mays
  unsure (1)..(237): unsure at all n locations
  Clone ID: MRT4577_31278C.1
gggggaaccgnatttatttagttaaaaccttaagggaaacatccggcaaggaaactcccggaacccaccccccccttttttggccataacctttaacttgggggccagggtaatttacaggccacccataaatggaatggaaaggaaatggccgggccgaaccaagtacccccaacaaaacagggtttatccaggggccgggggggaccggggggccacccgggaatatcgggccgg

SEQ ID NO: 109410 - DNA, 707 bp, Zea mays
  Clone ID: MRT4577_31279C.1
gcgattgggaccctcgaggccgggccgggagcgctttcctgtccgactcccagccgtcgtctgctgcgtactccgcctccagtttggtctgtttcttgcaagttgctcttgcggtagttcccccaactgtcaccatgcagaacgaggagggtaagactgtggacctctatgttcccaggaagtgctcggccacaaacaggatcatcactgccaaggaccatgcctctgtccagatcaacattggccacttggatgcgaatggcctgtatgatggtcacttcacaacatttgctctctctgggtttgtccgtgctcagggcgatgcagacagctccttggacaggctgcggcagaagaagaaggctgatatcaagcagtagattttacatctagtttaccaagaattggacactgccttagctatgttttgaattcatgtcactatatgcaatgttgtgatttcagctggtaccttaaatctgaagatttagtatctttgttgggttccttctgagtttgatgtgtggtgttcgtttaattcccttgtacaaccccatttagtatcattgtgatgattttggattcaattttgctcgagtcagggtacgattccaataactgtcagctgttctccctattgagtcgctagtaagtctgaaaccagaagattgtttttcaaaaaaaaaaaaaaaaaggcccctagggcc

SEQ ID NO: 109411 - DNA, 1509 bp, Zea mays
  Clone ID: MRT4577_3127C.1
tgctgttggtgttggcactccagctaaagcccgtattcttgccgagcgcttgccctttccgttggaatacctctatgctgatcctgatcggaaggcgtataatccattgggtccctcgaggccggccgggacgggggttgatcttctagctctcgtgcagtcgtgcgtcctccatcgtcgcctctcctcccgcggtcagggtaacgccgcgtgtctcccgtcgcatactcactcacacccatggccgcaccgccggccgcctcgctagtggcacgcgccgccctcccgccgcgccttcgcccaaccaccgcttctccccttggccccgccgtcctcggtcccagcatccgccgccggtacctccgtctccgccgctcgctatcgctggcggggactgccgcggcggcggcgagctccccatccgtgccttcctcgtctccggggcccgggccaggtatcggcgatgccctcggcgacgtcgaaatctactccgcggccaccggcgagcccgtcctgttcagagacatgtgggaccaggacgagggagtgtctgttgttgcgctgctaaggcatttcgggtgcccatgctgctgggagttggcctctgttctgagggacacaaaggagagattcgattctgctggagtaaaactgattgctgttggtgttggcactccagctaaagcccgtattcttgccgagcgcttgccctttccgttggaatacctctatgctgatcctgatcggaaggcgtataatctcttgggtctatattttggtgttggtcgcacgttcttcaatccggccagtgcgaaagtgttttcacggtttgactcccttaaggaggcggtgaagaattatacaatcgaagccaccccagatgacagggcaggtgtcctacaacaggggggaatgtttgtgttcaaaggtaaagaactgttgtacgcaaggaaagacgagggcacaggcgaccatgcacctttggacgatgtgctcaatatctgctgcaaagttcctgtaacctaacccgacggcttgtcccacagctcagtaggtccgtaaagatcactttgagctatctttactagtgatttcttatttcatccttgttacaaaaaggagagtaagaatatactcgtaacaggcacattgtctttcatccattctcttttggcaattggcgttagcagatccggcgtcctcgattcctgaacttccaagatcgcctgctgcaagagtgtcttctccaccaatgtgccgatattttcttttgagatgcttgggttactttgatatctttctggtgatggatcgtgagttgttggcttgttgcattatgaattgcgtactgtaagtatccagtttgctgcttagcacttatacaattcgaaagcaaagctcgaagtcctggctgcctggctcttccttggagatggaagtttttgcacttccagaaatatcgggaacataaagtccatgtgatcttttgtgcctttaaaattgtggatc

SEQ ID NO: 109412 - DNA, 383 bp, Zea mays
  Clone ID: MRT4577_31280C.1
ggccggcgcgcgcaacactgcgatccgcaccccccacttcgatcggttaccaaggaggcgaggtgcctgtgcgagaggaaggaggacgatgcaggagacggcgacgtcttcgtctccgctgccgtcgctgagcaatggctaccagccgctcccgccgctgtacctggggttcctggccatatgggcggcgtctggcttctcctgggccttcaccacgtggaggaaccgccattaccaccaggcgaacaacctgcagtggatcctgtccctggtgccgctgatcaaggcgctccagatggcgctctcgtttctgttctggtactcgtgcgtgcagctccagacgtgctcgctgtggatgtcggtcggcgcgtacgtggcggggg

SEQ ID NO: 109413 - DNA, 267 bp, Zea mays
  Clone ID: MRT4577_31281C.1
ggcccaagggaaagcattcttttacttcatggcctggcactatgcaggattcgatctcttttctcgtaggaggatcttccgcttcatctatagattcgttttctcgttgaactcttgcttgaaagcaaacatgatatagtgatataggcccggggccaatgggaatctctttttctcttaggcaaaacaaagcaaatagaagtgaagtaaagctttctcgattcgatatagaatagaatagtgacgagaaagggcaactagatcaca

SEQ ID NO: 109414 - DNA, 402 bp, Zea mays
  Clone ID: MRT4577_31282C.1
caataatgaagttattttcaactatgcaaggatttgtttctgttagtgggagggaggaaagtgcttgcaataagatgcttccgtttacaatatggactgcgttctttgccaatgttctcactggttcagccttagttcaattcgagattttccttaatccaaaggagctaccttcaaaacttgcagttcttgtaccagcgcaggcctctttctttattgcatatgtggtcacatcgtggacaagcataacatctgaactcactcaaattactgctcttttctgtcatctggggggaaagtgtgcgaagtgttgcaagcgggattactccaaagctccatcaatgccttattatagggaaattccacggattctcttgtttgggcttattggactcgcatatt

SEQ ID NO: 109415 - DNA, 325 bp, Zea mays
  Clone ID: MRT4577_31283C.1
atggtggggcaacttcaaacaggggtttttttataggaaatacctgccacgctccacaggaaagacatcatggatacatgggactgcaaaacccgaggcacgggagggggcacatggaagcaaaacacaccaggcgcccaaaacaaccgcacaggggacaccaccttcaatttggttagaaacagaataccaaaacgagacgccaggttgagactgtaggacacctgggtgcccccgggaaccaccgaggcggcaccaaaaagacggggtctgatactgtaagaactaaagtcacctcctgtgagcaaaccaagcacgctgatga

SEQ ID NO: 109416 - DNA, 241 bp, Zea mays
  Clone ID: MRT4577_31284C.1
acaacacccggtttttcatcacgtcgctcctaatgtttgcgtgccccatggcaagatcgaagggtttgacatctcattttacccacttactacttctgggattccaacattctaacatcgttaggcctagatacatttctatccccattcctcactaccacataatttttctaccaccattttgccatgtaattcatcctgttatcttcctctgttgcttgctgcatgttatcattcttac

SEQ ID NO: 109417 - DNA, 272 bp, Zea mays
  Clone ID: MRT4577_31285C.1
cccacgcgtccgcgctcgcggactgccattcgacccaacacgcactggacctcgcttgcgatgatgaatctattcactcggtgaagagtgactgctcctgtgcaactacagcctctttatctaccatgtaagactttaccttacgcagttctgcacttgtaaacggacgcttaaccacactgcagacctggtcctgctcatcaccatatgtgtcactggcaggcaaccatcatgagtcctcctcatcgtccatattctggtcgactttatta

SEQ ID NO: 109418 - DNA, 376 bp, Zea mays
  Clone ID: MRT4577_31286C.1
accggggaattcggctcgagcctttcttttcctcccaccgccactttttttttctagaaactcgcccgctaaccccggcaggggttcatttgagggcacggcggcaacaacatcctgccgaaaaagcggtggaacgtctataacttctacaaccgagaaaaggtgcaaaaagaccaggcccccgccgtccgggaggagcagctccagcgcgaggccgaacccccccgcgagtcgcatctacccctcgctgcactaccccgcaaccgcggtcctgtacatacggagacaccctccgactctacatcttaccccgccggccccgttgatacagccaacgcccttcctttcccggcggacgccctttcttccccggcaa

SEQ ID NO: 109419 - DNA, 101 bp, Zea mays
  Clone ID: MRT4577_31287C.1
attatgttctctttggcgatggttatctgagagttacttggatttatctaatgtaggcgcgtggtcaattcctttctatttactggcattttgccactatg

SEQ ID NO: 109420 - DNA, 163 bp, Zea mays
  Clone ID: MRT4577_31288C.1
actgtgctcgagcgtaaggtccgttctcgaatacaatcaatctgcgtggaacaacttgatatccttgaatatgtgagtgagatcatcttcaagtgagatgggtgatcagaggctgccagatgtagtcacaaggagatgagtggcgtctcatcgcgagcacgct

SEQ ID NO: 109421 - DNA, 350 bp, Zea mays
  Clone ID: MRT4577_31289C.1
agcagtggtaacaacgcagagtacgcgggaacgttttgtttcttgtctataacttggccaccaaagttttgttatgcttaactagtgactgagtgaaggtctacatgtaattgatttgaattctgtgttgccagtcacggatttgcagcttttaaaaaaaaaaaaaaaggggggggggggtaagaaaaaagaattacaccaaacccttacctggctgtagaaccaaacagcaattgaagaaaaaagaggaactctgggtggttccctactggttaagggcgatttccatgacagtggtggcctgtattagtggttgcgagcttgctccatgctttggcggggggttggcc

SEQ ID NO: 109422 - DNA, 973 bp, Zea mays
  Clone ID: MRT4577_3128C.1
ccggccgggagtccgtactacccaggcaagcgatcgtcggagcagagagagacttcctcgcctccatcccatcccgccgccgccgtctctacggtcgctaataagccgccgcatccagggatggagatgaagaagatcgcctgcgccgtcctcgtcgccgcctcggccaccgtggcgctggctgcggaggcgccggctccgtctctgagcagtgtgtgctccgcgggcggagccgacatcggcgggggcgatgtgggctcgttcttcctgtgctacattcactgacgcccggccgggacataacctcgcccgcgccgcctcccccacgagacgccttcttgctctcgcttccggtgacgcccgccacttcctccccgacgagatgacgaaacgcaccaagaaggcaggaatcgttggcaaatatggtaccaggtatggtgccagtttacgtaaacagatcaagaagatggaggtctcgcagcactccaaatacttctgtgagttctgtggcaagtttgccgtgaagaggaaagcagttggtatctggggatgcaaggactgtgggaaggttaaggccggtggcgcctacacaatgaacactgctagtgcggtcactgtgagaagcacaatccggcgcctgcgggagcagaccgaagcatgattgcgggcagcttgaaaaggagtacctggatttttgtagttcagccaagagccgtgaattgtgatgttgccattttgcctttttagctaaatgaacaagaaatgtttatctatctgtagtgaccactttgtactcatggtttgtcatgctaaattgatggtatgcactatgcaatgcaaatacttgcgtaaaaaaaaaaaaaaaaaaaaaaaaggcccctagggccgggaggactaaaaataaaagagctcgccgacccggtaattaaattacataccggtacctgaaggcctaccagattattctatagag

SEQ ID NO: 109423 - DNA, 382 bp, Zea mays
  unsure (1)..(382): unsure at all n locations
  Clone ID: MRT4577_31290C.1
cacgcaaacgntggacagtttgtcacgctgcagcaacggaaagtcgcgaaccctgtccgggcacgctcactccctatcttttcctgtcctggcccgtgtacgggtaccgccattctgtgttcaacccacactcctgagggagaggcggcgggtccatggtttttcctcgaatatctgtctaagcccgcgctcccattctattgtggtgttcctggttcgtccggcggtgcgcagtatgctattaatcccccgctttaccgttttgccaaattagtgcccctcttcgagagtcattgattgtgccgtctcggagcaccgctgcgagctcccttttcacctcaatctctttcctgcgtgcgccggctttagctcggtcgctcct

SEQ ID NO: 109424 - DNA, 3120 bp, Zea mays
  Clone ID: MRT4577_31291C.1
tgcatttctccttatgctattttcaaatatcatatttgtggcagagatgctatttaggcgacagtggctggatgaacaatctgaaaggatatactggaaaccgtgtgtaccccccatatactgtttgggttttagttgcacttatatctgtggctttttcactgtacctggctgttacaccatagaggtctggaagccatgaaggtgaatcccatgaagggtctgtgcaatgcgggagagaacacttgaatactgctgaagcaagagaagatgttacgggggaggctgccacagacgcggacgatcataagccaggtatttttccttctcccggggttctgcgggaccggcggtcgcccctgggcctggttgctcttgatacttcggtttcttctttcttatctgattccgtgtctgacctttctattgcttatgcattgcctgcttgtggaagctgtccctcccggtccttgactcctagggctcgaaacgcgtggttgtactagactgatgggagcgcttggaaaagtaggcgacgtctaggttaagcgctcaaggggcggtaaaacatgcgcgcgctaccatgaccactgaatgaggtctttgcatagggtccgaagtcgtcgcgggcaacggtaaggaagatttccgcactttgggtctgagaagttaattgttgatagcaccccatatgtgtctgatgactgtccgccatctgttactttcagcatggggaaagggctcaagatgcaggaaatggcagtggtagtctctcaaggttatctggtttgggccgtgcagcaaggagacagctagctgctactcttgatgagttctgggggcatctgtttgattaccatggtaagctcactcaagaagctagcaccaaaaagtttggtatcttgcttgggatagaccttagaacacctagcacatctgtaagaacggataaacaagctgctgaaatacttaagagcccactggtgagagactcaatgcggggggcagcttttttgtcaagctcagtggacatgatgtcccctaagaatgaaacgtcgaatttggaacttgcatatgggcttcagaggggacctggcatgggattgtcaagctggtctcagggtatgcagctaccaaatacacagctgcagagctcaagcaatagcctacttgagcagagtgcaagattaaactcaaattttagttcatcttattcagacaacaatcagttctaccaacctgcaacaattcatggataccagctcacatcttacctgaaacagatgaatgccagcccaagcctttactctagcatgccgctggacccacaacggcttccaaaatcatctgtgtctgctgtgccaaactatgctgattccatgatgcatgctcgtaatcataacctgcttgcttcactgggtggtactactacacagcttcctgcaacatcccgcgtaggctcaatgatgcctgaaagatcgtattatgatccttccagcgttgatgggaatgaaaacgctggttcacctgcttactcaaaaaagtaccacagctcacctgatatgtctggaataatcgctgcaagtagagctgcactcttgaatgaagcaaagttgggtgctgccattggaccacagtcatacctcagcaggctggcggcagaaagatctcaatatgcaagctcaacagccaggcccgcggctccattagcatttgacgagctttcacctcctaagctccagagtgatatcttctcggcgcagtcaagcatgagaccaagtgctagatccctttgggctaagcaaccatttgagcaattgttcggcatgtcaagtgcagagctcagtaaaggtgacttcaatcttccaggcagatcaggtggcgtggccaaggacgatttctcttataaggaatctgagacgaagcttcttcagtccctcaggctctgcatcatgaagctccttaagctagagggatcagggtggctgttcaagcaaaatggtggttgtgatgaagatctaatcgaccgagtcgctgcagccgagaagctattgatgcaagggactgccgagaatcaactgctgcttcatggtggtgatctccagcaacattcttccgatcaggctggcatccagtacatgcgcacgcttcccaactgtggggaggactgtgtttggcgcgcgtcactcgtcgttagtttcggtgtctggtgcgtccgccgagtgctggacatgtctctggtggaaagcaggccagaactttggggcaagtatacctatgtccttaaccgtcttcaggggatcttggaccctgcgttctccaagcctcggggtgctctgaccatatgcacctgccttcagaaagacaccagagtgcgcaatagcccaccccacagtgggctaacagccatgggtccggtccccacaccgctccggggcgccttcacgaccgcaggcgtggttctggagatgatcaaggacgtggaggctgcggtctcaggccgcaagggcaggagcggcacggcggcgggcgacgtcgccttccccaaggggaaggagaacctggcctccgtgctgaagcggtacaagcggcggctcgccagcaagggccagtagcgcgcgggtgtcagacaggcaggcgatcgcaagcaatgttaggaggagcctgactattgttctccaggggggctgccactggcgccggcctccctgagccctggattttttcgttgcacgacgttcctagggaccggtggttgcccgatggtcgtcttggtcccttccagcaggttttttttttccttccctctttctgttggtttctttttgttggctttgtgatgttttgtaaggggcaactagggtatgtgctcagaaggactcaagatgtacacgcgaagatgtactagtctgctgatgcagcgttgtaaagtccacactctgcaggttaaccctttttggggccgtcaagtgttagtgcgtgccctatgtatgttaatcacccctgcagagaggttgcgaatactgaactactcacagacctgcacctgtcgagatcgtttgtaatatccgacgtcttgttcagaattgttctcactcttttttttaaaaaagggggggg

SEQ ID NO: 109425 - DNA, 741 bp, Zea mays
  unsure (1)..(741): unsure at all n locations
  Clone ID: MRT4577_31292C.1
tccacgcgtccgcacccagaattcggcgcgggccagacatccgcggcgtccgcctccccggccccgatcgatcggaagcttcggcttcccctgacacaaggccggcgcgaaaacgcccccacaaacaaacggcggaccattgccgcgcgtcgattcgaacccgccggggaaagcgccgacgccgtctcaccccgcggaggcgaaaccctagcgatggcggcgtccgtggacgctgcggcggccctggcggtgacgccccccgctgtggaggaggcgggcggcgctgttgagcaggccaggacgctcatcggcgcgctcaacctgctttcccgcaacctgccgctgccccccgacgtcctgcgcgcggtctcgtccatctaccacgatgggggtgcgggtgacgatgaggaggaggaggggggagagcgggaagcggagaaggaagggaatatggagatgacggccgcggaggagggttaccccgttgacgttgcgaccaaggggagctccttgattgaagagcttgaagatgcaatatataagaataaaaaaacaccaatatcctactcagagttagcagctctgaaagaagggcgattcaatgcatccattcagcatcggctagctgaacttgaaggattaccttgtactagggggngaagacttgcanatgaagtgtttgcttgaatgtatgggcttaagctgttagatttgcagaagaaagtgcgatctgatatcagt

SEQ ID NO: 109426 - DNA, 353 bp, Zea mays
  Clone ID: MRT4577_31293C.1
ggggggagaaagagatttaaaaaaaaaaatacgaggcgggcatgcatatgcatagggtgaaaccatgagttggaaaaacatatatagaggggcccgatcattttggcgataacccctcaaagcaaaaaactaaccccctctgggggggaaaaaacagggttatgaacgggcaaaaaaaatcaggggggtggttacggactgaaacggatttattttgtttggtccaaactgcccgtttgttgtccgggtcacccactccatgttttcaattaatgggacttggggtttgggagggtgccccccgaaaggatggcctttggccaaatggggtaaggggttttttttaacttttt

SEQ ID NO: 109427 - DNA, 579 bp, Zea mays
  Clone ID: MRT4577_31294C.1
gccggccgggctgggacaaacgcaacctgccgggaatgaataatgcaattctccggcttcagcaaagaggggccctctccagacacactgctcctcagagacaacacggaccattctgatgtgtcgagaggggcgcagcatgccgaccacggatctctactggagcgcggtgacggcgatgtccgccatcgtcatcatctccttcctcgagcaccacatggtctgcctctacttagcatatcaccactgacctagaccatcagcatcagagagcgctcatcctgcctctgaccaatgacaataaccgggacttactatttctccccaatcccaatttaactgaggaatttctatctgatacatctgactggagctatgtgctgatatacaaattttctactgatctagactcggctacatcttataaactcgcaggttgctgtgcatatagcacatcggaatgaactgatagcgccttatatatctaaccaggttgatcatacacttcacgatgcgaatgttacatgtgctgtactcgaactacatggtcatctcatatagtaccctctcctactcatt

SEQ ID NO: 109428 - DNA, 1188 bp, Zea mays
  Clone ID: MRT4577_31295C.1
ggaccctcgaggccggccgggtcaagtagagctcccggctccatcgatctctctcgttcttgcctctcgcgcgcatgcatggtgagttttcttgggcatcatcgatgcggcgactcgatctttctgtcctcctggctcgtttgactatggctcgggcctagattatgccccccgcgcgcagacagaatcatgcatgattaggatatgattatctcggcgagtgtttcctgtgttgtgtacttgggtttcgcgcggtcaacacatgcagcagattggtgcaatcataaggattcttgacccaacaacactgtcaacaaatgcatgctttcttcctttaaactatcgcatggcaatatggcatcgtctcccttgttgcggtctttcttttctccgccggcctgtccccacttctttttctgatctctagctgatctgacaggagaaagatgaggagaaaaggttgtgtatcatcgctatcccttttcgcatgcatgaaggatcttcttatcttctcttttgcttacctttctctctcctagacatgacttctttgtttctagttcatcttaatctaagagatttgttggccaaatccccatctaattaacggtggtctcatatgtatgatcagtctgcatatatatctcctgagtatcaaatgattttgctcataaatcgatcaatgatcgtacacaaacaagtgtttctagctagttctatatgttaatttccacaaattagaaccaagggcagtaatctcaaagatactactgctctacatctacatgtgttcttttcgattgggggcagactacaagctattaggagtaaacagataaaaatatgctcaccctttgcctgaagattatggactatctatctcgatatatagatgcaaataaataaatactgctgccatctacgaacagatgtcatatatattttgttttttcgatcggaaggctagctaggccaaaagttaaggttcatgaatagttgtctccttccccttgtttcctcatacatcaaagcaggacacatgcatgccactgatcgtcgtgtcgtcccatgcatggagctagctagcgagagctccataaagctgtaactttacaactctgcctccatgcatgttctgatttatatattccaactgcacaggtttttatgaaaaaaaaaaaaaaaaaa

SEQ ID NO: 109429 - DNA, 273 bp, Zea mays
  Clone ID: MRT4577_31296C.1
atgcttacatcagctatatctcaaagctcgcttgactcatactagagccaatagcgggaccacctaccctagacgaaattatatgcgttaaatcagaccatgtgttcgacaacaagatgcgcatggcctgtccgtgcccgcacataaaataccgtaggatcacggctacttgctgggagtatgttgtgcactcaacgaggcatcgctgctagaatgtaacttcctgcgttgccctcctaagctaaccgtaatcccaagcgtcaaaaaaaacaa

SEQ ID NO: 109430 - DNA, 470 bp, Zea mays
  Clone ID: MRT4577_31297C.1
gtggggtgtgtttttttttttttttttttttttttttttttttttttttttttttttttttttttttttttttttttttttttttttttttttttttttttttttttttggggaaaagggccccaaaaaaaaaggggttaaaaaaaaagggggggcggtgtgaaaccaaaaaaggaacacccccgcccccggggggttttatttggataccaacaaaaaaattaagggcagcaacaaaccaagaaggggcggtgcattaaaaaagccccccccccgtccttgtcaacactggcaacaatagcggcaggggcaggagtttgattttaaaaaagggcaacaaaccccgcgggttggttcttaaccttgaggccaaacttttggatgggggggaacaaaggggggggggggggaacccactcaaaggccgccttggaaaacctggcccaattttgcacctgcttcccctgggg

SEQ ID NO: 109431 - DNA, 387 bp, Zea mays
  unsure (1)..(387): unsure at all n locations
  Clone ID: MRT4577_31298C.1
gcgacccgcttcttctnntctgccggcggttccctttccacccgcttctttctnngccggtggttggcgnnagagtgtgttgaagacgaaganntggtggcgaatggggcgacgcacctgcttaganngggagtgcgnngcggcagcttggcaagnncctgcgcagnngcgtagtgaccanncaagcggtgcttgctttgctggcgagaggggtgagtgccagcttcgatgcttcnncagttttacaaaccgatgnnaggtctgcggnngccgcaaaatgggtcaccaatacacncnngttctgatcaaatgagcnnattgggttcattcgcttgtnntgtcgcttatgctttccatgnntttttgggaaaagctgtnnaccgcacc

SEQ ID NO: 109432 - DNA, 441 bp, Zea mays
  unsure (1)..(441): unsure at all n locations
  Clone ID: MRT4577_31299C.1
acgatgccagagagaacttacagttgtccccggagagaggtttgggaagctggcggggaggaacgctctctgcttccagcctctttccattgccgcagcatgacagacctccagcatcacgcatctcttggtcccaataactgcctctagatacatagccatactgctagttaacccagcgtccctcagacttggatggagtttctgggagggtacacccaaatgatgcagatacttgtatactttgagccccttagcgacctaaccaaattgtaaaaatactatttaccaaaggtgctattactctgtaaaacacttttttttggcaagctgactntattcttcaattattatcattatattattgctttttaatattntattttcttgactaggtattaagcttttgtaattatttttcagtagtcccaccacttcata

SEQ ID NO: 109433 - DNA, 840 bp, Zea mays
  unsure (1)..(840): unsure at all n locations
  Clone ID: MRT4577_3129C.1
ggtgactcctaggtcaactgccagaagcttaagctgccagaaggctgtgggtatgaattccaaatgcagtatggttcgattggatggtcagtgggtgcattgctcggatatgctcaaggtgcgaaccacaagcgtgtgattgccttcattggtgatgggagcttccaggttacagcacaggatgtgctgatcaacaacggtgggtacacgattgaggtggaaatccatgacgggccatacaacgtcatcaagaactggaactacactggctttgtggacgccatccacaatggcttgggcaagtgctggacctccaaggtgaagagcgaggaggagctgacggctgccattgagacagcgctaggggagaagaaggactgcctgtgcttcatcgaggtgatcgcgcacaaggacgacaccagcaaagagctgctggaatggggctctagggtttntgccgccaactcccggccaccaaatccttagtagaagttccgcaggctccaagcctcggagtgccagtagtgatagtaagctgtagcacggtgggggctcacccgaataacgtgaacgcattgccctttctgtaacgtgtttaatttaattgtgtttcggtggtcgtatatctgttttgtgacgtgttccctgcttctcccatgtgaattccagaagaactatgagaaaattcaggttggttgtcactatttgtgctgcgttaccggtgtgattttacttgccaggtaaacatcgccggccagggagtgaatcatctagagattgggctataagtattgtagcgataattattctagtacggaagcaggagatggagcatgtact

SEQ ID NO: 109434 - DNA, 1658 bp, Zea mays
  Clone ID: MRT4577_312C.1
tactcgcctatctccgcgactcaaagcttcttccatttcctaccgccgccgctgcagctccaccccattccgtcgacaccatgagggagtgcatctcgatccacatcggccaagccggtatccaggtcggaaacgcgtgctgggagctttactacctcgagcatggcattcaggctgatggtcagatgcccggtgacaagaccattgggggaggtgatgatgctttcaacaccttcttcagtgagactggcgctgggaagcacgtcccccgtgctgtttttgttgaccttgagcccactgtcatcgatgaggtgaggactggcacctatcgccagctcttccatcctgagcagctcatcagtggcaaggaggatgcagccaacaacttcgctcgtggtcactacaccattggcaaggagattgttgacctgtgccttgaccgcatcaggaagcttgcagataattgcactggtctccagggcttcctcgtcttcaacgctgttggtggaggaacgggctctgggcttggttctctcctcctggagcgcctgtctgttgactatggcaagaagtccaagctcggtttcactgtatacccatccccccaggtctctacatccgtggttgagccatacaacagtgtcctgtccacccactctctcctcgagcacactgacgttgccgtcctcctcgacaatgaggccatctatgacatctgccgccgctcccttgacattgagcgcccaacctacaccaacctcaacaggcttgtgtcccaggtcatctcatccctgactgcttccctgaggttcgatggtgctctgaacgttgatgtgaatgagttccagaccaacctggtgccctaccctaggatccacttcatgctttcgtcctacgctccagtcatttctgctgagaaggcctaccacgagcagctgtccgtggccgaaatcaccaacagcgccttcgagccatcctccatgatggccaagtgcgacccccgccatggcaagtacatggcatgctgcctcatgtaccgtggtgatgtggttcccaaggacgtgaacgctgctgtggccacaatcaagaccaagcgcaccatccagttcgtggactggtgcccgactggcttcaagtgcggaatcaactaccagcctcccagcgtcgtccccggcggtgacctggccaaggtgcagcgtgccgtgtgcatgatctccaactccaccagtgttgtggaggtcttctcccgcattgaccacaagttcgacctcatgtacgccaagcgcgccttcgtgcactggtacgtcggtgagggtatggaggagggcgagttctccgaggctcgtgaggatctggcggcgctcgagaaggactacgaggaggtcggtgctgagtttgacgagggtgaggacggcgacgagggtgacgagtactagaccctctactggcgcggcgtcgtcgggcctgtgtgccactgctatcctgtgatctgccctgagtggctcctatcgtgttatgtttctgtcggttcttatctatctgtcgttgtgtggtttacaacttgcgttgtactccctctgtctctaaaagaaagtcgtttgacttttctaagatcaggtttgacctgctcattttattcaaaaaatttcataattatc

SEQ ID NO: 109435 - DNA, 276 bp, Zea mays
  Clone ID: MRT4577_31300C.1
cggccgcccttttttttttttttttttttttttttttttttttttgttttttttttttttttttttttttttttttttttttttttttttcccacccccccctgggggggaacggggtttaaattttaaaaaaaaaaaaacccttacaaaatttaaattgggcctagggaaaaaacaaggttgggacaaacaattgggggggatgcaacaaccaaataaatgtcttctggggagaaagaaacattaaaattttcggaatacctttggaggcctgaa

SEQ ID NO: 109436 - DNA, 889 bp, Zea mays
  Clone ID: MRT4577_31301C.1
tgcggtcatgttttcccctttttagcctctttaagcagtggtaacaacgcagagtacttttttttttttttttttttttttttttctgagcaccggtcaaagaatgctgtccagctgacttttgagaacgcctactactcgaacgtcggctagatttctgggatgagcttctagaagtaggattttcaagctcggatccatccatttctgactgttagatagcacttcagaacactgattcaggccccgcgtactctgcgttgttcccgaatcttggaggcatcacggatccaacgccatatgagaaggtcagtataattaagtaaactgctcaatctgaaatcttaagttcagcactgacgctattaggtcatcatgcttagcttttcaactgccatcgtcagaaactgatctagaagatgattttggttcgctttggtttggatggaaataaagcaagggagaccttttctataatctctaaggaaaatggtcaagggatcagttgaaatttttgttccctgcagctattccggattgaaccgagccggcgggcgatcggatccggagatggagcctggcggggggcgggggcctccctgcggcggatcgaagtggcgtcctcctggacttgtggttgggagcaggacggcggcggcggcggcggtgggaggtcgggtggtaggctagctgtggaggtgccgcggccgcgagatggcgagagagggctctgcccgcgcgcgacgcggtggcgactggcgacaggggagcaggagtgtcaggacgtgcgtcggtcgattcgatgggttttagcgaggggaaggagcggggacgggagggaacggcgtgccggacacgaggcggcgtcccgtctcccgacacggccggc

SEQ ID NO: 109437 - DNA, 957 bp, Zea mays
  Clone ID: MRT4577_31302C.1
ctcgccctgctcctctgcgcgcagccctctgacgcgttttcctccctgccgagctcgtctcgagctcccgcccaccctctggccagccgtcgcttgcccctgccccaacgtcgtgcctctgttatttacggccgtcgctctcccagcccggccggatctcccagcgtcgcgccctgttgtcctccctttcccatggccggcgctccgttttcctgaaccggccgagtctcctcgacatggagcatctccctgcgcgcgttgaacttctgctcggtgtcctgctggccgaagcttcggattgccgcgccgatggccgagcccggcccgcgccttccctgtcctctgtacacgcgcagctcgccccctcagctcgtcgcgcgcctgggatgcttgccggcgctcagctccaccgcgccgtgaagtctctgcgcgcaagctatctgttggccgcgcgcgaactcctctgcttggcccgtcgtcgttctccagctccttaccgcactcgattgtttcgtcgtctcgtcttgatgccagtccctacgtgacatctctgacgtatgttcacgccgacaaaagaattccaagaagatgtagagaagcaagcctttgatcgatgttcaagtggtcggcgaaaggccagaacaagaatcatcaccgtttatgtggagttctacttaatatgaaaagattccaagaattgtggatggaagagaaagtgaagcttcgtgctatactcgtcagctgctcgatcgaagacttcaatcgaagactatcgtcgttcccgccaacactgaatcaatttgataacggtgagccaaatcactatttttactatagattttatgatcgtgaaataagacgcttagtttgcataggaagttaaaattagaaatacccatgaggcgaggtgtgcttcgatgggtttagtggccgaatatcctcgaactagttctattt

SEQ ID NO: 109438 - DNA, 216 bp, Zea mays
  Clone ID: MRT4577_31303C.1
aattcatgcctatctcgatctccttcttcctggtgctcagcacggtggtctggatcgcgtacggcgcgctgaagaaggacgtgttcgtagcgttccccaacgtgctgggcttcgtcttcggcctcgcgcagatggcgctgtacatggcgtacagaaagcacgcggcgacgctggtgataataccggaacagtccaaggaagaagtgaacgagggca

SEQ ID NO: 109439 - DNA, 476 bp, Zea mays
  Clone ID: MRT4577_31304C.1
cccactttctcgtgctccggccagcgccgcctcgcccagccacctccgcggctccgctcctctgcctcggcctcgcgccctctcccagcagcttcctcctgctcgcccctcgccgtctccgggcgaccgggcctgcaggcgccggcgcctcgccgcggcgccgcccggagcggcggggcgtgggccggctcccctcagcggcactttggcacggcacttccgcagggcccaggtcccagcgacagccgacaggctcacaggcaacaccccttcaggcctcaggagctgtctcaagcctacagccgttccgcctcgctcttgtatctgacggtctgaccctaccctatctctgaggaggtcgaatctggcctgcccttctctctctttctcctacgatcctttctctcagtccaacgaaaccctcggaggcacggttcggttcgacgacatgctgtctggcgtgaagctgggtccgc

SEQ ID NO: 109440 - DNA, 437 bp, Zea mays
  Clone ID: MRT4577_31305C.1
cgtccgaatcccggtcgcttctcatacatcacagacaatgaataccaagaagaatgttgttctttgctgccttcttttcgtgctcgttctgcatgcagatcacgctctagccaagtgtggctatacaactcctttaattccattctgcaaagcgtggatgtgcaaggcggagtgttggacggaggctaagttaactggaggcaaagtcacgcaacagaagtgcatgagaggtgggatcaagggctggtgttactgcgaattctgcatttaattttgcaaaggagaaggatcaccatttctttgcttggtcttgccttggtcaataacttagtgtaataatgctagttaagtctctaggcagactaggctagatcgagttgtttgttgctggtagctaggcattgctagcgtctgctattgttttaagatattttatt

SEQ ID NO: 109441 - DNA, 342 bp, Zea mays
  Clone ID: MRT4577_31306C.1
taagcttgcatcctctagaccgcccgccctttttttttttttttttttttttttttttttttttttttctttccgtttgttttttaaatataatttcttcttttacacctaatactttataacacttcaaagaaaaaaacccctttctctttacaaccccaatttatataccttacaaaaactacacctttcatataccctaaaccatacacaggacatacgaaacataataacttaatctacaaacacaaaaatacttttacccccccaaacacaaaaaaaaacactatttctcacaacatactcacccacagcacaaaatataaagccttgcttacaaaa

SEQ ID NO: 109442 - DNA, 673 bp, Zea mays
  Clone ID: MRT4577_31307C.1
gtggtctttttttttttttttttttaataatatgactccttgtttcaaaaagaaaaaaaaataatgaatccaatcacagagcatggccttgcatgtccctgcaccacaactatacatctttgatctttcttttggcctagacacctagcttgctccagacctcgaaagaaaaagagtaaataatgatcccctccatccgtgaagaagaggcaaaactactgctctacgcgccctgatcttgcaacctgttgtggtgactggtgagcttcagtttgcagagagaaaaaaaaaaaggcctgttatcgccatgcagccggctagctgctgctactactaattgcagcagtgcgaggagccattggatcccgactgcttcttgtcgccgaacatgtccaccaccatctcgatccccgctcccgccttgagcggcctcgcagccgctgagatggtgagcacgttgatgatttggatcaagaagacgagcagcagcagcaccttcgccatccccaccgtggccgccattattatatatactaatgcgttggatgtgttgcttgcagacagcgccggtgtctccccgtgccagctccgggccgccggccggggctggcgatgccttggacgtgcgtgtcgctcgttcaggttcttgtcggagcacttggccttggctgtg

SEQ ID NO: 109443 - DNA, 523 bp, Zea mays
  unsure (1)..(523): unsure at all n locations
  Clone ID: MRT4577_31308C.1
caaaaaaaaaaaaaaaagaatcaccatttttttgatccgccgcgcgcgggccgatcgacgagcgagcctcattcacactccgatctagctagctagctagcttaggaaagagaaatctgaccacagggatgcggtggcggctgcagccggcgccggcgccggcgctgctcctcgtcctggccaccatcgccgccgtcgtggggggggggggggggccccatttttttttctacnncnncnnnnannacncccacnnnnacaacccaaacaacaannacacccccccccccccccccncccaanaacccnaacacacnttaaagaacaagaccntnnncaacaaaaaaaaacaaacgaacanaanaaggggggggggggtgcttcagattcgcggctggttgggcgggggggctcagatttctgggcctacggtaaggcgcggtcgggcggtcaaccgggagccttcctggccggaatcaaagaagggggaacctcaaggaagcctgcccgcaagcccggggcc

SEQ ID NO: 109444 - DNA, 195 bp, Zea mays
  Clone ID: MRT4577_31309C.1
cggactcgtgggtaaaaatcagctgctgcttactccaaatggcgttctgtatgggcaaccggagataagaaaaggtgtacttcctcgtcttctagaggagatattgtcaacaagaattatcgtgaaacacgcaatgacaaagttgagtccatcacagcacgttcttcacacgatattcaatgcacggcagcttgc

SEQ ID NO: 109445 - DNA, 241 bp, Zea mays
  Clone ID: MRT4577_3130C.1
acaagctttttttttttttttttttttttttttttttttgcattaaaaccaaaacttttttatgaccatgcttatattattggccataccacacatgataaggaatgtcgtcttactgcctttttacatatatatatttatagaggcggatagaggacacaccccaaattttgtggattgaccaatagtctgtacgtgggcgtatacacctcatgggtttagtgccgttgctgggcagctg

SEQ ID NO: 109446 - DNA, 354 bp, Zea mays
  unsure (1)..(354): unsure at all n locations
  Clone ID: MRT4577_31310C.1
gagcaaatcctattgattagttgcaacacatgaccgcgtcataaaaagctacgatctgaccgtggtagctgtctatcctcacactagacggacaataacaagagtccggggtgtggaacagcaatgcacatgcctcttattacagtagggggaggttagagcccgcttactagatgaaaaaacactcncttccattgggtggcattttatgtatactaaaacagtcacagacgactctccctgtttctgtatgagctctatgtggcatgggacaaacttgaactattaccggttcaagaaggagcttctgcccctcctctaaagctgtacggactctgggatggacacgccagt

SEQ ID NO: 109447 - DNA, 487 bp, Zea mays
  Clone ID: MRT4577_31311C.1
aagaaaacccgacgaagaagatgcgtccagaacccgccccatgcgccatactgccagtccgcatgacggacaggacaacaccatcagatcaccacgccaagcgcaggcacgggcgccgcaccaagctcaccttctgagcgcgcggatcgtccggcaccagcatcggaattctagggtctcaacctttcctttgcctatatcgacgtctctagaggttctgtaagctaccaaacgggcccagaaaggttctggcaagaatatgatgacgctaagaggatgagaagctactatgcggtactcatgattacatggtgcatggcgatgctagatgaaacagccgctgctacctcactttatgtgaagagacagcagcgattgatgaccaaagaaacaagaaaagaaggggacctctagctgcggctactgttcccataactgaggccaaattgcgagcttggcggaaacgtgcgcatactagcttgctgag

SEQ ID NO: 109448 - DNA, 262 bp, Zea mays
  Clone ID: MRT4577_31312C.1
acaaaatgagggccgtccaaatcctaggagacgtttcgtcccctcaaaccgtaaccaccgactccataccggagcccaagcctcaaggatctgagatgctgatccaggccacgccgccggaatcacaggcgacgaagtccactggcccgagctctacaactcccctacacgcattccagggcacgagatatccggagtaatcgtcgccttcggaccagagtacgatggtccactgatgataggccaagaaatttttgccttc

SEQ ID NO: 109449 - DNA, 367 bp, Zea mays
  unsure (1)..(367): unsure at all n locations
  Clone ID: MRT4577_31313C.1
cccacgcgtnncgtaaggtgccctgtcttnnctaattctttgtgggtgcaacacgcagcggnacaagtttgtaggggtttgggtggaaatgttangggctctgggttgatttnaagaaagacctatggacttnnntgggaagaagaataaatggaatgggctttttccctataaantggcttattataaaggatgttccanatnggttgttggggcgggtggattnttgaaaacagtgacaactggcaggttncttttangtgggacacacaggtgattgggctgncgnagggtgtgcntgtgttgaaaattttgggggatgatgcttggggggcatggtttctgggtgattttggttttgttgaag

SEQ ID NO: 109450 - DNA, 533 bp, Zea mays
  Clone ID: MRT4577_31314C.1
attcggctcgagaccaaagtgacttccagtgtaatgtaggtagggcgtgggtgctcggttgcataggcgcacctgagctatacttttttttgaagaagaaaatgatcttgtaatacagaacagcctaaggccctgttcgtttacatcggattgcacccggaattattccggctaatcaaaaaaaaaaaaaaaaaaaaaaaaaaaaaaaaaaaaaaaaaaaaaaaaaaaaaaaaaaaaaaaaaaaaaaaaaaaaaaaaaaaaaaaaaaaaaaaaaaaaaaaaaaaaaaaaaaaaaggggggggcccccccatagggatcttttttccccggaaataaattcgcgccccggcctttgaggggtcccatttttcctttaaggggggcctttaaaaggtgggggaaataagggccaaaagttttccttggggaaaattgttttcctttaaaaattccaaaaaaaaaacaacccgaaacaaaaaagttaaaaccctgggggccctaaggggggacctacctaaaataatttggtttgg

SEQ ID NO: 109451 - DNA, 264 bp, Zea mays
  Clone ID: MRT4577_31315C.1
ctctcaccagcgtatgggggaagaattgaagctataggagcttgtgagcattgtgggaagatggttgcggtatcagcgcttccagaatgaccaacgagcatcagctagtatagcttcatttatcagccgatccatctccgagcacaggtcaccaccgtgcagcctagccaccgtctaacaccgagtcttctctgttcttctgcggcgaacaaagtcaatccatagccgtgttgctggtgctgattttttttttccaacaagatt

SEQ ID NO: 109452 - DNA, 279 bp, Zea mays
  Clone ID: MRT4577_31316C.1
tcggtatgtcctttgtttgtcctgtttggtccgcgcaagataaccaattaccttctccgcacataacactatgacagattagcaaaattacgacgcgttcaaaaaatttactgcactgtaagatcttgctattgcgctcttaaaatagtttcttgacaacatgataagatgtctgctggatagctacaacaagtccaaagcctgctatttctgcagatcccatacaaggaatatacctgtgatccaacacacgattcgcagctgtctaaaatgaaaatc

SEQ ID NO: 109453 - DNA, 241 bp, Zea mays
  Clone ID: MRT4577_31317C.1
ggggaaacaagcttttcagccaaaattttttagccatggctccaaaatattttggattccccccagtaaaaattcaccaaaacacttgtaaaacaaagaacattccattttacagcccttattatgtgaagaaataaaggctaataatccctcctgggtgttactactacatgctttggggggggggtattcttacttacctgtttaaataaggggaggggttaaacccaatcaaatgggg

SEQ ID NO: 109454 - DNA, 1760 bp, Zea mays
  Clone ID: MRT4577_31318C.1
cggacgcgtgggctgagggagctcgaggcgctcaccaatgagatcgatgaggagtcacagatcgtcggcgaggtcctccgcatcaaggaactcctcctgcacaagggaagaccattcggatgccactttgttcgattcactgaggaggctgcagttgatgcaattgtccgtctctacgctaaaggctactgagattggaagagctgttaatcggctgcggaaacacaactcacgaaagattcggcacctcgtgtgcactctcattgaaggttggaaagttttggttgatgaatgggtcagtaccacaaatgctgccctgacagagaactcccctggctcttcaaatccttctgttgtggatgaagaagaggaagggcttccatctccacctttggacgaaggggccttctttgccacccaaaccacttctattcaactctctgagttctttgacgaaatggatgaagatggaaatttgagacatagtaatgacccgagccttggaaacaagaggggtaacaatggtgggagacttgcaagccattcaacggttgcaaggcaagatccacctcgctcttatcctggagtcgtcgaaagagttcaacccaggaggctagaactggcaaggcaagagccaccaatgaggcaagcgaacccacaaaccctccaaagttcaagtttgcaagccaaacctcacggtgcgctcaacaagcagtctaataatccctcaagttatgaatctggaccggggagaccagtaaaggcagctcaacagagaccatttggtgacatgaaacctaaacaaactcgagagcatgttgctatcgagagaaagcctatggcaagccagacagataaatcaaggcccggcgctcgaccttcggcaggagccaagctagagttggcaaagccaaaggtttacgatgatggtctggataacaacaggaagctggaagcagcgaagcggaggctccaggagcggtaccaggaagcggagaatgcgaaaaggcaacgcacgattcaggtaatggagctgggtgacataccgaagcccaagaatcaaaacagacaaccggtggtgaagtccaggaatagccttaggaattgggcgaacgggcggcgctaactcctctgtgaccttttttttttttgtttacctcacctgatgaattgttgccatgcctggccttgtcggatcatgcgtttattatgctcaacgaggagcagatgaacaatcttttttttctttttgcacagaaccttcaatggagggttcttttgaagtggcaagagttgcacttgatgccatgagtggagacgagagtttagccatgtctggataatggacatgtagctggatttgtatcggctggttctttccttctttctttcttcttgttcttcttcttcaaaggaagctgctgtagataccagatagaataatcagcaatgtttggtacaggtacagccacctctttttctttttcttttttttttttttaccgtcagtcactttgatcgcggaaccattgacaaaaatgcaacaaactttggtaaagtctcttgttctcttgcaactgcggcctggacggtcttggcgcttgacgcacttgctgttcacacatgcaatgtttgcaagcatgccgtcagtcagcctttgcagctgccgtcttttgttttgttgcattgctgtgacgcacctgcacatgtatgatgaatcgatggtgggcaggagtcaccgagtcagacgcctgtaactg

SEQ ID NO: 109455 - DNA, 126 bp, Zea mays
  unsure (1)..(126): unsure at all n locations
  Clone ID: MRT4577_31319C.1
gttgtaaacttcatagctttgttccatctcttgagcctcggncgtgtactgtgtataattccaacatgtgttgtgtgttgtgaccaagnaatcattcagagcctacctgagggcaacccatactgc

SEQ ID NO: 109456 - DNA, 278 bp, Zea mays
  unsure (1)..(278): unsure at all n locations
  Clone ID: MRT4577_3131C.1
cggacgctggttctgctgcgtctccttgcccgcnncgccgctcgcngtttnnccctcgtctccacaccgcgcgctgatgtccatccttgtgcagcaaanatgacggctggctanattgttggctcactggtcggatcctttgccattgcatacctgngtgacacatttatcnctgacaagaaggcatttggangtagcacccccaagacngtttcngagaaggagtggtggcaagccacagncaccaagttccaggcctggcntcgcactgctgggcc

SEQ ID NO: 109457 - DNA, 455 bp, Zea mays
  Clone ID: MRT4577_31320C.1
ctgcgtgtattaaatacttgtctattaaatactatagtatcaacgattgttattttccttttataccctttttttagttgacgggttgaagcaaaaagggaacttttaatatttttttctattttctttgatatctatatgtacatgcccttatgtatctgtcaaaaaaggggaaaatttcttatttatatttaattcaatatttaaataaaattataggaaactgtaaatgagagtttctttctcacatacaccttcgatcacattacattgtcatctcggatgcatcaatatggaaatatttaattgatatctgaagccatgattatgattcgatttttgtttatttttaatacaaattgattcttaatacaaagagaatgtaggatcttgttatgttctcgaatcaaaaaaaatattgaaacgcccttttagttattactttgcaaaaatac

SEQ ID NO: 109458 - DNA, 233 bp, Zea mays
  Clone ID: MRT4577_31321C.1
gtgcaatagtaagtcctcatcacataagacatgaacaagcgccacaacaaagatactttacaaagacgctacatatgattagttatggtattgcacgtatggagcaaagacgtatacaaaacacttgacaaaagacctaacgctgtaagtgagtagcaaactccttcacaaaagaactccagaatattatgtatccccaggtttgaagggacaagagtgtaagggatgcgatg

SEQ ID NO: 109459 - DNA, 243 bp, Zea mays
  Clone ID: MRT4577_31322C.1
atcataaacagggagtcttcgtgttaactttcattctcggcatgcatgcatacacttcaattcgaagtgtctacacatatggatgctaagataatatacttcaccgtaccaaaacccaagcgagaggggactaaacagagaattgacaatgtgcattgcacgctgatgggtggttgaactgcgctgccaccgtgatacacacttatctagctcacatggacatatatatatgacgaaccactg

SEQ ID NO: 109460 - DNA, 288 bp, Zea mays
  Clone ID: MRT4577_31323C.1
cggacgcgtgggaaaaaaaaaaaataaaattaaaaaaaaaaaaaaaaaaaaaaatggaaagagtaaaaaaagaaaaaaaagaaaaaaaaaaaaaaaaataaatatattatattaaaatataaataaaattaagtttgttcattttacaatgatcaatctttacactcccatgtttccaaaactaaagctttcttaaaatgtcaccaaaataaaatacactgaactccatttaaaaaattatctattggaaaaacctcagatttaccaatattaataactttgaataat

SEQ ID NO: 109461 - DNA, 306 bp, Zea mays
  Clone ID: MRT4577_31324C.1
atgcctcgtctcattgatggagactctccgccattcctccgacgtgccatggcattagccaagatggtatttggtggtgacgtgccttatcatggttggcgtgggtcaatagtgccaacctcattttcacgtcaggcaggaacaccctcaaaatatccaaaacatgttgaagaacaaatggcaaaaaatcaagttaaggctgcagttcaaagaaagactggaccgagttaccagagaagaactacagaggcacttcggactggtgcaccggaccaaggctccatgtgcaccagaccaagttactag

SEQ ID NO: 109462 - DNA, 864 bp, Zea mays
  Clone ID: MRT4577_31325C.1
tcgagaaatgctttacttcagccaagtccagagcattgtgccggagtatcaagagctaccacctgccattccagactgcttcaccccaaattttgttgatcatctgcatcgtagtttcaatggtcctcaattgtcggcaattcattgggctgcaacacatacagctgctggcacaagcaatggtgttgtaaagaaacaagaaccatggcctttcacgttggtacaaggtcctcctgggacagggaaaactcatactgtgtgggggatgctaaatgttatccatcttgttcagtatcaacattactatgctgctttgcttaagaagcttgctcctgaaagttacaagcaagttagtggtagcactagtaccagctcatagactgttgcagcaggggcaattgatgaactattgcagagcatggaccagaatctatttcgcactcttcccaagctttgccctaagcctcggatgcttgtatgtgccccatcaaatgctgcaacagatgagcttcttgctcgtgttcttgaccgtggttttatagatggtgaaatgaaggtataccgccctgatgttgcccgtgttggagttgattcacagtctcgagctgcacaggctgtttcagttgaaagaaggacagatcagcttttaatgaagggccatgaagaagtaattgggtggctacatcagctaaaagcccgtgagcagcagctatcacaggagatttcctatcttgaaagggaactcaatatagttgcagcggctggtagatcccatggatcagtaggggtagatcctgatggtcttgctcaaaaggatcggaaccgtgatattctgcttcagaaacttgctgcgtcagttgaaag

SEQ ID NO: 109463 - DNA, 1967 bp, Zea mays
  unsure (1)..(1967): unsure at all n locations
  Clone ID: MRT4577_31326C.1
tttgggtccctcgggccggccggtctgataaccatagacaggtgttcttgcacagagaaggtcaaatcttggtggaagtcagtttgctgctacaaagcaggctgcaaagaaggctgctgctatgccaatgcgcagcggggctgtctattggaagaagcctagtgcaagtaccttagtgcagaggaggtcagtaggtgatgcttttcaaaataccaaggaccatgggggtgaacactgaaggacttggaggaggccccaatctccttcatggtgtccttggctgcagtgcctagaaacattctctgagaagggctgtaagttaggttgcacatgtgagggacctccaggttaggttgttttcaaaagatcatattttggtgagcatgaatagtgcaaccgcgtcagctcttagaagcgatatgcaaccaaagaaaggccgagaagctcaagtgaagcgattcagtgcaggggaacaggggaagcagacagataactcaagctgtttagtgcagacaggcagctcaagcaggagtcggaattggatgatgaatcggattagggagggagagatcaaaggaggggaagagatagggaggcgggggccggggagggagatgagagggtggtcaggaggattacctggtggtggtggtggccggtggcaattcgtgagggttggcggcgcgcaaccgctgacggtggcagcggcgcgtctagggttgctgtgctcgtgtgcgggagcgggagtcaccaagtatagcgaaggccatacagccctccggctcgggaactccaccccatacatcctgccgacgccatcagccggcgggacgcacacacgaggtcgaccttcgaaccctagtccttggccgagccgccttgcgggatcgtccccgccgcgcggcagctctgcctcgacccttttagtctccgtccgacaccgcttggatcagagatggaatcaccacccctcacagctgaagcaattgcttttgccgagaaaaagatggacatgactttggaggatataatcaagatgtcaaagaaaaagaatcctggaggcaagaacccccctaggcagccgatcaaaaagcgtccattccagaatgccaacactaataaagggaatggcaaggttcaacggtttatggaatctagatcaaccattagacaaggtgttcttgcacagagaaggtcaaatcttggtggaagtcagtttgctgctacaaagcaggctgcaaagaaggctgctgctatgccaatgcgcagcggggctgtctattggaagaagcctagtgcaagtaccttagtgcagaggaggtcagtaggtgatgcttttcaaaataccaaggtcaaggagtcgcagaaccatgcagcaccaaggacgatggatgcactctttgcacggatgaaggcgcaacgcatgaggaccgcaccacagcagcaggcaaatcctgcctctggacgtgatttcaaccagcagcgacgtgttcagcagcagcagaggcgaggtagagcatatggtggccgtgttgtcggcaaccaatgagcatatttggtgcatcgaagccccttctcttcactggtcttaaggaccttgagggctagtttgggaactctatgtttctctattttctcaagtgaaaatgagctaatttttcttgggaaaatgaggttttcaaactagccttgaatgaaagcaccccgggggaaaatctaacttgactttctttgttggatgaaaggatgtggacagaatatgaagcgaattttgtgtgactctagttgtctgcttctgttcagcatgtacactgacctacggaaattacttgctagattttgatgtcatgtttattgagttgatttgcttcctctcttcccgtggggttcgtctcttcacagaactaggagtattcgccttttacatatgtataaaattttaaatacctttaagaaaaaaaanaaaa

SEQ ID NO: 109464 - DNA, 442 bp, Zea mays
  Clone ID: MRT4577_31327C.1
ctgaggtgtgcgaaagaaagctggatgagtaccttctcactcgcagctacatcactggctaccaagcttccaaggctgacttggctgtgctacactgcgttcatcgtctgctcccatcgcccaaggatatcaactcagcaaggtggttgaatcacattgatgcgctctataggctgcacggaattactgcaaagggccaaggtgtgtaggttgaatcacatgcagctccttcagacccatctccatatcttgctgaacctcacgccctaattgctcacgaggacgacgacgatgacgttgacctttgtgatgaggagaccgaatatgagaagaacgctgctgaagagcgtgctagaactgccaaggctcttggcaagaagaaagaatctgggaagtcatcagtcttacttgatgcgaagccatgggaccatgagactgacat

SEQ ID NO: 109465 - DNA, 730 bp, Zea mays
  Clone ID: MRT4577_31328C.1
ttgggtccctcgaggccggccgggccgggatttcccaatctgttccgagccagccggccatggcgattagggctggccgctcgccccttctccacctcctcgccctcgccttcctcatcctcgccgcctctccctgcctccaagctcgagtggaccatcgcaaacagaaattagggagagttgctgtaaggaagaaaatggaagtagtgcagcaggatgatgaagcgttagttaaacttgagaatgcaggtatcgaacgttcaaaagctgttgactctgctgtgctgggaaaatacagcatctggagacgtgaaaatgaaaatgaaaaggcagattcaagggtctgtttgatgcgagatcaaatgatcatggccagaatatattctgttcttgccaaatcgagggacaagcttgatctctatcaggagctgcttgcaaggctcaaggaaagccagcgatcccttggggaagctactgctgatgctgaacttcccaagagtgcttcggatagaaccaaagcaatgggccaagttttatcaaaagcaagggatctattgtacgattgcaaggaaattacccagcgtttgagagcaatgcttcagtcagcagatgagcaggtccggagcttgaagagcagagcaccttccttagccagctagcagctaagacaatccccaatggcatccatttgtcttccatgcgcttaaacgatgattttatatctctctct

SEQ ID NO: 109466 - DNA, 573 bp, Zea mays
  unsure (1)..(573): unsure at all n locations
  Clone ID: MRT4577_31329C.1
cttttttttttttttttttttaaaaatattttttttaaaaccaccgagcatatatatatatcatatatactgcatgtaatagaccaaaaacaagctattgatgttaacatgtcccaaaaaggggcaatcttttataaacatctccaacaaaaatatttttttttggggggggggctactactacacccnaacaacacaataagttnaacaaaaacaataccatacaaccctaaaataaataaccttncatattattattatacttaacccattaatacaaaaacatatccataaaataaaaatttcataaattaccaaataaaaataaaaataaattcataaaacaaccttaataataaaaacaaacaataatattttatcttaatattttattcaaaataaataacaaaaactaaaaaacataaataatatttaataaaaaaaaaaaaaataaaaaaaaaaaaataaaaacaaaaaaaaataataaaacaaaaaaaaaaataaacaactaataaaacaaaaaaaaacaaaaataaaaaattaaaaacatcaacaaccaaaaacaacaaccat

SEQ ID NO: 109467 - DNA, 284 bp, Zea mays
  Clone ID: MRT4577_3132C.1
gttgactgtccaaggcgtcttggacctgattgccatggacatgatgcaatggttacagatacacctgcacactgtccaacaacattagcagacgagacatgcatacacacttacaaattccataactcaggccgggagcattctttttgccactaaaacaccggatagggaaaccccgatcagatacgactaatgagatgccatccgcactagaggagcatgagggatgtcatatgcagcaggtcacatagagacccctaagtcattaggaggccctagaacac

SEQ ID NO: 109468 - DNA, 700 bp, Zea mays
  Clone ID: MRT4577_31330C.1
gtactggccgccccactcgccctcggccccaggaccctcctcttcctcgccagcaagccggcacgatccctcccttccgggaaaaaggctcccaacctgttccgagccagccggccatggcgattagggctggccgctcgccccttctccacctcctcgccctcgccttcctcatcctcgccttcctcatcctcgccgcctctccctgcctccaagctcgagtggaccatcacaaacagaatgtctcatcgggtcgaaaggatggccctcatctcctgggtagatcaaaggaaataacacacatgaaattaaggagagttgctgtaaggaagaaaatggaagtagtgcagcaggatgatgaagcgttagttaaacttgagaatgcaggtatcgaacgttcaaaagctgttgactctgctgtgctgggaaaatacagcatctggagacgtgaaaatgaaaatgaaaaggcagattcaagggtccgtttgatgcgagatcaaatgatcatggccagaatatattctgttcttgccaaatcgagggacaagcttgatctctatcaggagctgcttgcaaggctcaaggaaagccagcgatcccttggggaagctactgctgatgctgaacttcccaagagtgcttcggatagaacccaaagcatgggccaagttttatcaaaagcaagggatctattgtacga

SEQ ID NO: 109469 - DNA, 177 bp, Zea mays
  Clone ID: MRT4577_31331C.1
cttttccgctccagacacagagcccctcttgtaccagaaaccgtgctgctatcccccgctaccgctacccgccgcgctgctgcggctcgcctccctcctccacagtcaccacgaacccgccgccgtcgacgcaatatcctctcgctatctccttttaccatgagcctacgcttgagc

SEQ ID NO: 109470 - DNA, 907 bp, Zea mays
  unsure (1)..(907): unsure at all n locations
  Clone ID: MRT4577_31332C.1
ccggccgggactgatgggggtcgtcagtcacagaagggcggagcagtgccagtgtactggccgccaccactcgccactcgtccccctccccccgaaagccggcacgagccctcccttcccttcctccaacctgttccgatccgccccgagccggctggccatggcgatcagggctggccgctcggccctccacctccacgctctcgctttcctcatcctcgccgcctccccctgcctccaagtccaagctctagtggaccatcgcaaacaggtatctgactggggtaggcaacccaactttgaactgcagaatatgtcctcgagtcaaagggatggctctcatctcttgggcagatcaaaggaaataacacacaggaaactaagggggagaattggtgtaaggaacaaaatggaagtagtgcagcaggatgatgaagcattagttaaacttgagaacacaggtattgaacgctcaaaagctgttgattctgcagtgctgggaaaatatagcatctggagacgtgaaaatgaaaatgagaaggcagattcaagggttcgtctgatgcgagatcaaatgatcatggccagaatatattctgttcttgccaaatctagggacaaacttgatctctatcaggagctgctagcaagactcaaggaaagccagcgctcccttggggaagctactgctgatgccgaacttccgaagagtgcttcagatagaatcaaagcaatgggccaagttttatcaaaagcaagggatctgttgtatgattgcaaggaaattacccagcgtttgagagcaatgcttcagtcagcagatgagcaggtccggagcttgaagaagcagagcaccttccttagncagcttgcagctaagacaatcccaaatggcatccattgtctt

SEQ ID NO: 109471 - DNA, 795 bp, Zea mays
  unsure (1)..(795): unsure at all n locations
  Clone ID: MRT4577_31333C.1
aattcggcacgagggccaaccagaccacatccccaagcctccccttgctcgagctccctcctaccctctcctcgccggccgagaatccccacctctgcgccgatcatctaccaacgcggcgccggcgccggcgccaccgacgccgacgccgacgccgacgacggagattcaaatgtccgctgccgcatcctccttgctgcgcccggcgccgaagtggggcggcgcgccgtcgcaccgccggctcgtggaggagcacctggcctcgctcccgcacggcctcccacgcctccgccacgtgcaggagctccacgcgcagctcctcaagcaggggctccaccgggacccgcataccgcgtccaagctcatcgcttcctacgcgctcctccgccgggtccccgcctgccgctgcgtcttctctgccgccgtggcgctcccgaacagcccgttcccctccagcactaccttgctcaccaagacactcctccgcgcctacgcgctcaactcccttccccacgccgcgctcgccgtgttcttggacgtgccgttgcgccagcggggcacattcacctactccttcctcatcaaggcgctcgccgctgcgggcctcacgccagtccgcggggcgcatgcgcacgtcgtcaagctcgggtccgccgaggacaccttcgttggaaatgcgctgatcgacgcctactccaagaaccaggnggctatctgacgcgaagaaggtgttcgacgaaatgacgacacgagacgttgtgtcctggaacacggncatggccgcaatggtgcggc

SEQ ID NO: 109472 - DNA, 325 bp, Zea mays
  Clone ID: MRT4577_31334C.1
cccacgcgtccgtctatatcctgtttcttcaagtgttcgtgctcgtgctgtacgtgcgtacccgcgggctcagtcgaccggtggacggtggtagactgtatgcacggctcaaacttggtgtatgtgtgaaaaattacccgccactgttgttggttacattgaaatagttcgttcaaaaaaaaaaaaaaaaaaaaaaaaaaaaaaaaaaaaaaaaaaaaaaaaaaaaaaaaaaaaaaaaaaataataaaaaaattaaaaaaaaaaaagggggggttgtattgggggatctaagtttaattccgcggtcaggcgaactaaaaatctt

SEQ ID NO: 109473 - DNA, 140 bp, Zea mays
  unsure (1)..(140): unsure at all n locations
  Clone ID: MRT4577_31335C.1
gggaacctcgaaggccggccggggagttgcctgcagaagactaggagaacgcccagccaagctctgcccccgacgctaccagcccaacgccctgttccacgtctgccccgccgccgaggacgaggcggncaactcgggcg

SEQ ID NO: 109474 - DNA, 223 bp, Zea mays
  Clone ID: MRT4577_31336C.1
cccttccaaccaccgagcgatctgccgcaaatcctctacatgctttcccagcggaaaaagagagagacactccacacattatcctgctggtatactataccggcaccgcaacagcccacccgccgtcgccgccggtgcaagttcggatttaaaacttgcatgcccgcgtcgtcgagatagtccatgtcaagacttgcctgtgatcagaattacttcctatttc

SEQ ID NO: 109475 - DNA, 247 bp, Zea mays
  unsure (1)..(247): unsure at all n locations
  Clone ID: MRT4577_31338C.1
ccattagttttatttactccagagcgcaaaaaaacccgatcgacaccatgaggggtgttgtttcgttgccccttgctctcctggcttttgctgcgagcgccaccttcacgcatacaagcggcggctgcggctgccaccaccgncgcggtattaccgcgcgggattgcactcggtactgcatcggattcaccgggcctgcgcgcgtcactgacgcgtatgcgcgcgttattgcggaatcatctatacg

SEQ ID NO: 109476 - DNA, 741 bp, Zea mays
  Clone ID: MRT4577_31339C.1
accataccttcttcctcggctttctcttcccttcctcgcagccacgcattcagtcaatgcccttcttccccacctctccccaacaccagcgatggatccagcccctttccccgccccacccccatgcagcctctctccacatcctcaccttacctttgctcattcccatgacggtatcaggctctgcgctgctagagccccccctgctctaaggtctagcatggggacatggatgggaagagggcgtggaggggatggtctgtgctacagagctgcgctcccttccacatcgcagctaggcgcgcccccatcgacactcgtgctgaggtgttcctggctctccatcgtcaaacacaaaggcggtggggaaattacacgggataagctgctcgtgaaggacggcatcgaccacatgctcatcttgcacgacttcttcttcgacctttctctctgtaccaatgtcgtacaatgcgaagacgaggaattgaggaacatgaccttaagggcctttcgatgatatacagaacgaatgcgaggaattgaagaagtgagaaagatgaccttcagtggtctttcgatgacatacaatgctaagacgtggaattgggaaattgaggaacctgaatttcagtggttgttcgacaacatacaaggcgaaggcgaggaattgcggaagatgaccttcagtggtattggcggcgatattacgggaagacatggatattcctagccctttctcat

SEQ ID NO: 109477 - DNA, 366 bp, Zea mays
  Clone ID: MRT4577_3133C.1
gcaaactgcaaaacttcaaaaatgaaacggccggacaaaggaaaaggagaccccctttacctgacaaaaaaggaggcaataaaagcttaaccaaccactccctttccattacacgggtgttcggttttcgacaatcatgatctgaaaaacccctcctgtggaagcacttacagggaagaaacacaactttttttggatgctcacatcactattggcatgctttcatgagtgcgaccatttacttggtgctgcctatgtgggggatcacgtcgaccagctgggcgctagctccccacttgtcgcccttccaggacacaagcctgacaaagctaactgttgaaggcaatgccagcctttccataaaag

SEQ ID NO: 109478 - DNA, 1195 bp, Zea mays
  Clone ID: MRT4577_31340C.1
taacttggtcctggagcattggagaaggagcataccacaaggaaaccaacacggtcagtcaaaaccaaatctagataatcatcatgctacttctatgttttatgtctgtttttgtctgctatgaagtgttcatgcaagtgttatcaagtgttcatccatgccaagatggttactaagcgaacacacgcagcatgagtggtctccatctgatcttgcttcattttgatttattatctctgaggagtgtgtgagttttaatggctttgacggagaaggctattaattggccccttttttggagtgactgtagcaaccacttctaattcattttctaccgcgacaactggcgttgcaagggttatgttgtgtaccttgtccgtgtgaggcgtggtggtaggaagaggcctttgcccaagtgtattatctatggctagcccaagcaccagggtatcacccaactcaagttctagaggtacaagaggtctctcgctgaggagagagctagacgcaagcttggtggactgagggttcttaactcctactgggtgaacgaggtggagctgctatttatggagaggagcgttgatagccattgtcctgggatggtagtccgcatggctgaacgagcactctgccatcaataaactcattagcaaggtggtttggagagcctgtaagggctgctattctgcaaaccgaggcttttcttacaaatgcaaaaggatatccttgtttatcaaagcgccatcagagtctgctaactggattttttaaacattctgttcaggtgataatatatggaagatcaaatcacaatgttttcccagtatctgaatgagtgctctcaggtgatgagagctacgcagaagcctctaatggacaatttggaagctcaaacttatgagacatttgagaaggatgttgtgaagtacactcaggttactgctatatgacgtgaatatgccttttgttttatatattataccttgtgaagtagcttcttttttttcacatttatttgaataatatgaatgtaaaatttaaaatctgaattgaacttcttaactatttccaccatgatttcgatcgaatcacaatgtttttccagcatctgaaggagtgctctcaggagatgagggcaacgctgaagattcctctgtactccaggtacggagctaatgcatgtcgaacagag

SEQ ID NO: 109479 - DNA, 2631 bp, Zea mays
  Clone ID: MRT4577_31341C.1
gcggcgaggcatgcatggcggcgtcgacggctaaactctagcgaggcctctcggggtcacggtgttggagcctgtcgagcgcgcgtgtcgcagatgtgcattgcagatgttcgttcaccagcgaacctgcagctgccgaatctacagagaccataggtgagcaacgacgtagggaaatagggctggcgggggcacgtgggtaacttggtcctggagcattggagaaggagcataccacaaggaaaccaacacggtcagtcaaaaccaaatccagataatcatcatgctacttctatgttttatgtctgtttttgtctgctatgaagtgttcatgcaagtgttatcaagtgttcatccatgccaagatggttactaagcgaacacacgcaacatgagtggtctccatctgatcttgcttcattttgatttattatctctgaggagtgtgtgagttttaatggctttgacggagaaggctattaattggccccttttttggagtgactgtagcaaccacttctaattcattttctaccgcgacaactggcgttgcaaggaatttatttcactagtatgaacagatggccatgccatcgttcgccataacctcacctccgtcgcatggcactaccttatgggcgcctcatgcttgtcgtcctcaaagactgcacaagagacacgtgcgcagccaagtccgggcagtggcacaagcacagctgcagtaccagaagctaggggactcagacctcctcatcagtgaggtcactcttggaacgatgacttttggcgagcaaaacacggagaaggaagcacatgacattatcgcttattctttcgatcaagtacccagttccaatgaacaaggaaactcaagggagaactgatctttatattggcaggtggatgcaatcaaaaccacgagacaaggtggagctgctatttatggagaggagcgttgatagccattgtcctgggatggtagtccgcatggctgaacgagcactctgccatcaataaactcattagcaaggtggtttggagagcctgtaagggctgctattctgcaaaccgaggcttttcttacaaatgcaaaaggatatccttgtttatcaaagcgccatcagagtctgctaactggattttttaaacattctgttcaggtgataatatatggaagatcaaatcacaatgttttcccagtatctgaatgagtgctctcaggtgatgagagctacgcagaagattcccgtgttcgacatgcattaactccttaccttgaatacattgcgtacctatatcagaagatggatccgcttcctgagcaggaacgcattgagattaattacagggactttttgcagtctcctctgcagcctctaatggacaatttggaagctcaaacttatgagacatttgagaaggatgttgtgaagtacactcaggacagccggagaattttcaaagtaaaatgttcggtgaacaggatgcagaaaaagttaaaagctgcaacgataaggcaaaaaaaatgttcccaaaggtgccctcaaagatcagcttcaacatagttctgagccaattactgaaaacaatgatgatatcacgcaattgttgtttgccgtcattgtaggttcttcctttccatgcttgaagattctaatccagacaggtgcaaacccaaatatgagagctggtggagcaaccccattacatgttgccgtagggagcgcaagtattgaagtaatcagactcctactagaagctggagctgaccctaacacctgcagtgatgatggactaaagccaatacaggttgctgctttgagaaataaccgtgaagttgtggaacttcttttagcattaactatcccatttctaagtgtgtcaaattagagttttgatggaatcacagaatacatgttgtctaaagctgctgtgggagagtcacaagtaaatgaagttacatctctaaattcagccagtttagccggaccacaatctgctggggtgtcatatagcgcaaaaaagagattcgatggaagctaatttgagaggtcatgatgcctataaaaatgaaaattacattggagcggtggatgcttacacacaggccattgacttggattctagcaatgccacactctggtcaaacagaagtctttgctggttgctgcttgggatggctgaaactgccttggaggatgcaaagcaatctcgaacattgagacaagattcagtgatagcttgctacagggaagggatgctgttgaggagggaatgaagtcgcaagccaaacctaaccagtcttccaccgcagccaggagtcttttcgacccaaatttgatgtgatgatgatgtgacaaatgattgagtgttttgcaccagaatccaaaacagttgcaacacaatttgttttttagggaaagtgctaaactgtaatttgataaattgtgatgttttgccacgtttgatgatataggtctggggcttcacgaccagtaggttaagcgcataggatagatgcactgtttggtgctggtttatcatatctactaatagcgaaatatctctgcaccatgagctctcgaacctggttccaaaggacgcgtgggtggatcttgagcttgatctccc

SEQ ID NO: 109480 - DNA, 2653 bp, Zea mays
  Clone ID: MRT4577_31342C.1
gcggcgaggcatgcatggcggcgacgacggctaaaccatagcgagacagctcggggtcacggtgttggaacctgtcgtgcgcgcgtgtcgcagatgtgcattgcagatgttcgttcaccagcgaacctgcagctgccgaatctacagagaccataggtgagcaacgacgtagggaaatagggctggcgggggcacgtgggtaacttggtcctggagcattggagaaggagcataccacaaggaaaccaacacggtcagtcaaaaccaaatctagataatcatcatgctacttctatgttttatgtctgtttttgtctgctatgaagtgttcatgcaagtgttatcaagtgttcatccatgccaagatggttactaagcgaacacacgcaacatgagtggtctccatctgatcttgcttcattttgatttattatctctgaggagtgtgtgagttttaatggctttgacggagaaggctattaattggccccttttttggagtgactgtagcaaccacttctaattcattttctaccgcgacaactggcgttgcaaggaatttatttcactagtatgcaacagatggccatgccatcgttcgccataacctcacctccgtcgcatggcactaccttatgggcgcctcatgcttgtcgtcctcaaagactgcacaagagacacgtgcgcagccaagtccgggcagtggcacaagcacagctgcagtaccagaagctaggggactcagacctcctcatcagtgaggtcactcttggaacgatgacttttggcgagcaaaacacggagaaggaagcacatgacattatcgcttattctttcgatcaagtgatcggatatacttctccattttcccttttggcctttagtacccagttccaatgaacaaggaaactcaagggagaactgatctttatattggcaggtggatgcaatcaaaaccacgagacaagggttatgttgtgtaccttgtctgtgtgaggcgtggtggtaggaagaggcctttgcccaagtgtattatctatggctagcccaagcaccagggtatcacccaactcaagttctagaggtacaagaggtctctcgctgatgagagagctagacgcaagcttggtggactgagggttcttaactcctactgggtgaacgaggtggagctgctatttatggagaggagcgttgatagccattgtcctgggatggtagtccgcatggctgaacgagcactctgccatcaataaactcattagcaaggtggtttggagagcctgtaagggctgctattctgcaaaccgaggcttttcttacaaatgcaaaaggatatccttgtttatcaaagcgccatcagagtctgctaactggattttttaaacattctgttcaggtgataatatatggaagatcaaatcacaatgttttcccagtatctgaatgagtgctctcaggtgatgagagctacgcagaagattcccgtgttcgacatgcattaactccttaccttgaatacattgcgtacctatatcagaagatggatccgcttcctgagcaggaacgcattgagattaattacagggactttttgcagtctcctctgcagcctctaatggacaatttggaagctcaaacttatgagacatttgagaaggatgttgtgaagtacactcagccggagaattttcaaagtaaaatgttcggtgaacaggatgcagaaaaagttaaaagctgcaacgataaggcaaaaaaaatgttcccaaaggtgccctcaaagatcagcttcaacatagttctgagccaattactgaaaacaatgatgatatcacgcaattgttgtttgccgtcattgtaggttcttcctttccatgcttgaagattctaatccagacaggtgcaaacccaaatatgagagctggtggagcaaccccattacatgttgccgtagggagcgcaagtattgaagtaatcagactcctactagaagctggagctgaccctaacacctgcagtgatgatggactaaagccaatacaggttgctgctttgagaaataaccgtgaagttgtggaacttcttttagcattaactatcccatttctaagtgtgtcaaattagagttttgatggaatcacagaatacatgttgtctaaagctgctgtgggagagtcacaagtaaatgaagttacatctctaaattcagccagtttagccggaccacaatctgctggggtgtcatatagcgcaaaaaagagattcgatggaagctaatttgagaggtcatgatgcctataaaaatgaaaattacattggagcggtggatgcttacacacaggccattgacttggattctagcaatgccacactctggtcaaacagaagtctttgctggttgctgcttgggatggctgaaactgccttggaggatgcaaagcaatctcgaacattgagacaagattcagtgatagcttgctacagggaagggatgctgttgaggagggaatgaagtcgcaagccaaacctaaccagtcttccaccgcagccaggagtcttttcgacccaaatttgatgtgatgatgatgtgacaaatgattgagtgttttgcaccagaatccaaaacagttgcaacacaatttgttttttaggg

SEQ ID NO: 109481 - DNA, 311 bp, Zea mays
  unsure (1)..(311): unsure at all n locations
  Clone ID: MRT4577_31343C.1
cacgcgttcgcactagtgagtaaacaccatccgtattgtcccgacccccaccgatcctggcctgcggcaaccatggcgacctccgcggctctctctaccgccgccaatcccacccagctctgccgttcccgcgcttcgcttgtcaagccggtgaaggggcttggcctgagcattgtcctcgagcgcgcccaacgcagcattttgtgccaggcggcgagcagcatcttctccgaccgcctcccctacatgtagaagcggaagctgatgaacctncttcttctcggcgccatctcttttcccaccgtcggcat

SEQ ID NO: 109482 - DNA, 373 bp, Zea mays
  Clone ID: MRT4577_31344C.1
ttattctcctagagatcctgatgacgatggttggtgttttattttcatggaaatcataaatatacctatattgcataatctgctacctaaggccttagtgcctatccttaacaaatgttttataatactcgtgaactatatgaggacccacagctggctgtaagacagttcaatgagcacctcattatccaaagtgtcacaatacagatggcttgatttctacagtcgaattatatctccagtcagcattcacatattaactacacaagcaaagggcatagacatattatgtgcctttactgagacaacttattacttacaagaccctccttattgtgtccttttcattgaatttttgcttcatctatcatgt

SEQ ID NO: 109483 - DNA, 363 bp, Zea mays
  unsure (1)..(363): unsure at all n locations
  Clone ID: MRT4577_31345C.1
tcttcttatttcttctctctctcctcctccgactaaggacttatccatccaagacaaagctccccatcccctactctcaaaatcaccacttcgaatcgaataccaacgcttctacattcaaaacctaccctcaacatacttccaccattcctaataacccctttatctacatcaaaaaccattcctcaatagttttaaataattttaccctcaatacttttaatcattaccatcccatattccactttttcttcatttacattttcaatggcaaaaagcttgaagatttntctccttcattacacaaattttacattccccattttaaccctactcaatattatcctgacttatattttttac

SEQ ID NO: 109484 - DNA, 351 bp, Zea mays
  Clone ID: MRT4577_31346C.1
agagaccaacctgaggcacagctgtaagcgtataatggacatggtgagcagccagcacccctggtttggaatggaacaggagtatactctcatgggaacagacggccaccctttcggctggccttctaatggcttccctggaccccaaggaccctattactgcggtgtgggagctgacaaggcttatggccgagatatcgtggaggctcactaccgggcctgcttgtatgctggaatcaagatcacagggacaaatgccgaggttatgcctgcccagtgggaattccagataggactctgcgaaaggatccgcatgggagatcatctctgggtagccgttttgacttgcat

SEQ ID NO: 109485 - DNA, 266 bp, Zea mays
  Clone ID: MRT4577_31347C.1
gtcaaatcctaaggctccagcggcagtgacagaatccaaagagggaacagaggcatcagcatcgaaggggctggagaagacagagaacatgatgcagctggtgcccgagcctctcagggccagaccagacagatgggggctgggcccacacaggcgtgcaccggtagagggcacaggaggccaagggcagctccaggccagggcagggggcagccaggaacctccacccaggcctctgtggcctctgtttccttctccctttcttg

SEQ ID NO: 109486 - DNA, 274 bp, Zea mays
  Clone ID: MRT4577_31348C.1
gtcttccttccgactcccacccaaaaaaactctcgaaggaggtttcgatcgcgaaaccgcggagtgttcgtcccgcaagtgcatggcatttagcttcctggccaatgaggtgtcgtacctgtgcatctgcaagctcgccgttaggtcgctttcttgttttgtcgtcattcggtgtctttttttacttcgcttctttttttttggtcttagtatgctttttaatgtttagttttttttgttgtatttttttcttttattttattcttttttattt

SEQ ID NO: 109487 - DNA, 985 bp, Zea mays
  Clone ID: MRT4577_31349C.1
ctcccccaccaggatcttcctcgaggagacgtccctggtcgcgcgcccggggctcgccatggacgacatccaggagcgcatggccgcgcgcctcaggcacctgggtatacgcgtccgaagcgtcgaggaggacgagcgctgcgtcatccccatgggagggccgctgcccgtcctgccgcagagggttgtcggcatcggcggcacggcagggatggtgcacccgtccacgggctacatggtggcgcgcacgcttgccaccgcgcctatcgtggcggacgccatcgtaaggttcctcgacaccggcaccggcaacggcatgggtggcctggcaggggacgcgctctccgccgaggtgtggaagcagctgtggccagccaacaggcggcggcagagggagttcttctgcttcggcatggacgtcctgctcaagctggacctcgagggaacgcggcggttcttcgacgccttcttcgacctggagccacactactggcacggtttcctgtcatccagactgttcctgccggagctcttgatgttcggcctcgcactgttcgggaacgcctccaactcgtcgaggctggagatcatggccaagggcaccgtgcctcttggcaagatgattggcaacttgatacaggacagagatgggtgaggagggtatgtatacctacatttttcacgtgaagatctgatctccattggatctctgattttggtatccatgattttcactgtatttacgatttgcaaagatggattcacaaaacacagttagcaacagcagttcaggacctcctgtcagatataggaattgctgctgcaacgctacttcagtatggtgattacagaggtgtatagttgcacttgcacactgagggatgtcgtgagaatctacgtatcagatatcatggtcttcatataaaagatcaaatttccaacaaaatatgaaattgacagttgtgtattaaaaaaaaaaaccaag

SEQ ID NO: 109488 - DNA, 496 bp, Zea mays
  Clone ID: MRT4577_3134C.1
tacgcgttcttctccgagccgaggacgacaacagggaggagggcgagatcaccgacagcacctgcgctcctgccctgtgcgttgcactcggttgcctgtgcgcgtttctctacctcgccggcctcttccccgtgcccccgactccgccagccattggccccgtcagaggatataccaagcattggtaaaatggcttcatgcgctcgttcagaaatatggatgattgcaaaaggttcactggaagatgatatattccacaagcccatcttttcttgtgctgatgtctatcccaatgcccacggggttcattggtgctgatccatacaagatgtgagtagaggacatgcttcggcgtcaaggccaaggcggcgtggcgaccggtagcagcagggtgactacctggctcgcctgcgtgggtcgccctagacactcgtgctggcttcgctagcggtcgcgaccttgagatcgggtagcttgcctgggcggttgatgcatg

SEQ ID NO: 109489 - DNA, 741 bp, Zea mays
  Clone ID: MRT4577_31350C.1
atcgaaggaaagcgaacacacaaacccaaacccaaacccacccacttctcctctcaagccttcgcctgccaccgacgccacccaagcccccaaccctagcgaggactgaaagaggaggaggcggcggcaaccccgtcgaccggaggggagatggtgttcttcgcgctgctcgtgggggcagagctcgacggcctcaccaacctgcagccccgcggcggctgcgacgaccccagctacccttactacttcaagctgcggtgcgagagctgcggagagacgagcgccaagaccacctgcgtctccctcaacgaggtcgtcgaactgcccaccggcaaaggcacctccaatctcctccagaagtgcaagttatgttcgagggatggatcagttgtgatgattcctgggcagggaacaccactgactgctgagcagagccagaaaggagagatgacttgtttgatggtctttgaatgcagaggctatgaacctattgagttcgcttttggtaatggctggaaggctgaatctgtacatgggacaccatttgacattgatctttctgaaggagagtttgatgagtatgatgagaagggagagtgccctgtcgctctatccaagctgcagtcaacattcaaagtggtgaagaagcagggttttcatgggaagaccagatatgtctaagatccagtttctcttgggctcttcaaacattggagtcagagatgtataaagcgcatctac

SEQ ID NO: 109490 - DNA, 512 bp, Zea mays
  Clone ID: MRT4577_31351C.1
accctcccacacccatctcttatcgcgtccatctccctctggggggatcgatagatttgaggtctagaagctctctctgcgccgatcatggctaagaattggcaatggtgagtggccacgactgggagtccggcgagatagtcaggggtaaggtccgtgtcgtcatcggcgagaacagttgagcgcccttcatggtccggctcgcagtgtcactccgcgcggactcccgacgtggcggatgaggacggggaggccttcggtctatgaagtgaccgagcggaactggatctcgccgccaacgcgaagatgaacatagcgctgcggatgctaagttctgtttggacccctccccaccctctcctatggcgatttctaccagattgccggagttgtggtcgtcaaggtcaccggtgggactgagatccgcttccactccggaagggaggactgatcgcaggcgccacctgaggaccgtcttcctgatgacaccaaggagtgtgaccacctgaggc

SEQ ID NO: 109491 - DNA, 362 bp, Zea mays
  Clone ID: MRT4577_31352C.1
ataaacacacgccaaggggacgtggctcacatgtgactggtgaattcacttcaaacttttacatgatcaagttttccccccatgttatgcggatctggtaatgtgacggatcaagggctccaatttgtccggaaacttccgttagctagtgatgctgctgattcttggggaagcattcgtgtagactagacattcctaaggcgcgtcatatgcctctgtgacgactggctggcttgctggctgcgtctgtacacgaagagaattttcaaggagctgactggtatttacgggctataagccaaagagacacatacaacaacacgagcagagcatagatgtgaggtgatattaaccgtggatta

SEQ ID NO: 109492 - DNA, 314 bp, Zea mays
  Clone ID: MRT4577_31353C.1
caatacaaacacgcttaatttaaacttagtgataaacaacagacatacctatacccggggttttttaaatatatgaggcgcgcccaaacataattacacgaaataaaatttccccgaaatatccaaccttgccgttaataaccaaaggacccccactgcttgttaccgggcacccaatacttggttccggccaaggcccaggcatgatacaccaatatcttcacccctaaagcaaacgggaaatcaacaaccataaccaaaattccttcccaataaacttttatcaaacaccaaaccttctaaaaaacaagccg

SEQ ID NO: 109493 - DNA, 538 bp, Zea mays
  unsure (1)..(538): unsure at all n locations
  Clone ID: MRT4577_31354C.1
tcgagtttttttttctttttttttttttttttttttttttactgggaactaaaacttctgcatacacctacgtggatttgtacactgtacaaaatctgcaatgcctcaaattttatgcaccctcggcaactggcggaatccaagggggcctggtaaaaaaggggcctccaccgctcatcttgtaggctacagctacaaatcagataataaaactctattagaaaatgctagatgttgaaggtagcgagaaagaaaatcttgaaaaaaaaataggtgttttgagaagtcagttctcgcctatgagtatggaagttgatgaggtaattgatactatcattggcaaggattttgcccctgggaatctgctatttctttttatgactcatttttgtttctgacttgaacatgctaccctaacataggcggtttgttttctcttcattcttattggggcacatcagacaagaagtnttggtaagggagatggacccaaaaaaatttcctggtttagatgggttggggggctagactcggggtt

SEQ ID NO: 109494 - DNA, 367 bp, Zea mays
  Clone ID: MRT4577_31355C.1
gccggccggtctcgggaccctactccatcttctcgtgttgttcggcgcacgcggagacagcccgcgatcccgatcccgatccttcttcacgcgaatctcgacgatcccccccttccttccttcaagaaggagagcaccctccacctggtgctccgcctgaggggtggcaatggtaatgcagatctttgtgaagaccttgactgccatgtatgataccgtctttgaagtatttgtattgtctgtcgtgactaagtttgtttcgtggaccggttgtcttctaccctacccaaaactacagtgtggcagcaaatgatgaataaatgtgatgtttgaattcaaaaaaaaaaaaaaaaaaaaaacctaccta

SEQ ID NO: 109495 - DNA, 598 bp, Zea mays
  Clone ID: MRT4577_31356C.1
cggacgcgtgggtccggacagagtccagagccgccaggactctcaggtacgccgccaggcgccgggccgctcctccctccctccttgcctctgctaagcacggagtgaaatgcgagcaggctggtggggagtctaccattaccaccactcgctctacgctccggctcgctctaccctacccgacccgcatgctaggcgggggctaacccgttgctccaccatgttcaggacaacatgatgccggtatcagacttagtgtggcatgccaccggatgggttgactgcccttgcccacagccatgagggcttgagtccctctacagctcgttgcaggaaagctgttgaaatcaatagctttgtacctgaaggaacgggcagggctatatttacaaaggaggccagacattatgtctaggtggctcgcgtaagtatgctgaatgatgcccagaatttaactgggattaaaaaaaggatgtgtgtgtatttgtggaaagcaaaggcgagctgcatagctcatacctcttctggactatatgcctgtgtggacagagtggcggactggtggtactgcgtctggagcattctagtgattgcttaa

SEQ ID NO: 109496 - DNA, 224 bp, Zea mays
  Clone ID: MRT4577_31357C.1
ggtggtgtttttttttggatggctgaagagaaacaccccccccatggcgcatggttatactagggacgaaaacactcacagccggacaacagagtccaccgccccacagcagatgctgcatgaatctttggacctgcgacctcaatgcaaaccacaggaccatcaactgacacaggaccacttggtaatcccttgcgtacaagggcctcaacagacgggagcac

SEQ ID NO: 109497 - DNA, 173 bp, Zea mays
  unsure (1)..(173): unsure at all n locations
  Clone ID: MRT4577_31358C.1
atgtcngcaccaggctaagggggtggggggggggcgcttacactatcaacttgcactcccatggactaagtatgcggtatatcaccacagagggggcattatactaccaaacctgttatacctgaacactgcgaacagagcaagggcgtgctcactgatctactcaatccaac

SEQ ID NO: 109498 - DNA, 414 bp, Zea mays
  Clone ID: MRT4577_31359C.1
tccaccgcgacgtcaagaccaccaacatcctcgtcgacggggactgggtcgccaaggtctccgacttcggcctctccaagtccggcccgacgacggtgaaccagacacacgtgagcaccatggtcaagggcagcttcgggtacctcgacccggagtacttccggcggcagcagctcacggacaagtccgacgtgtactccttcggcgtcgttctcttcgaggtgctcctggcgcggccagctctcgacccggcgctgccacgggagcaggtcagcctcgccgactacgcgctcagctgccagcggaacggcaccctgctggacgtcctcgacccaacgatcaaggaccagatcgcgccggagtgtttcaagaaggtcgcggacacggtcgagaagtgcctcgccgagcagagca

SEQ ID NO: 109499 - DNA, 524 bp, Zea mays
  unsure (1)..(524): unsure at all n locations
  Clone ID: MRT4577_3135C.1
ncccacgcgtccgcgggacgcccgtgtggctgccaggcggcccccnnccttcttggaattcgttagggagacatgtcgggccaagacacctcctctgtgccctcgggtctttcacactctttgcgtcatactctttcacacctcttgtagaaaaaacacgcagggagggtagcacgacacgaggaatgggaaaaagtatttattagtcaaaaaaaaaaaaaaaaaaaaaaaaaaaaaaaaaaaaaaaaaaaaaaaaaaaaaaaaaaaaaaaaaaaaaaaaaaaaaaaaaaaaaaaaaaaaaaaaaaaaaaaaaaaaaaaaaaaaaaaaaaaaaaaaaaaaaaaaaaaaaaaaagggggggggcttttttaaggaaacaaattttaaaacccctgccgtaaacaaaataattttttttttggggcccccaaataaaaataacgggcccgggttttaaaaaggncgggcggggaaaacctcggggtcccccaacttaaatgccttgggaaaaaacccccctttccc

SEQ ID NO: 109500 - DNA, 619 bp, Zea mays
  Clone ID: MRT4577_31360C.1
acagcttcccgaatagcggttgatgagagcgggatgcctaagtgctggaggtagaaggcctagctgcttctctccctggtgtgttggctcgccttgctgagatgctcctttgtcagagagaaaaagaacttctgcatggccaaggtatgcggcagagccttgcagttcgagtgcacggggtagactttcaaggaggagaccggccacgagttcgagtaggacgagatccccaaggccatcatgtcggtgaagcggttcgggaactgcctgctctcgagctacgacaacatgttcgcctacctgaaggcgctggagatctctgcccagggatattttatgcaccccggcgcggcggtcctgatggagaccatgtcaacaggcacggtgctgatcatagcaaaccagagcatggaggactgcgagtgcctcttcgacgccgtgaacgggctgacggtaatcaactgcgacctcggatacgtgatggtgatcccgcagaaccagctgcacttagactcacatgaggcaagacaacgatatcgaaggtgatgacatctacaagtatcaaactatggcttcagaaaatcgagatggatgctgttgccctcgagctgcccaagaa

SEQ ID NO: 109501 - DNA, 889 bp, Zea mays
  Clone ID: MRT4577_31361C.1
ggccgcttttttttttttttttttaacttcaagctttttttttatcattgcacttgcagatatgtacagataaattacagggacaatttctgtccagaatgagacctaataaggctaagaagaagaagaaaaaaacaagttcaccactgagctcggagctcgggcattggttcagttcctgtgtgccgggtgcgcaaggcactaactaactactacgccaagaacgtcggcccctcggcgctgcagggcgcgggcgccttccagagcgcgcggaagccggggcgcgcgccgcagcggcggcacggctcgccgggcggcaggtcggcgggcgcggccagcacccggcggcaggacgggcaggaggagtgcgcgcgcagccacgtgtcgacgcaggcggcgtggaacgcgtggccgcactgcggcagcacgcgcatggcctgcccctcctcgaactcggcgaggcagatggcgcactcgtcggcccccgccgccgccttggccttgccgctgtcggggacgtacgtgaccgtcgggagcgagcgcagcacctccttcttcacgcccctgttggcggccttggtggcgtccgccgccggctgcgaccgggacgcggcggcccagcgccacgagcacgcgcaccgggccacgagacccagcccgaggacgcagacgagcgcgcagagcaggccggcgaggatcaggatcatgtccgagttgatggagttcgtcggcgggcccgagccggccgccgcttcgaggagtatccgcgccatggtttgcacgctggctgagatggcgcgagcgagtgctgtggggtgcgtgccgctgttgttggccgatgcagtgcagtgcagaggctctgggcaggcggcgtgagaagttcccggcc

SEQ ID NO: 109502 - DNA, 666 bp, Zea mays
  Clone ID: MRT4577_31362C.1
gacctcataattataagcattgaaaaagcacaattgctacagtgcacttaaacttgcagctcattattatctggctaagatgatgggccaacttagtttatttgatctaaaaattgtgagtcttatgttctgaactcaaacttgtgacaatttattttattttcgcagtctattatacgtggtaatttgcaatatgcttctttaagtgcactcagaaggcatccacttgatctcggtaatcaagcattcctccaccaagctgtggaagggtgagtctagacttaatgtgttttctaaaactaatttaccaccttgtattctggaccttgtttattttacaagttctcaactattcaattcaagggattgaatcattatttatggtttcttgtcattatataaatgtgaaaagacttatattgatgtgacttctgaacgagttactgatttaatccatttcttctcatgtcatatttttgtattcagctatttatcaagatgaacagtatgatcaaacatctacctgttatatgaaaattcaatccatgtctgccaaaaattacatatatatgaatgtgctgtttcatattcattttcttctcatttgacttgatacaaggcggcagtacatatgtacatatgtactgaatgcataaccacttttgc

SEQ ID NO: 109503 - DNA, 624 bp, Zea mays
  Clone ID: MRT4577_31363C.1
ccggccggaagcgcaggattagacttctttgcgaccagaaacaccacaagtccctctctcgacactcacaaatcccaatccatttgcaatggctcctcaggcaaagaagtcgggcaaggcccagaagcagaccaagaagtacatcattgatgcttctcagcctgccagcgacaagatcttcgacgtcgctgccttcgagaagttcctccaggaccgcatcaaggttgagggccgcaccaacaacctcggtgacaacgttgttgtcaagcagcagggtgagggcaagatcgagatcattgcccacaacgagctctctggtcgttacctcaagtacctgaccaagaagttcctcaagaagcagcagctgcgtgactggctccgcgtcgtttccacctctcgcggtgtctacgagctcaagttcttcaacgtcgtcaacgacgaggctgacgaggacgacgagtaaacgaaacaaattgcaatgcattgcaacggcgcaggaatggattggtgaattgggacacgggatctacaaaagttaaggacttggccaatagacccagccatttgtgtggcactctttaaaaagaacacattatgaaaaaaaaaaaaaaaaaacccgcggcc

SEQ ID NO: 109504 - DNA, 241 bp, Zea mays
  Clone ID: MRT4577_31364C.1
tcttcctcgtttaacatccaacctccctcaagaagaggcctttttataaccggtaaagacgatctccaccctctccttcctacacaccatcttctccctaaactcccatgaatatcaccactgcgtcaatacccatcaacccctctacaacatactaataattacatctatgtcttcacctaatccaaagcacaatctcttctcatgctttatctaatgccatccattaattcttacacct

SEQ ID NO: 109505 - DNA, 712 bp, Zea mays
  Clone ID: MRT4577_31365C.1
actcctatgggcgattgggttcctcgaggccggccgggagaaacaccacaagtccctctctcgacactcacaaatcccaatccatttgcaatggctcctcaggcagtacgtacatgacaccgctttgctgttaggcgcctcctcagtagaagaggttgccgagtccaaaatgcagtaggctaaagtcatttttcaacagaagaagtcgggcaaggcccagaagcagaccaagaagtacatcattgatgcttctcagcctgccagcgacaagatcttcgacgtcgctgccttcgagaagttcctccaggaccgcatcaaggttgagggccgcaccaacaacctcggtgacaacgttgttgtcaagcagcagggtgagggcaagatcgagatcattgcccacaacgagctctctggtcgttacctcaagtacctgaccaagaagttcctcaagaagcagcagctgcgtgactggctccgcgtcgtttccacctctcgcggtgtctacgagctcaagttcttcaacgtcgtcaacgacgaggctgacgaggacgacgagtaaacgaaacaaattgcaatgcattgcaacggcgcaggaatggattggtgaattgggacacgggatctacaaaagttaaggacttggccaatagacccagccatttgtgtggcactctttgtggtgttcaaaaaaaaaaaaaaaaaacccgcggcc

SEQ ID NO: 109506 - DNA, 155 bp, Zea mays
  Clone ID: MRT4577_31366C.1
agcaggggcaacaacgcagagtcctcgctgcaattcaccactagggacagccgcagcgacctcataaatcataactgaaaaaaagcaagcgctcaaagctgaccctagatgcattgctattctattgaggatctcattattgtctctatcactcc

SEQ ID NO: 109507 - DNA, 309 bp, Zea mays
  Clone ID: MRT4577_31367C.1
ggaacgacagagtacagtacttggtgggggtatcttcaaaagttcaaaaccagacgaaaacaagcgcccaataagaaaactcaaagaattctcacattggtatcgacttacagctaacaaactcaaaaaccccaaaaaaaatgattggacaactaacacatatcaatacccaggcagatctactaggcgtcctccacaacaatggtacccacacccttgaaggcttctagggggatctcaacaacagtaacaagagagtaaagctattccttggcgtctgactcataaaaactcttgcgtgcgatccta

SEQ ID NO: 109508 - DNA, 1325 bp, Zea mays
  Clone ID: MRT4577_31368C.1
tggattcagacagtggacattgacacagaacttccagtgtattgtccattggaagtgacagttgctgaaacggattattatgatgagaccaactattgtgaggtgacaccttgtcttctgccagaacgctcagtgcttaaaagcattcgagtttgtgggcctagatattggcctcaggtgataaaacttgcacctgaagacaagccatggtggagatctggagacaagacaaatccattcaatgggggagtactctacataaagcgaaaagttggatcttgctcctactctgacgatccaattggatgtcaatcgttaatttcacgggcaatgcatgaggtctgtgatgcaccatctgctagttgcagtaatcaaccaaacagcactaatggtagctacttcagagttgatcagctagtaagcactttctcggccaatccaagcttgattgcttttgcaaaactctgctccgtgtcatggaagagcagatgcaatagcaattttcaggagttctgttctcaagtgctatatgaatgtatgagcaaagatagaccatcactgttacaggcctatatcagtttttacacaacaatagagttaatgtgggagcatttgaagactgggaattttcctttttataattcccttttccttcccaacttgaaggtcgctttggcctacaacgaagcattagttgattctagaatcacaaatggaggaattattcattcgacattcttggagtcacttatgaagcgagtgggagacatctttgcggagctgccaaacctcaaggacaacctccaccgatacttgagcacgggcacatggcctgacacacaaaacgacgtggtggttctctcgtggtacctccaatggtacaatataccacctgcccatgttgtggcttctgcagttgagaaggtcagaccgagagtccctgccggtgtatctatgctcccactgcttcgcctcctgctgccaaccacacaccttgtgggactgatggagatcgagaaggtacagattgtcatggaatgctaaaggatgagcgtggaaaattcaatcaaccttctctgcatgcgggttacttgtgatgaacggtagcaagtattgcttagtgcacttgtgatgaaatctgccagggactaagctgttctgaattaagtttgagacaaaagaatcccataatttttattgtgctttgctttagattcatattttctgcatgaattgtttcgattctacccatgagaagtactccctctgtccttatcagaggtcaaacactctaagtttgacaagtttatagaaaagagcaacct

SEQ ID NO: 109509 - DNA, 220 bp, Zea mays
  Clone ID: MRT4577_31369C.1
aattcggcacgagggaactagtctccagtttttttttttttttttttttttttttttttttttttttttttttttttttttttttttactagggaacaaaaatttcaatttaggcatttagtctaaaaaacatgtccattacaaaaatttagcttcgctcggggcaaacattttcatcataccctgatacaatgggggggggtcttgggcagtctatcaa

SEQ ID NO: 109510 - DNA, 831 bp, Zea mays
  unsure (1)..(831): unsure at all n locations
  Clone ID: MRT4577_3136C.1
aacgttctcgctccccttgccgccgccagctcctcccctttagccggagctccttcgccggcagtagagatggtgaaaggcgcagcccgctatgagcctggaccggcatttcaggagagtggagagcagggcaagcttgaaataccagcatctggctccacagaattttggctaatacagtggcctctaaaccatgtaaatgcttctgattttaatggtaaagaagcttctcttaagcttaatgacgatggaaacttgggaaatttggagagttcttcggggaaatcatatgaactcgttagctttgctgctcaacaaccagatgctactgtcttcattccatcaggatctgaaatgaaagccgtggggaagatttcacgcagagtttgcttggttcgttaccctgaacctgaagaattggagaaagagaaaccaagttttgggagtcttacacctggcagtaggagatctgcaggttcttctcggaagactatgtctcggttcagtggcttctcgaagaaccgtagcagccaaggatcagcattgtccctgggtcaggagaagcgtagcagccaaggatcagcattgtcccagggtgaacagagcgcggagccgacgcccaaacacaagcagaagagaagggacagcnnnnnnntttgggnggggccactcaaacgtggccgccaagtccctcggaaggatcccaggnctcgtggcgcaggaagcaacacaacctctgnagatgccgcagacgcccgtcgagaaatccaagaangagaagnnagagttaggattgaagagtagncacaagtggcaagcagcagtgccatg

SEQ ID NO: 109511 - DNA, 327 bp, Zea mays
  Clone ID: MRT4577_31370C.1
ggaagagaaaccgcacattttaccattcagttcaaaacacacatttgccatttccagagggacattcgttgccgggtggaaagatcttgctcatgtttttattacaaaggaaaattacgggcggtttaaagccgcacgctgttacaaactcgaaggccacgaatttttttaaaggccgcctttttctgctggctggaatcactctcctaactacgatctattgaatgggggggggggatgagttcgatggcgagctctttgttccagttggtttggttgttgccgacccatttgtttgttgttccaccagtagtacattaccagggc

SEQ ID NO: 109512 - DNA, 248 bp, Zea mays
  Clone ID: MRT4577_31371C.1
gccggccgggccgggactattgttatcaccagatgtgttatgggatcatgcgcagtagtactattttttgtacaaaaatgtgttatgggctgaaccgggagcatgcacgggagaataaggagcaagcgggtcctacctgtcagagaccaaatgggcagaacacgaaaaggcaggctactattgcagccttaataagtagtagagatcgtatgtacgtttttgaaaaaaaaaaaaaaaaaaggccccta

SEQ ID NO: 109513 - DNA, 360 bp, Zea mays
  Clone ID: MRT4577_31372C.1
ccaacccgtccggccaggataacctgcatgacttttccccggaactgcttgcgaagggcccggaccttaatcggtttcgggctaatcgcttgaatggggccgtccagcgtcccggccataaacggaaacagcttaacggggttttttttttccagcatcggccagaacctggccaatttcccaacgcccccgcccgtaacttccaagttttggctggggttagggacgtggcacctgggcctgttaatcgggctaaccttcggccagatcggattcaagggcaggaccgaggactacttcaagaagggaagcggttaaaatcctatccataatccctggtgctgccctgcgttgcgttgc

SEQ ID NO: 109514 - DNA, 607 bp, Zea mays
  unsure (1)..(607): unsure at all n locations
  Clone ID: MRT4577_31373C.1
agacgcatcccttctttcgttcatccgacgccgcctgctctctgctgccgctcgccatgttccagaaggcctgcgagatgctatcgccagatcaagaacaagccataccccaagtccaggtactgccgaggagtccctgcaccccaagatcaggatctacgatgtatggcatgtaagagaaagggtggtgatgagttcccctactgtgtgcaccttgctctcttgtcagaacgagaatgtctccagtgaggctcttgacgctgcccgcattgcctgcaacaagaacatgaccaagtctgcaggaaaggatgccttccaccttcgggtccgttctcaccccttccatgaccttcctatccacaagatgctttcgagcgctgctactgatacggtccagactggaatgatgngtgcctttggcaatgcctcaggacacctgtgctacggtggacattgctcaggtcctcctttctgatctatgcaaggacaacaatgctgcacatgccagcgaagctctgcgtcgcgccaagttctagttccctggacgtcaagatattattgacagcagagagtggggactcaccaagttgcagcgtgccgactacct

SEQ ID NO: 109515 - DNA, 646 bp, Zea mays
  Clone ID: MRT4577_31374C.1
actagttatctgttattttttttttcttggtggacatatcacccgataacctagacctgacatgggaggagacaccgatcttggcttttctcaacaggctgatgggtgcctgttagaacttatccacaagggggactcgccggttactttttaccagccaatgctatgcgatgccgaccctgagcgcctaatcatgttgactcaagaaggacgtacggaggaagctcctaaggaagaatgatgaacctgtgctcttgatcaccctgctgaccttatatgaataccttctcaaaactggagacccatagacttagtgtctttatggcacaactgcattctatcttgagacacaatactttcctatgctcaagaatttacaggccattcttcaggtgaagccctgaacggacatctttcaatagactagctgcacacccatcatttgtcatttggctgctttctccaatagaccttcagctttacatcttcttactaggaatccgatccgaagggtgactggacacgacctgttacaattcaaattacactacgggggagcaggccacgcatcagatgagcgtttaatgctcatcacttctattgacagctccattcgctactttctttggcgccttcttacgtgggt

SEQ ID NO: 109516 - DNA, 290 bp, Zea mays
  Clone ID: MRT4577_31375C.1
gaaatttggagtgacatctgggagcagcgaattggcataagtgggaagtatatttttacaactaaagttggtggttaagaaaggaaatcaaaccgagaatgctgatatagaattaaccttgcctcagttctacagcttcctgcacgagatggacgagtcagaaccagcatggagtgtttctgctgatttctgtccctgcatctcccctagccccgtgcactgccctcctcccttccctgggtgactgctctgagaggcacttcactcacaggcctgtgggatgctccatg

SEQ ID NO: 109517 - DNA, 1206 bp, Zea mays
  Clone ID: MRT4577_31376C.1
ttgaaggggtgcgggagagcagacgtcaacagcagcctgccaccacctatcctaagccttgcaggagaacagacgtcaacagcagcctgccaccacctatcctcagaagctggtggataccaacgctcaaggtcctgtggccgatatatcagatgcatttgccaaggccgtccagttgaaggatactgcgaacagcgggacgaccccgaaagctgagggtgcctcagctgaaaatggatccgctgccacagccaaggttgaagggagtgcaaacctgaacacaggccctgtggagtagagtccgtttcccttctttctgctaatttggagcagcagatgaattgcatgctgcaatgtgaatgccggaaaagtggaaagtgcaggttgatcgtgttaaatatggtcgtggctgcgtcagttgtacaacatcataggctttgttttatctccatttatgttatataagttcaataacatggcaggtccagattccagcagctctgagctatagaaaaaacggcttgggggcgacgcggagagaggggtatttgcagtataagtacctttggatcgaagagcatcactcgaagatgcatcgaggactgttcttcttcttcctcaagctgtagcctgtgggaggagaggccggagaggcctcccatggagttcccccactcatcacttcttgttggtcccctgctagctgttcgttccctcagcaggtagctagagatgatcttgctttaattttgtgctgatctcttactcgtcgtgtacgctcatatatatgcatggggcgacggatttgtctctgatcgttcccatgccgcctcttgtatcttgacttggatctatatatcaatgcaaataaatcatcgatgggtgacaatcgatccaagcttcctcatgtgttttcttttttgaagttctttcactagctattcgatcggaatttcttgtctactgctgtatatgcttgtgattgatcgcctgcataaatggaaatattgtgacttgtagtttacgtgctcgaaaaaaaaaaaaaaaagcggccaccgcaaaaaaaaaaaaaaaaaggcgtcaaaaaacctggaggtgtcgatcggcgagatgctgatcgacttcgtccccgacgtggccgggctgtcgctggccgagtcgggcggcttcgtcaatgtttcttgttgttcgcccgccaacgtcgcc

SEQ ID NO: 109518 - DNA, 259 bp, Zea mays
  Clone ID: MRT4577_31377C.1
actccctgtaccggttggccagcagtcttgaacaaaggcactgtggaggattgggatcctcgggttcaaatagtttcaggtgctgaatttgttgatagtgttacgcatggcaggttcgcgtcgggcggcggcggatttgccgagacgcaggcggaccccatggatcggtcagtggcacggctccttctgcagttaccctcctaccggaagactgccccgccgcaccggagaccttagctagtcgcctcttgcatcagtg

SEQ ID NO: 109519 - DNA, 303 bp, Zea mays
  Clone ID: MRT4577_31378C.1
tccgacacctggattttccacttttttaatactactcttcctacactcttactatcaatccttcctctctttaatctctggtctgcaattcttatcatccctcctttttcaatctatcccactgtattactcttatcaaaaaccacactaatctaccaccctatcccacccacctctatctccgaattctagctcctctcatacacattctaccatttccccgactactaaaccactcataaaagcaaccatcatagacaccaactctaacaatatcaagatctctaattcccctccttacca

SEQ ID NO: 109520 - DNA, 315 bp, Zea mays
  Clone ID: MRT4577_31379C.1
acgaccacgcgtacgcccacgcgtacgcgctggatcctgacccggcgcgactgccatcgtccggtccgttcatctatctacacgtatagacccgtccctggccgcatcatcggctgcgcctagtccaaccttgtactacgaggctccataagacctcgatcgctgggtgcttgccatgcgacaggtgccagtaccactccatggggctgaacaacaaagcaggggcgagcaatatggggatcacccttgcctgcacgggcctgctagaggtggagggcgatatcatggacaccgaatgcattgtcatgtgcctgc

SEQ ID NO: 109521 - DNA, 262 bp, Zea mays
  Clone ID: MRT4577_3137C.1
ttcggctcgtgcaccgacaggttttttgccatggcctactaccagccgaaatgccggctctctttaagacttgtgtggctcaacctccacgacagcacggggcaacgcgcgccgatagaccccttggttaacgccaacctttacgccatctgggtcaccatctccgtggggtcggcggtatgcatgaattgcaaggccaaaagcaaggcaaaggcaatcaacccgttctttatagaagcaggagatgcctctgcaaacaaca

SEQ ID NO: 109522 - DNA, 656 bp, Zea mays
  Clone ID: MRT4577_31380C.1
gctctcgcacaccccgcctcggccgcgtctaaaaccctagccccccgccgccggcgagcgacgagatgatggaccagcggtggcgcccgacggtgaacgagcgggagttcatcgagcaggcgctccagtcggacctccgcgtcgacggccgccgccccttcgacttccgcaagctcacaatctccttcggcagggaggatggctcggcggaggtgctgctcggcgagacgtgcgtgatgggctatgtgaccgcccaattggtcccgccgtacaaggacaggccgaacgagggcacgctagccatattcaccgagttctctcccatggctgaccctgcctttgagccaggacgacccggggaagcggcgattgagctcggccgtgtcattgaccgtggcctaagggagagcagagccgttgatatggaatccttgtgtgttgttgccgggaagcatgtctggtcggtgcgcgttgaccttcacattctggacaatggggggaatctcatcgatgcagctaacatcgctgcattggcagctttgtctacattccggagacctgaatgcacgcgttggtggggatgatggtcagcaagtcacagtacatgaccctgaggtcatggatccacttcccctaacaattcatcatctccccat

SEQ ID NO: 109523 - DNA, 247 bp, Zea mays
  Clone ID: MRT4577_31381C.1
ctgggagccaatgcaggcttcgagtacatcatccaactttaaatgttcaagtgcttatcacaaacatgaaaggctgtgatagagaaatgttgcttcactgaccaaacatcatattcatgataaatgatctatgtgtcaagattaggagggaactgtgctatggagatcacgacttatgactctaaccaataatgatgatgagctagaaaggtaaaatatcatgcacaatgactgatgtctggacccg

SEQ ID NO: 109524 - DNA, 346 bp, Zea mays
  Clone ID: MRT4577_31382C.1
aaaatccgaaaccacaaaccaaataacttttcccaaaaaaaaatttcaatcccctaggccccaggcctttaaaaataaaataccccctttgtatttttaacaccccttcccccacaagggccggccagtttttttccttggggcccgttctgaaaacaaaaaccacaatccgccccccctttttgttcataaaaacccaaacaaaccgtgccgtttaacatttaaaatgcttaaataaaaccacgcccatgggtttttttttaataccccggggcaacacccaaaacaacatctacaacacaaggttttctaaaaaaaaattttttaaaaatcgggcccggggttt

SEQ ID NO: 109525 - DNA, 524 bp, Zea mays
  Clone ID: MRT4577_31383C.1
atgctttccaaaagagtcctactgctcacccctgtgtctcccatgactgtgcgagacggcgtcacctacagagagatcgggtgcatcttacgagaacgaccaggtgaagcatgcctccggccacgagatgtccgactacaataatgtcatcctcttcggtcgaggacagggcctgtcaccctctacctggtaatggccaatcatgtagaccattgtctgcatcacacaggtctgacgcaattacaaccctcggatgtatacaagagcctgcttatcagcgttcataaccccttccttatataacgggtgatgagaacacctaccccgatgacctctgagagttgttcatcgtcgactgatctggagcggacacaaaggcgatcgatgtctagctagatctcgcggacagatgtttgggagtgcgctctaagaggatcgctcgcctgagctgcatccaaacgggcacgcgacaataacttccaagaatactcctagacaaccatctctgacgctgaggatctcct

SEQ ID NO: 109526 - DNA, 336 bp, Zea mays
  Clone ID: MRT4577_31384C.1
gagctatatgtcgcatgcacgcgtgggtaatgctcggaattcggctcgagcgcaattgcccggcccatgtgtatgactgactcatgtttgtttgctcctggggctgctggatacaaaatttgggatatacaatggcatgagaccaatgttgattcatccaatatgattgcaaagacaagaccacgctcatgagcaactcatggcacggtggctcttgaaattgacgacgagaagatcactgtggacgaaatcatagacatggattagttgattgaacttgaagcaatcctgtcgagaacgtccttccacgtctaggagcctggctaggcaacataa

SEQ ID NO: 109527 - DNA, 650 bp, Zea mays
  Clone ID: MRT4577_31385C.1
taggggccttttttttttttttttttcttttttttttttttttttttttctttttttttttttttttttttttttttttttttttttttttttttttttttttttggaagaaggggcatttggtcaattcccttcccaggggctggaaaaaggctggaaaattcttgggggaaaattggtcgattaaaaaaaaaacccaaaaaaaaatggctataaaaaaaaaaaaaatttaaatggccccaatctcaaacccaaaaatacccaaactggaaaaaggaaaatcaagggattttgggcccctcccggctaagaaagtcccccccggaaacccaattggaactgaacatttttccaggctaagaaaagggacttttcattaaaccccttggtggtgaacacccctggaagggtaaaattaaaaaaacccaaaagttccttggcaaggaacaaccccggcctcgggggtttacttatgaattcaaaaagggggttatcattcccaggggggtccccacaaaaaaaatcaaaaccatccccccaacttggaaccccaatcttcttgaagaccctaagtttcctccccccccccttgaaaaataattttgcataaggggttggaagggggttccccccaagaacttggggttcat

SEQ ID NO: 109528 - DNA, 330 bp, Zea mays
  Clone ID: MRT4577_31386C.1
tttttgtgtttgttcaagggtattcattactttctctcaagggcagttggtattccatttagtgagggcaacacattcacgctaagcacgacacgaaacgaggggggaaattcaaatattacaacgacgaggggtaaaccgacagaaaaagccaactcgcccctgatccccccgccaagcgggagaaccccgccatgggggaaaacctcgggggaaaaacggcccaaaggctggcgacccccaagagccccaccaggcacgcctccacagcctcctggaggggccccaccaacaacaactgggacaaaaaaaaaatattgaagtcccgcc

SEQ ID NO: 109529 - DNA, 3092 bp, Zea mays
  unsure (1)..(3092): unsure at all n locations
  Clone ID: MRT4577_31387C.1
cattgggtaccaggcaaggccgcccttcccttctcctctcttccccgaaagagaggtcgcggacggaacccttccaccctcacctcatcccacaaccttcgattccttcacgatcttacctcgcgcgctcgccgattcctcgatcgagtcccgcgcgattcgctttctggtcggattctctcccccgaagcatgcagccggaccagcctgtgatcagcttgcgccccggcggcggcggcggcccgcgcgccggccgcctcttctcccccgccttcgccacctccgtctctggagacttcctccgcccgcacggcgggggcgcctccggcatctccaagatcggagattcacattttgagccacgtgagcgtgttcgatacacaagagatcaacttctcgagctgcgtgagattgttgatgtgtctgaggaaattttaagaatcaagcaagagattgatgtagagcttcatggtgaagaccagagctgggttcgcaatgattcaactgttcaaggacaagcacaagctcaaacacaagcacagaatcgctatgctgagactgatagccgtgattggcgtgcacggtctgcacagctgactccgactaatgaagaaaaatcttgggacaacataagggaggctaaagaagcctatgcctctagcggtaggcagcaagagcaagctaacaggcaagatcagttaagctcccagtttgcttcgaaagctcaggttggccctacccctgctcttattaaggctgaagtgccctggtcagcccgaagaggcaatctctcggagaaagaaagagtcttgaaaacggtgaaaggtatactgaacaaacttacaccagagaaattcgatcttttaaagggtcaactaatggaagctggaattactactgctgatatattgaaggatgttatatctctcatatttgagaaggcagtttttgagcccactttctgtccaatgtatgctcaactttgttctgatctcaatgaaaagcttccgacattcccttctgaagagccaggtggcaaagagatcacattcaagcgtgtgatattgaacaattgtcaggaagcctttgaaggtgctagcaacttaagagctgagatttctaaattaactggccctgaccaagggatggaaagaagagacaaagaacggttggtcaaacttagaacacttggaaatattcggctaattggtgagctactcaagcaaaaaatggttcctgagaagatagttcatcacattgttatggagctattggggtctgggactgataaaaaaccatgccctgaagaggaagatgttgaggctatctgtcatttcttcaatacgattggtaaacagcttgacgagaacccaaagtctcggcggatcaatgacacatactttatccagatgaaggagctaacaatgaatccccagcttgcaccacgtttgaggtttatggttcgtgatgtgattgatctccggtcaaataactgggtgcctcgacgagaggagattaaggccaagaaaatcagtgaaattcactctgaggcagaaaagaaccttggattacgacctggagcagcatctggcattaggaatggccgtagctcaccaggaggagcccttttgcctggaggggcatttccaatgaatcggccaggaactggaggcatgatgcctgggatgcctggttcaagaaagatgcctggaatgcctgggttggacaatgataactgggaagttgcccgttctaaatcgatgccaagaggggactcgattcgcacaccaggggccgttgcttaataagccatcaacagttcacaagacatcatctattaacacgaggcttcttcctcaaggcagggcgcagcactaattggcaagagcgcacttttgggaactggtgtcccagcatcacgtcctctcagctttacgcctgggcccacaccagctcaaattacaccaaaaccaatacgtgcagcaccagctgttgtccctgctcctgataaacaggccagtgctcccaaggggaacactgctgagcttcagaagaaaacaatagctcttcttgaggagtattttggcatacgtattttagatgaagcccatcaatgtatcgtggagctgcagagtcctgattactacccagaaattgttaaagaagctgtcaatcttgccctagataaaggcaccaattttgttgatcctcttgttaggctactggagcatttgtacacaaagaaaattttcaagactcaagacctggaatccggttgcttgttatatggtactctgctggatgacattggcattgaccttcctaaagctccagcacaatttggtgagatcattgctcgcctgactttgttgggtgccttgagatttgaagctctggaggttattttaaagaaaatggaggatacctacaaccgcaaagcagtttctaatgctttcatgaaaaccttggaagcaaacccatcaggtcaggctatcttaggctcacctgctgctgctgcagtaatagacgcttgcaacagccttttggaataatcttcctagcagctttggcctatcaaccttttcagattctgtatcttgcgaaagacggtctcgtgtactctctatagtttaggtgtcaaggaattgaggaacagacaattttgagctgtataattttgcgagatcagatgagtgttgattgttattgtttcggccaagaaggaaagaaagaagccatgaattttggtcttgggcgaccaacttaatttgcaggagtcctagatgaacaaggctaaatatgttgttactatgtccacctaaaatgttgttagttattttcctgtgactacacatttttgtaacgttgtactatgattttggaatgttttattgggtacaatatattgtgttatttaggagtcaaaactaaaaaaaaaaaaaaaaaaagaaaaaaaaaaaaaaaaaaaaaaaaaaaaaatcgaggtggggcaccggtagntatgttggcgtccaatctcgtcttgggctttagtatttcgcatgctagttcgactggcatatttgaagggtcaccttcgttctgggtttgtc

SEQ ID NO: 109530 - DNA, 201 bp, Zea mays
  Clone ID: MRT4577_31388C.1
gaggttcctctgaccgggcgaggctctcatggcggcggctgatccccgagaacgcggcgacgctgcgaatgggaggtcgcggcgctgaggctgcgcatacaggagctggaggcagagaatccagaggctggacaacggacttgcttacgaccctgtcacctgcggattcaaggagggcagtgttggatccattactgcaca

SEQ ID NO: 109531 - DNA, 323 bp, Zea mays
  Clone ID: MRT4577_31389C.1
gagaacacaatctttattatatataggggcgaacaaattttaaatattcagggggaaccctttttgggtttattacaaaatttcagggccccccagaacgggttaaaaaatttcaaaaggaaaaaacgctttttaggggaggacctcctacaagggggcccggggggtttaagccccctttttaaaccctagcgtgaagggcccaaggggaaagaacacctttttgggcccctctttggttttaggatcgacccaaattcccttcctggcaaaacttggggggtgctggaagggttggacccaccaattttggtttttggtga

SEQ ID NO: 109532 - DNA, 209 bp, Zea mays
  Clone ID: MRT4577_3138C.1
cccttttccttattactttttttcagatgaggcggaaaggaattttataggaatcagctcattttcacaggaaatacataggaaatgggaaaaaaaccccacattacaaagaaggcctaaattggatccaaacagggggccttaataaatacgctcggcccaggtaaaacagcacctggcaaagggaccaaggatgccctaacccttct

SEQ ID NO: 109533 - DNA, 955 bp, Zea mays
  Clone ID: MRT4577_31390C.1
ttgagattttagccgccgccgcagctcatctcacttccccgagaagtcgcagccgacgacgtactcctcgccgatacgatggccgtcttctccgacctccacaccgccgacggcctcaagaccctggaggcgcacctagcgggcaagacctatgtttcaggtgatgcgatcactaaggatgacattaaggtctttgctgcggtgccatcaaagcctggcgctgagtttcctaatgctgcccgctggtacgagaccatctctgcggctgtagcctcaagattccctggtaagcctgttggtgtaaatctgcctgcgggatcagctcctgcagcagctgctcctgctgctgaggctgaggatgatgatgaccttgatcttttcggggatgaaaccgaggaggacaagaaggctgctgatgagcgtgccgctgccaaggcctcttccaaaaagaaagaaagtggtaaatcctctgtccttatggatgtcaaaccatgggacgatgaaactgatatgaagaagctggaggaggctgttcgtagtgtccagatggagggtctcacttggggagcatcaaagcttgtgcctgttggatacggcatcaagaagatgactattatgttgacgattgtcgacgatcttgtgtccgtcgacagcctaattgaggaccaccttacggaagagcccatcaacgagtacgttcagagttgcgacattgtcgctttcaacaagatctagagttccaatcactgagattgggcaatggccggcagcgcttaaaagtttgtgctgggatgcgagactttatcccttctagttaccttgttatagaaatgttggttggagtttattgttgagtggtgccagatttttgaatacctgtttatcttaaaaacagcggaactgctgggcaatgttctatgtctaaagttaatgagttttcaatggttctgcatct

SEQ ID NO: 109534 - DNA, 364 bp, Zea mays
  Clone ID: MRT4577_31391C.1
aataagctgtttttttcacgcccagaagctaatgtgagccagggggatgcagatattcttttcctatggaagaagtatgagctcctacatgagaagtctgaacagaagcatgtaattcttggggtgatcacccgaacaaaaaagcattggaagaatttggacaaccacctcaacgtgattggaaaggctttgttatgggctgaaaaaaggccctccacaattgaaggccttaaggcttccgtgcaaccaattcctggtttattgggactgcttgaacaaaatggtacggatcttccaatcccattgcggatcgttcactcactacgtgttgaggcatattagggcgttcccaaatatattcaac

SEQ ID NO: 109535 - DNA, 257 bp, Zea mays
  Clone ID: MRT4577_31392C.1
aagcagtcagaatgcactcacctcagacacactggaaaacagtaagagaggagagaaagaagcctactgaggaagaaataagaaagatctgcagggatgaaaaggaagcgctggggcagaatgaggaatctcccaaacaggatttgattactatctggcaactgtcagatctgagtttctgtcctaaatatgagatggcaaattccctactctcataactgacccatttccatatttaaacacacacccacagtgtc

SEQ ID NO: 109536 - DNA, 300 bp, Zea mays
  Clone ID: MRT4577_31393C.1
attcggctcgagcttgcgtgcccgggtttgacatccacgcactcatcctgaggaactggggcacaagtgatccttgcgccttccactgctactccgacccaccgaccgacgaacgatcctaacacacctcctgacggcgcggtagttctggactattcatgcgctattgtcgccgattccacctctgcaactgccacagcatcgataagagagacagaccatggaggcgaagcttattgtctcctgccacaacatgatccacctaaactctgcctactaggtccccctgacgtcctcaac

SEQ ID NO: 109537 - DNA, 279 bp, Zea mays
  Clone ID: MRT4577_31394C.1
aagagtgttttaagcgagtagctcgcattcgctcgatgagagatgagcgcacatactgcttgacagcatgtgatgctctcattgacacagacaacagcagtctgcaccttcagctgtctggatcattagacgcagatgatatactctgctgtagtgacgacactcgtatatgggagatgtagagaatgagggactgaaatcatgacagttatgtggagcaggaatgttgatctcgcacacagagtctataggcactcactacatgatgatgcactacag

SEQ ID NO: 109538 - DNA, 1357 bp, Zea mays
  Clone ID: MRT4577_31395C.1
atagccaagaaaacgtttgccactgaggccctgtttggcacagcttattttcagcttcttcacaaatttaagccgaagttctgccaaacagacagcttctccagcagcttatcagttcagctgcttctcagaatgaactaaaagcagcaaacaagcagaagctgctttttaccagcttatcaaataagctgcttttttaacaagcagcagctgtgccaaacagggcctgagtcatccaaggatatcggtggaaacctgagcttccgtgtacatttaacatccaagatcattttttcatacaaagttaatagctccaagccagattctggaactaccaaaaggccaaatgacagtggttagtcatttgttacttccagctgggacggccgcctgcttattctgcctgattgacctgggaacaaacgtaaggccacgagagcgacggtggccaaaggtgacgcttgcgggcgtagaatccgctgtgctcaacctcgatacagcagaggtgagctcatcaatcttctgctcgacctccatttcgtcctcctgggcctccttatgctgctgcttgttctctttcggttcgctatgatcatgttgcttcagccggtacctccggtttggttgccttgcaccttttccgtcgacgtccatcgaattatcccttgtctcttcacccttgtgagcagtctgcctcctctgggacttctgccgctgacgctgggagtcccgtgcctttttgaagaactcaaatgatttgggaaactgatgcttatcgatgagatgctgctgccggctcttgtaactcttcaatttcataccacaaccctccaccaaacactcgtacattggaaaaccacgggcaacttttgcttggaaatacgagtcgtgcgtctcagaaacatggatgctcagcaaccttgaagttggataaactcgcgagcatacagagcatgaagcagtatgtcgagtgacatagtggtcctcaaactcctccaggcaatctagatgagcaccacaaccagcaattggacaaaacactgtgcacgtgctggctacttccatcttctcaagctggttgcggtcatcttcagaaagatccagggcaaggtgcttggccaggagctcgcgctcgaggtccccggcagcgaagaaggggtcttctggggcgagtcgccgccgtgctgccaaccagaaccctatctccggcccaggagccgccgccgcctcctcctccatggcgtcatccggcttcttctgcatcctgtcgatcctggcggccctcacaaagcctcctctcgccgagaggaggggggaggaagattcgggttcgaattcgaatttgccccacggtccg

SEQ ID NO: 109539 - DNA, 489 bp, Zea mays
  Clone ID: MRT4577_31396C.1
ggcgaccggcagctgcacccccctccgaccagcgtctcgtctggaggctgcggcatgcaagaacaagagatctgccaccgtcccatatcctgtgcctgcagctagcgaccccctcggccgaactcagagacgaagccatgggctgcggcagccggtaggtcaaccggtcaacccatttccattcgtacccggtcaaggacgtcctggcgaagcgataaatcccccaagggcgccggacggcgaccaactgtggcgagtggccgtatgtcacccttccgatcgctgtagcaggggataggaacaggaggaggagcagtatcgtctagggatggatccgaatatttattcggatatcattttttggtcttctttcttcgattatgaacaactaacatatataatttgctatgtaaatttatattcttgtttttagcattgagactattaatcatcacaaaaaataaacattaaattcattctatatctttt

SEQ ID NO: 109540 - DNA, 496 bp, Zea mays
  Clone ID: MRT4577_31397C.1
cggacacgaaggtgtgctactagatcaactctcggtagtcgatgtaaatgtccttgctggggctgatcaactactccatgacgacgatggtctattacgccggcaactcgttccctgtcatcaagaacgcgctgtgcctccactcggagcttgactactacaatcgcaagaaggtgattaagtacggtgacgagtagcgccgccaatctgtaccaggctacggacgacaccgtcagctccacgggaaacgtgaaggtggtggaccaggatgacaagaactacagcttatgggccggcactccgggcgctaggatctgcaccgtcacaaaggaggtggagacacaccctttaaagtttgccatccttgaggtcactgctcccatcaagttcgacagcctcttctacgccacctgcaccgacaacctcatccgtctactggagctcgcctgctgcgctgacttcacgtttctggacgtcttcacgggcgtgctaaaga

SEQ ID NO: 109541 - DNA, 839 bp, Zea mays
  unsure (1)..(839): unsure at all n locations
  Clone ID: MRT4577_31398C.1
accgtaatccacttccacacccacaaacaattccacgctccatctgtgcaagaaagatgccaccagtgctcctcctcgtcctggccgcctcgctcgtggcgctgccgtcgtgccaaagccttccggtgctcgctccggtcaccaaggaccccgccacctccctctacacaatccccttccacgacggcgccagcctcgtcctcgacgtcgccggccctctcgtctggtccacgtgcgatggcggccagccgcccgcggagatcccgtgcagcagccccacctgcctcctcgccaacgcctaccccgccccgggctgccccgcgcccagctgcggcagcgacaggcacgacaagccgtgcacggcgtacccgtacaacccggtcagcggcgcgtgcgccgcagggagcctctcccacacgagattcgtggccaacaccaccgacgggagcaagccggtgagcaaggtgaacgtcggggtcctggcggcgtgcgcgccgagcaagctcctggcgtcgctgccccggggctccacgggcgtggccgggctcgcgaactccggcttggcgctgccggcgcaggtggcatccgcgcagaaggtcgccaacaggttcctcctctgcctccccaccggcggacctggcgtggccatctttggcggcggcccgctcccgtggccgcaattcacacagtcgatgccttacacgccgctcgtcgccaagggaggtagccccgcgcactacatctccctcaagtccatcaaagtggagaacacccgcgtcccgctatcggagcgggcgctcgncaccgggcggcgtgatgctcagcacgaggctgcccta

SEQ ID NO: 109542 - DNA, 275 bp, Zea mays
  Clone ID: MRT4577_31399C.1
aaaagggatttttttaattggggggtacaggagaaattagttttcccttccatttattagggccaaatgttcacaggtgcataatcgtcctattccggttcaaatgcggggaaatatttcaacatttgcatacccctgggaatgctacaagggtttcaggacccaaacttaacttttttggggtatttgcctacttcccggaggtttgggcataggaattgaattgtttttcaccacccacaatttttgcacgtatttgggtgccaaattccttt

SEQ ID NO: 109543 - DNA, 234 bp, Zea mays
  Clone ID: MRT4577_3139C.1
aatagaaacaaaatattgtataatcagtagaactcgataccaattaaagtcaagcgaacaggacctactgcatttatcgttccggtttcgatgattaagttaaaattattactgcagaaacacatatatataggggtagctaactattgacatgaagcacgcgctctaaggaattaagccgctggtgaatgggacgccagtttggggcagccagtttttgcctagcaccattct

SEQ ID NO: 109544 - DNA, 780 bp, Zea mays
  unsure (1)..(780): unsure at all n locations
  Clone ID: MRT4577_313C.1
gaataggactgtgttcagcgtatcncgggtactatatatgatgattcaggagttgagacctttgacttaccgggagaaccaagtcttactcttgggcgttgctttattgaggttgagaacaggttcagaggaaacagcttccctgttatttttgcgaataaaagcatctgtcaggagttaagaaaccttgaagatgaacttgaagattcgcggtttcctgatgtctctccagatgatcaggtccatgatgctaggcggctaaagccaagggatcaagttctgcattttcttaatgaacttggctggctctttcagaaggccgctgcatgcacaccttccaccaaatcagatgtttctcattcagagttgattcagttctctactgcacggttcagacaccttctgttgttttctaatgagcgggactggtgctccctcactaaaacactactcgaaattcttaccaagagaagtatggttagtgacgagttatcacatgagactctggagatgctctccgagattcatcttctgaacagggcagtgaaaaggaagagtagccacatggtgcatttgcttgtgcagtttgttgtaatttgccctgacaattccaaactgtaccctttccttccaaattatcccggccctggtggtttgactccattacatctagctgcatccattgatgatgcagaggatatagttgatgcgttgacagatgatcctcaacagattggtttgagctgctggcactccgtgctagacgatgaaaggctatct

SEQ ID NO: 109545 - DNA, 974 bp, Zea mays
  Clone ID: MRT4577_31400C.1
cattgggtacctcgaggccggccgggaaacccgtcatctactagcctctcataggttctcgcacgccgaaaactccgtataaaacacacaccgccctcctacggatcaaaccacccctcggaaaaccccaaaaaagcgtcagaaaaagaagagagagctgggggatggacacgcacgtcggcaaattaatcgactcggtgggctccatcttccgcggcagcgacgtcctgccctggtgcgatcccgacatcatcgccggtttcgagagtgaggttgctgaggctgcaaatgaagaacagaaaaccgagagcctgatgaggctctcctgggcgcttgttcactctagacagcctgaagacgtcaaccggggcatcggaatgcttgaagcttcattggacaggtctagcagcccagaggaaacaagggagaagctctacttgttagctgttggtcgttacagaactggggattatacaagaagccgacagcttttggaaagatgcttagagatccaacatgactggagacaagccataactttgcaaaggctcgttgaagaaaaaaccaaaagagatggtatgattggcatggctatcatcacaggcgcctttggagttgtgggtcttgttgctggtggtataattgctgcggcttcttcgtcatccaggaagagatgaggatatcttctctgttgaagtgaataagaaaaaggcgggcaaaagcttggtggtgggtgacagtgctcatcattttttgctccgtgtgaaggggtgctcacttgtcttttttcgcgcgagagaccaaccttgtattgcgtccaaacgagagatatatgtattgttaaacagtagaggtcgaggctgccgaacattccgactgtttttactaccaaccttgtattgcgttcaaacgagatatatgtgttgtataacatgtttttttcaatgcacggaaaagttccttggatcctctcc

SEQ ID NO: 109546 - DNA, 554 bp, Zea mays
  Clone ID: MRT4577_31401C.1
tctagcacttcaattcatcataatgaatctgcagtgataatacattataattcatctaggctattctcagtctacaaattttgagtctactgttgttagggtcaagttatcatggacctagaataacatgtcatcccatctcgtgtttccgccttggatgacccaaggccccaagggaccaagagaaggacgcccaaccgcctgacccttggtctccatctcgtccgacctctgactgaggagtcgcagtacaaaaccacgaccggtaagtccacctcaccagatctaggggtcggggttgcacctatcccctcgagatcaaaattcacgaggttgtactaataacaagtagactttggcacaactatgtggttcaaatgatatcacgagagctggtacgccagcatattggctctaacactaagtctcaatgaacattccagaaaaggtacgaacaggcgtgctcacctgtacaaaatctagccatggttcaaccactccatatgttggaggatgaacatgaacacgctgcaaaacaggacaaggccgacagc

SEQ ID NO: 109547 - DNA, 395 bp, Zea mays
  Clone ID: MRT4577_31402C.1
ggccggcccgccgctccgggccgcaatggggcaaagctacaggaagtctctcggcgcgacctcgcgggcggaccaacgggccgacccaaagggggcggggtcggacgccccgacatccccgctgactgacaacggcacgccgatagcccccacacccaggcgccacaagtacggatccaccacaccgttgcaccaccaccaggcggctactcccggcgccgccgcctgacctagcccgtacccggacggcggcgccagcccactccccgcgggcgtgacgacgtcaccggcccagaccacgccccggaggttcttcaaactgcccttacaatcaaccaagcccgccaagcacataaaggccacacatgccaagcgcctaagcgggggcaagccca

SEQ ID NO: 109548 - DNA, 1263 bp, Zea mays
  unsure (1)..(1263): unsure at all n locations
  Clone ID: MRT4577_31403C.1
ggaaacgtcatgcagtgatctgccatcctctccaggtcctgctcatcaggggttcctcgccgacacccggctgccccgcgtgaagctggtgagaacgccggcnggctggccagggaggcgccggcgagnccggagacggtggaggcggaggcggccatgttgtctgtcggtgttttttttttttttttttctggtggatgggatggcacaatgttccatcagtccatagagtaaattgcacattggtacaacacaatatcaaaggatacatagacaacagacagtggtaaaaaatgttactctagcaggaccactgggaatcagatcacttgttgctggtaacaaatcgaattgcctactggtacgctggtagctcaaatgagccaaaacttttgttctatattaaagggtccatcataatcacagatatgtttatgtggtgcctagacaccatgtatcacctttatcatgtcccttagattgctctattcagcctttagagaatatggggcaaaaatggctttgacgtcttcaaacacctcggggattggttttgcagcatcaatctttttaaccttgtcctttgagttgtaatgctcaatgacaggcagagttgagtcaacaaaggttttgaacctttttttgatagtttcaatgttatcatcaacccttccctgattgcgccccaggagtcgtttctccatatcttcttcagaacagtcaaagaatagcacaaatgcaggagaaattttggtaacattctcaaaggctgcacgattctcctcattccttggaaatccatcgatcaggaatttgtcatgtacacttcccggcacccacacgccacaggtgctgctgatgcagcatcgaaaacatacagagggtgagagggagggagacggtgtcagcaacgcccaagtcccggagtcaaatataatgtcatggcgtcagtggtttgaggcgttggcttgacccctagatgtgttccaacatgcccgttctttggatccctactcaccagatgcgcaccctgaactgctaaatcagctgattcaatccgagaccccccttgcccccgcgccagcatcgcggatcgcacccacaagactcgagggatcaaccaaccagccaacgatccatggacggagaaggtcggacgccataagccaaaaaaattgtccgtaccttgtgggaggcgcgcgagatctgagagcgcgggcgaggggacctggaaaggagggggagcgtggaagaaataaacgc

SEQ ID NO: 109549 - DNA, 953 bp, Zea mays
  Clone ID: MRT4577_31404C.1
ctcgatcgaggccgggccgggattccagttcccatccacttccaagctaaacaccatgtccatgtctgtagagatccccatggatcgccctgctgcctccgctccacccccgggtgccgtgtgcgacgtggtcgacgaggacgaggcggcgccgccaccgggcaatgctaggcccacgcgcgtcctcatctcgcccatcgtgcccctccccgctgacggcgcttcggccgacgctgcgctgccgccggcgtacaccggcgtgctgtacctgcaccgccacaagtggcccgccgtggaggacgaccccggcaagaagcgggagaagtggctcaaggagatgcgcggctggctcatggtgctcgccgtgctggccgcgtccgtcacgtaccaggcggggctgaacccgcccggcggcttctggcagcaggacgacgcggagggcaacgtggccggcacgcccgtgctccagtccaagttccccaagcggtacaccgttttcttctacttcaactccacggcgttcgtgacgtcggtggtcatcatcgtcctcctcatgaacgagtccttctaccactcggaggccaaggtggaggcgctggagatcatcgtggtgctagacatggcggggctcatgggcgcctacatcgccggctgcacccgcgaggtctcctcctccatctacatcatcgtcctcaccctcgtcgtcttcctctacgtcgtctacacggcgcagttcctgcccaagctctggggcctagtcgttgacgtgcccttcctccacaaggcggcccaaggcggcgcgctgcccgtgccgcaagacatcctggacggggccaggccgtcggctggcatcggccggaccaagtcggcgccggcgcgttagctaggcgtacgaactgtgcctggcgcacttttcctagacgtatatatgtacaagactcactgccagacta

SEQ ID NO: 109550 - DNA, 121 bp, Zea mays
  Clone ID: MRT4577_31405C.1
gcttgttgctcttcaagaaatacttcaagaatggggggtaggttcagaaatagctagtcctcaccctaccacagtattataacatcatatatccgtcttgtcttatattcaactatgtatc

SEQ ID NO: 109551 - DNA, 391 bp, Zea mays
  unsure (1)..(391): unsure at all n locations
  Clone ID: MRT4577_31406C.1
gtgtttgttttttttttcaaaaaatcttttggggggtgctttttttttttttttttttttttttttctttttttctttttttttccttttttcccgctaaccttcacacacttttttttttttttttagaaacccacccccctttggttttgtctttggggnnccccccttattcttnacctaaaaaatgccccccccaactatgggtttttcccccaaccagggggggttcacaaaaacaaactggttggtgtgccacatttgtttgctcttgcgagaggccaccccccaggttttttccccccctttgggtttaatgctcctgctgcccctttttgtttacccccttccaatctccccaggcctgtggtttactgctagtcttcgttgc

SEQ ID NO: 109552 - DNA, 265 bp, Zea mays
  Clone ID: MRT4577_31407C.1
cgaaagtagttagaactaagagcacagatgttggtttgctatcctgaggcgcctgttgttgccactggctagacgatgcttccaggtcggtcgggcaccttgcagttgtcatcaacctctcgataaaccgagaacattggcaagtgctgcgtatactcctgcaagtgctgcattttttttataatggaaacaagagttccggcttttcgcatcggatgcgtatagccattacatattgtttattgactcaatgaatagttctttg

SEQ ID NO: 109553 - DNA, 213 bp, Zea mays
  Clone ID: MRT4577_31408C.1
aaaaaaaaaaaaaaaaatcaaaaaatcattttttaaactacacaaaacttacttcggagaggctaattactaacaatggtaaaagaaaacaactactatcaaagggataaggtcaaagaatcattactgaactatttcaagagaagcacttctggaaaacacattgaattacttgattggacttttaaaaaaaggcttcccggttgatcaaac

SEQ ID NO: 109554 - DNA, 775 bp, Zea mays
  unsure (1)..(775): unsure at all n locations
  Clone ID: MRT4577_31409C.1
ccggccgggacacagcattgcacacctgcacggtgaacgagggctcatttagccaccgaattccaatacgcaagcacgcggtagtattggtgatgtgagcgtttcagcactaaaccccttacagcgacacgctgctggttcaggccaccgtttgcgctgaccagcacgaaaccgttgttggtctcatcatcaggctctgcgaggaaaaccctagtcagaaggcaagaagctatctttgtgcagtgctgtttgagcagagtaggctaccttcgtcagccaagctatgcttagcagcgcagggcttccatttccgcgcttgcttgtagggctcttcccatagcgcgaaatcctcggatccagagccgttctgcactgacggggaagggagattaattttggagcacgagtaaagaaagagcaggtaaagaaagatactttttttattgggcctcagtgtcgcgttgcagaaatcaaacctttatgagagctgaagtggccatttgcagaagccttgcatgcatgatctgctccactggttccctcctcacgatgctttgcttaagctccttgattaccaaagccaaagtaatctgcccaataggtaatcttgcccagggaaaaaaacagaaagagacagagagagagaaagaagacgatacctggaggtccctgaagttcctggagatggcgggcgttcctgaactgcacctggtggagcgcgnacatggcgaggggaggcggcnagcaggaagcaacccatgaaggcgacgacggc

SEQ ID NO: 109555 - DNA, 183 bp, Zea mays
  Clone ID: MRT4577_3140C.1
cgatctaaggttttatttccgagctgctcagaccaaccgaaccaaacttttatttcggggctgaccgctatatattgaaagaggccaacaagggccccgaagaggacacatattatttttcacagcgggggggcaaaaggagcgacaacaaaaatatttatatatggcgcccaacaagaggca

SEQ ID NO: 109556 - DNA, 172 bp, Zea mays
  Clone ID: MRT4577_31411C.1
atgacaggacaagagccgcactgaattaggtacaccactgtagcctggagagcacctacgccagcgtacaaccataggatccctcgtacactgtggagaagcaccttatttatcaccccgcaccttgggcaatacaaccctgttataccttgccgccataattgactccctc

SEQ ID NO: 109557 - DNA, 335 bp, Zea mays
  Clone ID: MRT4577_31413C.1
aagaaaaaaacataaaaaaaaaaaagaatacaaaaccaaaaaaagaaaaaaaaaaaagagaatgcactaacaaaacgggcagaaggcatggcgccccgcgcccgcgatagccacatacaacgtgtgctgtgtcggcgggtgcttcagctccgacatactcaaggccatggaggtcgacgtgacggacggcgtcaacgtgctctcgctctcccttgtcggcggctcggaggagtactaccgtgacagtatcgcagtgggcgctatcagcgccatggagaacgggatcttcatgtcctgctccgcgggcaatgccggcccgggcgccgcgacgctgt

SEQ ID NO: 109558 - DNA, 613 bp, Zea mays
  Clone ID: MRT4577_31414C.1
gtgataagtttttttattgcatacagaaaagcaagcttaaggctccatcaatcaaaattgggacaaaaagatacttcacgaacgagttagcatattcatagatagtctcccaaaacccaggtaaattaaatcaagataaggctcaagagctatctgcaatggctccaggtccaggaatgcgattcaaggtcgaggacgagtactgcactttgtattcacctttactatcttatgttgcttaccattactttcttgcttattgcatcatgtggaaaatgaccgattgcgcctctgaacatcaaactcaacatcaattaggtcagttataccagctgtaatcttctgacctactcggacaggacccacaccctccggagtacctgttagtatcacatcaccctccattaatgtcatgatggaactgatatagcttatcagaaaaggaatcttgaatagcatgtcgcttgtcggtcctttctgccttagttcatcatctactactgcactaattggggtgaaggtgtcttgtcctttagccaaagtccatggaaggcctgcagacttagcaacagactgaaggtcccttgctgtcatgtccaagcaagtgcataac

SEQ ID NO: 109559 - DNA, 692 bp, Zea mays
  Clone ID: MRT4577_31415C.1
gggtacctcgaggccggccgggaaaagaatacaagcaccaactttcttctccgtcacctgactcacacctccactcacctccggtccaccaacctctgccggccatggcggctgcggcggcgcagaagctcctcgaggcgagcacgaagatcatcggcgtcgggcgcaactacatcgcccacgccgaggagctcggcaacccgatccccaaggagcccgtactattcctgaagccgacctcgtcgttcctccacgctggcgtggccaccgccgccgtcgagatcccggagccgctcgaatcgctacaccacgaagtcgagctcgccgtcgtcatctcccggcgtgggcgtgacattcctgaagcgtccgccatggacttcgtcggaggctatgcacttgctttggacatgacagcaaggggccttcaatctgttgctaagtctgcaggccttccatggactttggctaaagggcaagacaccttcactccaattagtgcagtagtaagcaatgggttttcttcatgtgcttggagttggttggtgtctcaggacagtatgttttatttatttgtgttcgctttttataattacacctcaataaatcaataccatattgaagttagtcaggggagaagtactagtcagtgcggaaagggtgctaaaatataaaaacctcatctttgctgcctt

SEQ ID NO: 109560 - DNA, 464 bp, Zea mays
  Clone ID: MRT4577_31416C.1
gggacaacatagaacttccgttcccattggtaagacccgagccaaatctaggttcgatgattacagcctactacgcgtacatggcacacagcattacacaaagcccgagctctacagatagatgcaccgtgcggacagagttccagctgtccagacctcacccccttagttacagaattggtgaccaaccagcaacacgatacatatcggtgtgaaccatgactttcagcatgttcatccatgaaagacaaacagaagactcgttggcctgctaaaaccgatcagcctggaccacagcgggctactcgaacaccaggcccttcacgaacactgacttatccttccaagaacccaatagggaaccctctccttgcgcatgcggtgaaaagggtgactctctcttgttttaggagctttaagaacgcgctgccaccttcttggactgtcctcatggtagcttccag

SEQ ID NO: 109561 - DNA, 397 bp, Zea mays
  Clone ID: MRT4577_31417C.1
gtgagacatggatccgaggatggatggacctgtaaatgaggagttcccgagacgaagcagacgattgcgtgattggtaggccgtaggcgactaggcgtcgcgtcaggcagtgcgtcgtccttttgccgcctttttttcttctttcgctcgccattggcaagcactgatgaaatgatgacagtgggtgtcaacatcgcagctcattttgtttggtctcatgttgcatcactcgctgttccacgatggcatcgtcggtatggccgggggaaatttgctccatccacaccacgcctcggtatcgtcgtttggcgagtgttgctactgcgccttgttcagatgtatgtgtatccgcttcaatccatatatgttagaataaaacttagtttaattctacttc

SEQ ID NO: 109562 - DNA, 408 bp, Zea mays
  Clone ID: MRT4577_31419C.1
tatagatagtagactatgacgtgcgctcctcccttacctcagctttcgattcgagtcgaggccagagttcataaacataaacccataggagatgaaggaacctgattcctaagatacaaggtattgctcattctctgacacttgacaagcatacccttcgtaaaaacctaaaaagaatgttcacgtagttttgtactgcaacaggcgatggtaccaatgacgctccaacattgcatgaagcagatattatgcttgcaatgggcatagcaagaacagatagagccaatgagagtgcctgtttgatactgcttgacgacaactttacatccataataatacgttcgaggaggagccgcgcgggctacataaacatccaaaaggttgtgcactgttatctgaccgttaaca

SEQ ID NO: 109563 - DNA, 293 bp, Zea mays
  Clone ID: MRT4577_3141C.1
aatgaaaggtttcggccgtttttttcccaatggggagttttttttttttttttttttgggggttttttctttttttttaattttaaattacagaacccggggtgtacacccggaaatttaggagcgggccctggggggaaaacatttttcccaaaaggggggggatttaaaaggcgggggtaatattgggaaaagttttttcccgggggaaaaaatatattcccttaaaaattcccaaaaatattttagccggaagacaaaaaaggtaaacccgggggggcccaaaggggggg

SEQ ID NO: 109564 - DNA, 364 bp, Zea mays
  unsure (1)..(364): unsure at all n locations
  Clone ID: MRT4577_31420C.1
atattatgctcgcacgtgcaaacactcttctacgaaatacattttatttcactcaaattaatatganctccacatctggcgcataccggaaggaaagcatggagtcgtttatgttttattgcccgtttctttcatctaacagcatcgcggttctgtttttagtcgcggtgtccctccgtcttgatcatatatgagcctgtacacacaggtgacacatcttagccggagtagagtctcgtgctgcctaaatagcttaatttcatgaccaagggttacgatccttaatataggactaccatgagggggtgaagttgtctatatgcgcccagagcgaaccctgtctccagcgccggctttgtttccg

SEQ ID NO: 109565 - DNA, 469 bp, Zea mays
  unsure (1)..(469): unsure at all n locations
  Clone ID: MRT4577_31421C.1
aagcgaaagccacccaagcggcaccagccaagaagggggacgccaaaacccaacccccagaagggggacacggcacgagaaggcacgaggcagcacaaccaagcaagaccaagcaaggancccgcacgagacgcggacgagggcaccccgccccacggacgccggggaagaagagagcgaggggacacccagagaggccgcgacgaaggcaagcacaaagccgcaaaggaaacaacgcngggagacagncaccaaacanncgcaaggcacgcccccanaccaccagaaacaagcgagcgacagaacagaagaagagaacaacaccacnggcacacacagaagaccacaaggcagacaagaagaagagcaaggcggccggcaagaagangaaggacanccaggcaaagaaggncaacacacggancaggccagacgggaagaagaaggcgnacgagaagccgacacccga

SEQ ID NO: 109566 - DNA, 570 bp, Zea mays
  unsure (1)..(570): unsure at all n locations
  Clone ID: MRT4577_31422C.1
ggctcctagagtcctgagagcgtaccggcaccactcgaagagggcatgcacgcctgcttgcacgccactaatactggatggatattgctgcttcaaagcgaggaaatatccgtaggcatacaacggatgcactgagagcaaagctccatcaccttagccatagcttgtgttgacttgaaaatggggcaaatatcttcctgaagggatagggagagaggccacgaaacgatctgaccatttgccaacatattggctgcagggcacgtaatgtgcggacaagctaacatggcaccctgttatagccatcatgtaacgcaccagaaccatgtnggatgattggcaggtcgagcgaatccccttgcaatttgcaggggcctaacggcattcactttcccttgtgctgtgccttgctggaaagcttggattgctttgccctgcggaaactgagtcgggggctaaggtgatgcatccaattcactgatcactattgcactgaccacaaaaaggctagtgtattgaagaataacaacttaccacccgcaccctgtacaactttttgtgggggcactg

SEQ ID NO: 109567 - DNA, 263 bp, Zea mays
  Clone ID: MRT4577_31423C.1
cttctttcattttcacgtggtatgctatcttccgatcgcgaggcgtgtttgcaatataatcgtcgttagcctcggagaggaggattggagaggcaaccaaccatccacgacgggatcgcaggagctgatgccccggtcgcggaaagcaacggcgacgagatttcgtgcacgcgagacgcggcagagaaccgacgaggaggacgcgagccgcgtgacggatgatccgcggtcgccactcgctcctcgggcgggaaggcatcggt

SEQ ID NO: 109568 - DNA, 654 bp, Zea mays
  unsure (1)..(654): unsure at all n locations
  Clone ID: MRT4577_31424C.1
agggagagcncgcctcgctcccccccgacataatggtcggtttcgggaagtgggactggagccccctgaaaatggagaacccgttcgccggcggcctagacgaggtgaaggtgcacctgtggcacggggtcgaggacctctacgtgccggttcaactgtcgcggtacatcagcgagaggctcccatgggtcatctaccatgagctcctgagggccggccccctcttcccggtcgccgacggcatgcccgacgctattgtcaggtcgcttcccctcggagatgagtgatcagtatttaggatgcgcggatccaggacttgtgcacttttgcagcttcatcagtaataaaaatacactcggaggccgagatctgtatgatccgtgtccttaaaaaaaaaaaaaaaaaaaaaaaaaaaaaaaacccattggcgatttggacacgatggatcggcttacccaattggcacaacacaacatcggagcggcatggccgacaaaacttgcatatccgagaaagtgacgtcaagtttagaactttatgcacctttttactcagaactatgaagtttcccctgaatttaacttctgatattagagaaccacaaccgcttatgctcttcaatggatcgaacaaaactccagtgtatgtgtatgg

SEQ ID NO: 109569 - DNA, 1685 bp, Zea mays
  Clone ID: MRT4577_31425C.1
attgtcaccaacggcagcgctcgcgttcgtgtacgtttatattatttttttataagggagcaagagggctcggcggcagcggcagcggcgacggcgaccgcgacggcagtggcagtggcagtggcaggctgtcagccgtccctatcttgtgtgtcaagcgcgaactccctatctcgtgtgtcaagcgcgttcgcgtgcgttctaggcacaggcagccgaggcgagccccttccgctcagtggccgccgccggaccgtggacgcagctagcccatcagcccatggcagggacggacgtcgcaggctccgcacgcggctccgatgccgcgctcgggaagacgggcgaaccacccgccgcggcgcgctctggcgcagccaagaaggtggctctcgctctgctagcctccttctcggcgctgctgtacagccagattcagccgccgccgtctaagatccccggcatgccgggcgggcctccggtcacggcgcccagaacaaggctcaaggacggccggcacttggcgtacctggaatctggcgtcccaaaggagaaggccaagtacaagatcatattcgttcacggcttcgactgctgtagatacgacgtgctgaatgtctcccaggggctgttggaagagctgggaatctacctgctgtccttcgaccggcccgggtacgccgagagcgacgcccacccggcccggacagagaagagcatcgcccttgacatcgcggagctggcggacaatctccagctcggccccaagttccatctcatcggcttctccatgggcggcgagatcatgtggagctgcctcaagtacatcccgcacaggctcgccggcgtggcgattcttgccccggtgggcaactactggtggtccggcttcccgccggacgtgttcaaggaggcgtggcgcgtgcagtttccgcaagaccagcgcgcggtctgggtcgctcaccacctgccgtggctgacgcactggtggaacacccagaagctgttccgcggatccagcgtcaaggacggcgaccctgccatgctatccaaggaggacaggcttgtagctgacaagttcgagaagcgaacctatgagaagcaggtcagacagcagggagagcacgactcgctccaccgcgacatgatggtcggtttcgggaagtgggactggagcccgctggagatggagaacccgttcgccggcggccaagacgaggtgaaggtgtacctgtggcacggcgtcgaggacctctacgtgccggttcaactgtcgcggtacatcagcgagaggctcccatgggtcatctaccatgagctcccgacggccggccacctcttcccggtcgccgacggcatgcccgacgctatcgtcaggtcgcttctgctcggagatgagtgatcagtatttaggatgcgcggatccaggacttgggcactttttgcagcttcatcagtaataaaaatacactcggaggtcgagatctgtatgatccgtgtccttaaaagcttcggaatggcgttttgttgtcgatccccattggcgatttggacgatggatcagcttacccaattggcccaacgcaacatcggagcggcatggccgacaaaacttgcatatccgaaaaagtgacgtcaagtttaaaactttatgcccctttttactcagaactatgaagtttcccctg

SEQ ID NO: 109570 - DNA, 565 bp, Zea mays
  Clone ID: MRT4577_31426C.1
atggttcttgcagaaaaaaaaaaaaaaaaaaaaaaaaaaaaaaaaaaaaaaaaaaaaaaaaaaaaaaaaaaaaaaaaaaaaaaaaaaaaaaaaaaaaaaaaaagagggaaattaaaaaaaaaaaaaaaaagggggccctcgggccccagttttggtcccttttagggggggtaaatggccccctgggggaaaaaagggaaaaaattgttccctggggaaaatggtttccggttcaaattccccccaaaaatcgggccgggagctaaaaagggaaaacccggggggcccaaaggggggcccaacccaaaataaatggcgtggccctcacggcccgttttcaagggggaaaacccgtcggcccgcttgattaatgaattcgcccaccccccgggaaggggggtttgggcaatggggcctttttccgtttcctggttcattgcactcgtgggcctgggccgttgggtgggggggagcggtttagcccacctaaagggggggaacacggtaatcaccaaaaaagggggaaaccccggaaaaaaactggtgggcaaagggccccaaaagg

SEQ ID NO: 109571 - DNA, 297 bp, Zea mays
  Clone ID: MRT4577_31427C.1
tgttaatttgtcctggatccaagtagacaatttgatccaagtgatagagcatgggggtttgccctggatcgtgggcccaatctggtgtgacgtccaatgcacagttgtgtgtctattgtattatattgcagtaacccttctcagtgtagtatcatttgtatctaatgctttatccgatgcatgtatggatgtctgaggcagctggtttatttgtttatctttgtttctaatgtgtctttgtttgggcttgttctatattgtgtcttataggtttttaataattcttttaatgtcttt

SEQ ID NO: 109572 - DNA, 740 bp, Zea mays
  Clone ID: MRT4577_31428C.1
ccggcccgggacattgtatttgctccatatgcagtagtacatctcagcgaaacttttacgtactgctccccaggcgactcggccctcgcgtcgtctccccaggcgactcgggggcgactcggcgccgccaccgcccggtcctccccagacctagatcgacggccgctgtcgccgccccccacgcggtgacggcggccaacgaccgggtcgcacaaccgaccctctcgcggctcttcctttttgttttcttagctttctcctcctcttcttctacgcggttgctccatggaggtcctaggagcctgctcctctcttctcctcgccggatctggtcatctattggccggatcttgcggttttggtggctgttgtcactccccacgagttctgctcgggttggggagggtgagaagaggagcggccatggagggctggtctgcccgcgacggtggtgcgaggggcggcagatctagcgccaggcagcttgcttcgtggagtggagcaaaggtggggtcgcgcccggccctgtaagagtgtgggacgtcgcgcgtcagcggtgcttccgttcgcatcccgtgcgcagtcgcgtcccagcggggctcaagttcgcgccgcccgcgtggcagtgcagccggcgcggctccgcggcgcacgcgcgcaggaccgcacgcccaggccccagttccccagcgccggcttctgctccgtcgcgttcatgtcagcaggtactctccctgtct

SEQ ID NO: 109573 - DNA, 750 bp, Zea mays
  Clone ID: MRT4577_31429C.1
gactacccacggtccgcccgctacgagcagagtaataaaaaaatactagtttttttttacactgcaattcatctattttgaaacttgctaccgtctatccgatttttgctattttctgtgctcctattgcctggtccccctatatcaggtcgcgtcgtacgcgtacgcaccttccgtatggcccaaaatacccctgctgctactcttcccactcgctgacatatgggtctcacaagtcagcttcaccttcaaccttcggtcatcctccaccgcacagcgggcgcagtacgagacggttttcagctctagagcaacacgacggaaaagacgaagacgctggagtctccagtaacggaacacttggtgagcccgtttacgatgactctgttgtgatggttgatgacgcctctccacatgcagcgtcgacgacacctcccctgctcccctgcaacaaatggtatgtcatcgccatcgtgatgctgaaccgctagttgtctcctgacgactagctcgacgaccttcagtggtggagttggagatgccagcaacatataggacagagaggtacaagtaggtgcccaacttgctctcgttggccgtggcggtggtgagatgctccggtggtgtcgagggagatacaggagccatttataagcagaataagtctatgtaaccctcactttcaaaaccgtttgtttaacctattcagctttgcaaaactagacaaataatgccatagatagttttagt

SEQ ID NO: 109574 - DNA, 310 bp, Zea mays
  Clone ID: MRT4577_3142C.1
agctagctaggtactggatgcagctgcagtgcgctactgagactactcgaggattgttcaataagctagtcggctagcacggaggctcatgtaggagtaaggcattcgagccgacggtcgctttcagacagggtactgcgggtccgttgatagtctagtagggcagtgggctattgccggggaggcggacattaatccaggacaaccatcaccgtggtgctcaggaagctgtatatactggattccaggaaggtggtgaccctatgtgatggatcatctgagtgcgtattctatgggatagaaagacatg

SEQ ID NO: 109575 - DNA, 205 bp, Zea mays
  Clone ID: MRT4577_31430C.1
ggctcgagctctcccttatcaccttctagccgcgcctgctccttttcagagacttcgttatcatctaattggcgcttgttggcccgtctgtagggtacagcatccagagcgcgtacatggcttgcgccggctcgaaccgagcgatttctgcgcaggaactcgcgtctgagcttgcgaccatatccgtgaactaggtcctcgcgtg

SEQ ID NO: 109576 - DNA, 1345 bp, Zea mays
  Clone ID: MRT4577_31431C.1
accctcggttccggccgtcgctccctgccggatctctgctctgctcgcgctgcgagttcccctgcggttcgcccagccgggccgaatcccatgtagactccatccatggctgctgcgcgcagccgcgattctccctggagctcggccgcgacctcgccgtcgttcggtagctccagcgcctctgctcctccctcaccgtagccccaggtcgtcgagcccctgttcatttccctgcgtgtgctgcgacgctcggttccagctcaccagtcaaattctctgcgtcgcgcccaactcggatttcgccggccgtcgttctctaacccatgtgccggtcggtgtcgtatagttttagtttgatcggctcgtcgtcgacttcgccagttgtcatcattcatcgtcgcaccgttcgccgtcgagtttcgctacccatcgcggagttctctgctcgccacaacgtgtcgaacttccgcgtcgaacttatctcttccgtgccggttgtcgtctccgagccgattcttggtcgtcgtagtatttttagctatcccagccgcatctgtagtcatcaagcatgtctgttcccgtgaactcgcccctggtgtccactctgtttttggtccgcgcttcctttagttcggccaggcggggcatcgttccgtgctgtgctcgcccaagtcgccactgtcaaatcgtcggagtcgctcaactcaccaatcgtatcttggtcagtcatcgatttcatatttatcatggtcctcacgtcagtcgtccctattcgaacttgctagctcgccgactgaccgtcgtgtaccttgaaatccctcgtcggccgacctcgcgacttagttcgtcgcgtcgggtatgtagctatatatatgccaccctcctatatcatcgtcgaagctgtcatcctctgctcgacccccacctcaccagctcgctccaaacacgatctcgtcgtcgtttcgtgtgtcatcaagaaatcccaagcgtcggatgaagacggagccaacagcatggtgttcaccaagtgcacgacaggaagctcgagccgggatttatcagcattcgtacgagtattgggtcgcgtttggtgctggtgagccgatttataatttttgtacgtttatctgatgattggattaactagaattattagtcgtaataatcctcatatttagcgcaggcgcgttgtggtagtgtaaaaaataagtgaagtacgataggtttagtaatgcgaaaggtagattaatttagggatatctaaacgaggtggcgacataaaggatagatatgatttagtatttcatatagctatttgatgaattttgtcattgtcaattgcact

SEQ ID NO: 109577 - DNA, 373 bp, Zea mays
  Clone ID: MRT4577_31432C.1
acccactcgtccgcccacgcgtccgctctctacaagtccatatttcccattcacacacactacgcacgcacacgggagacatggacgctcagccaaagcatccacacacagctctcttcctactacacttcatactagctagtctctgagccctctagactctagccacttacacacgcgccaacgccaataatttccataacatacaaagcaacagcaattgcgaagacttcgacgagagatgcaagatgcatggactactgttctccaaacgacacgcagcagccacttaagatgcatgctccgccctaccctcagaatgacctgagcattcgattctacacgttctaacacgacctagaccaattcatca

SEQ ID NO: 109578 - DNA, 2006 bp, Zea mays
  Clone ID: MRT4577_31433C.1
ttcccccgcacgctctcctccttctgctgctgtgcctcccactcggagatcatcgagcgggcgcagtcggacatggtcgcggtcttcagcttgagctggtccaagaaaaaaaaactgggacatacattatgtggggtacatataagtagcaaaaataaacgggaatatataagcaacaaatacaaaactcctattaatttcacatctatctgacgcgcaccatgatcgaatgaaacctacagtcgcttgaggagcatggggagcccatgccttgggcgcagggtgatcaagtccatgggcgcgtggacgtatttcggggacagctccagtgcaaacctctgcaggatcatggcgaccacggcctttgcctcgatcatggcgaagttctggccgatgcacgaccttggcccgctggagaaggacagcagcgcgttggggtgcttggccgccctcgtcaccccgttctcgaacctctccagcctgaactcgccggcgtcctcgccccagacctccttgtcgcgttgatcgtggcgagccgaatggtcaggatcgcgccctcgggtacccggatgccgccgaggtcgagatctgagcccgccttcctctggatcagggacaccgggccgtacagccgcagggtctccaggaggaacatgttgacaagcttcagcctgttgagcgcgtcgccggtggggacctcgtcgtcgccgcactcccgcctgacctcgtcccgtagcctgtgctgccactccgggtgcgtgctcaacaggaaggaggcccaggtgagcaggtgcgacgtggtgtcgtggccggcgaagaagaaggtcttgcactcgtcgacgatctcgtccatgctcagcgtggtcggcgccatctcgccatggtgctccggtggcgacgcgcacgcctccagcatgagcccgagcaggtcgttcccgtagccgccggcggtgtccttgctggcgaggcgggcctcgatgatgtccatgagcatggccctcacctgcctgtccagcttccgtgtcctgagattcttctcggtcgggaggtacttgagagctgggatctggacgttgaaaatggttgagaaggcgatgtgctgcagctccctctgtgccaggaagactcgcttcccctcgttgtagctgctcccgaacgcggtgtgcgagatgacgtcggcggtgagctcctcgaagcggctgctcagctcgacctccacgtggacgtggccgccgcgcccgctctgatcctccttctgcagctgtgcgtcccactcggagatcatcgagcgggtgcagtcggacatggtcgccgtcatcagcttgagcttgtccatgttgaaggccgggtggacgaccttgcggtggcgcttccagtcgtcgccgtcggtgaggacgaggcccttgccgagcaggcgggagatgtgcgggttgatgaggttcttggggtagagcccggtgcggtcgaagagcacctgcctgaccacgttcacgtctgccacgcacacgttcggcctcgcgccggtccagtacacgaacgtccgcccgtagagcgcgatccatttgcggagatggggctgcaccatggggatgaagtcgtggtcgtcgacgtccagcgtgacggcggcgccctcggcgcggagccgcttgatctcgccgaggctcccggtgaagaacgtgtagggcggcccgcgcacgccctgcgcgcggagcctccgggtgatggcgtaaggacgccacacgaggtgaaccagcgcgttgaacgcccacgacgccagcacggccgcgacggccgccgccaccatccaggccagtcccatggctcgcgcgcggtcactgccgatcgagctgccgcctgcctctctcagtcagatcggggtctgcacaaataactgccgctgagctaactaggtcgcttggttttcttgctgggttgaagggaagcgggatttttgctgctgacgcttttaggaatgagaaggtgaggttttttggtgtcccggccgg

SEQ ID NO: 109579 - DNA, 263 bp, Zea mays
  Clone ID: MRT4577_31434C.1
agaaaaaaaaaaaaaaatttaaaaaaaaaaaaaaaaaaaaaaaacaaaaaaataaaaaaaaaaaaaaaggatggccgttctaaaggaataaaacattaaataagcgtggatggcagggcagatcgattctaacttaaaaaaaaatttgaattcattggccttcgttttaaaccgtaattacagtcaaatgcctgtcgttattcaacttaatccctttgaaaaacatcccgttttcaatataaggcgcattgctgaaaatgccc

SEQ ID NO: 109580 - DNA, 386 bp, Zea mays
  Clone ID: MRT4577_31435C.1
aaaaagctctcgatctcaccgacacctgaggaacaagacgacgctgcgcgtccgagcacgtcagcgggatcgcgtgccacaccaatgctgagcttgacgcccacatgaccaagggccaggaagccggcaagctgctgatcattgacttcactgccaactgccgcgtgccatgccgcgccatcgccccactgttcgacgaagccaccaacaagttcactcaccacgtgttcatgaacgggcacgtgcacgaagtgaccgaagtcgccgcggactacgagaccgaggcgacgccgaccttccacttcggcaacaacggaaacaaggtcgcgaccatcgtgagcgccatgaacgaggagctcttgtcccagatcgacaaggatgccccg

SEQ ID NO: 109581 - DNA, 193 bp, Zea mays
  Clone ID: MRT4577_31436C.1
acctgcgacaccagataggtgagacagcgatttcatttttcgttcctctccccggcggtgctaggggggcacacccggagggggatcagctatccagtggaacttcaaattaccggcggcagctcctagccaattgctcctttccggtaaccacccctttggacctctgttctcatttggacgcatgcaacaa

SEQ ID NO: 109582 - DNA, 180 bp, Zea mays
  unsure (1)..(180): unsure at all n locations
  Clone ID: MRT4577_31437C.1
gtgggattcatgcttgcatactccaaatctttggatgagttcctcagaattcacnatattatgagtatgtaanngttccattctttgagtgacgtgataatcttggagagatagggatctgagattatatgtgttaaagggtccatatcatattataagaaaaacagggttggagttgta

SEQ ID NO: 109583 - DNA, 948 bp, Zea mays
  Clone ID: MRT4577_31438C.1
atggccattcaagaagagctcaacaacttcaaaagaaatgaagtatggaacctagtgccacatccaaagcaaaatgttgtgggaaccaagtgggtatttcacaacaagcaagatgaatacgggatggtgataagaaacaaggcgaaacttgtggcaaaaaggttatgtctaagtcacaagtttggattggaggagacttttgctcctgtagctaagcttgagtctatccaaattttattagcatatgtttctcaccattcctttaagctttaccaaatggatgtgaagagcgcttttctcaatgagccaatcaaggaagaagtgtacatggagcaacccttggcttcgaggatgacatgtatcacgaccatgtgtataagctctctaaggcactctgtcgggaaaccggatcctactcttttcactaagaaatgcgatggtgatttgtttatatgccaaatatatgtcgatgacataatatctggttctactaatcaaaagtcttgtgaggagtttagcatggtaatgatgcaaaagttcgagatgtctataatgggcaagctgacatactttctaggatttcaagtaagacaactcaaggaagacaccttcatctcccaaatgaagtacacacaagatttcctcaagaagtttgggatgatggacgcaaagcccatcaagacaccaatgggaaccaacagatgtttggacctcgacgcgggaggtaagtccgtagatcaaaaggagtctacctttgacataattggatacttagactccgactatgccgagttcaatgttgatagaaatagcacatcagggacttatcagtttctgggaaggtcactggtgtctttgagcactaagaaacaaaatttcgttgccctatccaccgttgaagccgagtatgttgccgtaggcaatgttgcgcataactactttggatga

SEQ ID NO: 109584 - DNA, 1190 bp, Zea mays
  Clone ID: MRT4577_31439C.1
gcttttcctctcgctttctgctcaatgagtgagggggcaccccgcacaccgcacacactaatcttcccgtaccatccatgaaaacaacctgcaggcaagttttaacaggatggggagacgagatgcaaaagcataaccatgtacagctactgcaagatctatgctcgcagaccagtggttggtcacacagctacgagcatccgccttagaacgctggttccttaaaccaaggatcctccttaacaggtctaaactactgagagcatacccaactagacagaaaagaaaaaaaaaactgcggctgaaacgatgctatagcctgtaagaactcggttactcaggcgccatgcgttggtttcagcttctggatccactgcatgagccgcttcttggggtcctggcaggtgccgctcttctgcgcgtcgaggcagccaccctgcgagaggatggagtgggactgctccaggactttgacgatctgccagaagtcgggcctcttgtcaggctgcaaggcgcagcactgctcgatcaggggcccgagggccgatgggcattctggagaaatcgttggcctcaagttcctgttggccactgcgtaagccacctggaaaggggtcaggttctcgtaaggaactctaccggacaccatctcccacatgaccagcccgaagctgtagacgtccaccttccggttgtacgccttctgcttgatcatctcaggcgccatccacctgtaggtgccttcatcctccacaagcacgtcacacaaggtctcctcgcaggcgataccgaaatcagcgaccttcacgcacgagtcctcgtcgaagaggatgttctcgggcttgatgtcgcggtgaacgatcccttgagagtgtacgtactccagacctcgagcgatgtcgagagcgatggatatggtcttctccagagggattgggtggttctccgtgttgtttaggtatgaccttaacgagcctccgggaaggaactcggtgatgatgtaaaaaaccggtgggcatttgtaggctgctacaagatttgcggcaggccggtgttgcgcgcggagaagcggatcagaatgccgggctcccgccgccgctcttcccgctccccgctccaggtaggcgggcagaggaggagaagcggatcgaggccgaagaggaggagcctggccagccagctccggccgg

SEQ ID NO: 109585 - DNA, 495 bp, Zea mays
  unsure (1)..(495): unsure at all n locations
  Clone ID: MRT4577_3143C.1
cgactctaatgctgagaagaggcctagcatggaccaggtggtccggatgttggattctaatgaactcataccgcaagaggtttgaatttgtttatttaattccatgtagaactgtcatagtctaggtttattgggtacgggggaggtggctagggccatggagaccactcgcatggctaaaaaactcaatttgtagggttaagatagctcctaggtattgtattaggctatctccagcagctctcctatcttattccatatcttatctgttatttcaatctccacactgtaaacaatgtcatctacagtgcacgactatatacacgatctgctggacatagacttaataagaccttctcacaccccgaatccctaggtattgtattaataagtcctcacaccttgaacctctaccctacccatgcacaggcctagcatgaaattcgctcccacgngaggtcaaactcaggacctgagaggtatactaagatcacc

SEQ ID NO: 109586 - DNA, 239 bp, Zea mays
  Clone ID: MRT4577_31440C.1
cggacgcgtgggaaaaaaaaaaataaaatgccactgctctgaaataaaattacctagacaagagggtcctccggtgggttggcccctcagagttttccaaaaaaaaaaaacatctttgttgggtcgtgcccatgccctgcacatgttcgaaagcgcacttggtgcataggtctatgactgcaacaacatggtggagcaggagctgcctggaggcgagcttcttatctaccacagctttt

SEQ ID NO: 109587 - DNA, 646 bp, Zea mays
  Clone ID: MRT4577_31441C.1
gtatcggaggatttgacttctcttctctgctctcccccctctcgtcgggtaagtcgcaggtatggccaccgggtaatcggttcagatctcgcgctccttgtttcgctgttcttcgtttggttgtaattccaggcgagcgttctgtttgggttgtgctgctccttattacgttgatgtcgatcgaggcctagttccggtggtttgtcctcctctgttccgttgatgttggtatcgtcttctgaacctcgctgctttggtttaggtcgcggctaatctattttgctttgacttctgatctgattgggtcctggctaatccatcatgctctgattgcgatatgttttagggtcgtggcttatccatttttatcctaattgctgatttgattcaaggttgtcaattaatggaggttatttttggcgagagcaactagttgtgttcgtttaatggggattttatttaaacgtggagcagtttgtttgctttcatctctgttcgttacggtggatcggtgtggtcagcttagttttctttggagatgtttgacatgatctgaatgagagattgaagtttgtggtttggattggcctgttccattcaaggtgattcattaatgttctgcgtacaaagtgctttatctttttgc

SEQ ID NO: 109588 - DNA, 607 bp, Zea mays
  Clone ID: MRT4577_31442C.1
ctcgaggccggccggggtacccgctacccaccgacagtctctctagcctcgcttactcccaacacaagcccgatcatcttgttcctgtgctgcgtccagatgtacatgcgcctcctgctcttcatcgccgccatcaccataccgtccaccctcttctctatcaagtttggcttcacgtgatcgcaccgaatccgccctgtgtgcgacagctcggcctcactcttctatccagcacacttgtaccaggtttgcctcatgagggactgaacttcactatcctattgatgcttcgcctaggctcatctatcgagctacaagaggatcaaccttagtgcataatcaggttccgagcttaacatatacactgcaggaatgcgctcacaacattcttgaaggattactcctaccactgataaattcaccagctctacgaaaaagatgtgagacgtaaatcgagcgacctgtgctatgtgaagaccaccaactactacgtcgcggcttaccggtctgcatcggattcacgaagaggcgccctgacctgctcgagacaacctactgtgctcaggaatccaatatccgcccaatgcaacaccaagatgcactgaga

SEQ ID NO: 109589 - DNA, 488 bp, Zea mays
  Clone ID: MRT4577_31443C.1
gggcgagacagcaggaacagcgcagcgccggcgccgcccgccgacagcagcaggaacgccgtcgcggccaggcaggacgccagcgcggaggagcagggggacggcgggcgccgaggcggaggcagagggagagggggacggcggaggccctcggcggggtcgtagtcgccgtacacgcgtgggtgtggcgacggccgaggacgaggaggaggaggaggcggcggcggcagcctgctgctgctgctgctggcgctggcgatgggcgggtccgctggcgatgcttcgttgctgtgcgagcggcccggtggcgcgggcggcggcatgaagaaggggcggccccgatccgctggtggtgggcggtggtggtgccccggcgccggcgccggccccgctggtggtggctgctgcctggtaagttccccggcgccggggggctcgcggcggcggcctgtgggcaggtgatgcatgtgtgtggaaagctaagctat

SEQ ID NO: 109590 - DNA, 347 bp, Zea mays
  Clone ID: MRT4577_31444C.1
gcaattagctcatctactccattgtgtagaactcgacaccatgaacgtgcggggcgtttttcttgctctcctggctctcactacgagcgcctcctccagtacaagcggcggctgtggctgccagacaccaccgtttcatctaccgcctccgttctatatgccgcctccgatctatctgccgccgcagcagcagccgcagccatggcaataccccactcaaccaccgcagctaagcccgtgccagcagttcggatcctgctgcgtctgcagcgtaagcagcccgttcctaggccagtgcgtacagtttctgaggcaacaatacagcccggcggcgactccctacagct

SEQ ID NO: 109591 - DNA, 963 bp, Zea mays
  Clone ID: MRT4577_31445C.1
ccccgcgtccgcggccgctgggcggctataaactaggttagacgtcgagcgaccggccccttgcttctctcccccggcccgcccgcccgcccgctcgctcgccgctggatcagtttcgtggcgctttggagcagcgaagtggttgctgtgcttggtatttctagtgcgtagtatcgccatcagcgctcaataatactactcctcttcctctatgctgcacgccccggcccctttgttttgtagctcttgtcagcgaaccttccccctgaaaaccccacccacccttcctctccgatcctcctagtagcgcctcacttgcttcattccgatccattccaccacccatctccctcctcagctcccctctccgctctccctccctcgctcgcgctctccacgcggatcaccggaggctagctagcaagctcgaccggcgcggccgatctagctcgcgcttgttggccgcttcagcttagcagcggcggcacgtcgtcaacctgtgctgtgagaaagactagtagagagagatacgtgtaaggatggctggcgcggggggtgcgacggctgtgaagcagccggcggcgggggcgcccgacgctggggccagcaggagcggggtcggggctggcgccgccggggcgccggtcgccgacccgcgcgccgaggcgctgcggtgcccgcgctgcgactcggccaacaccaagttctgctactacaacaactactcgctgtcgcagccgcggcacttctgcaaggcgtgcaagcgctactggacgcgcgggggcacgctccgcaacgtccccgtcggcgggggctgccgcaagaacaagcgctccaggagcagcggcgggcccggcgccggcgggaggaacgggtcctccgctgctgctgctgctgccgccgccgccgtcgtcgtgacgttctcctcggtgcctgtgacgctggccctgccgctgtatacgg

SEQ ID NO: 109592 - DNA, 362 bp, Zea mays
  Clone ID: MRT4577_31446C.1
cttcaacatcaattatctaactccaaaatccatgaagctggtgcttgcggttctagcctggattgctttagtgtcaagtgtgccacggacacaaacaggccactgtgctcacaagctactacagattcatgagctccaacatacttcacaacaacagcgtccacagtatctgcaacctcaattattaacacatcatggatagcagctgcaacacgcaactgcgacagtatctatagcaccactgatacttcaacaataaccagaagtacatgtgcaactacctctgcgacatccattgcaccacaaccatcaacgctcaccacctacaacacctcgtcctagctgtgcttgctgactactct

SEQ ID NO: 109593 - DNA, 115 bp, Zea mays
  unsure (1)..(115): unsure at all n locations
  Clone ID: MRT4577_31448C.1
catgcctatgcatatagtaaaacccaggcccatganccngnaggcaggggnncgtctgcaggccctgccnaatgacctgccggcctaggcnatgtganttnagttgccaccacct

SEQ ID NO: 109594 - DNA, 498 bp, Zea mays
  Clone ID: MRT4577_31449C.1
cgccgccactgtccggccacagcctaacgctcttcgctgtcgttaccggtctcgcgcagggcggccccggttctggtgtttggcgtcggaattaaacaaccaccatgtcgagcaaaaaggcaaagaccaagaccaccaagaagcgccctcagcgtgcaacatccaatgtgtttgccatgtttgactagtcacagattcaggagttcaaagaggccttcaacatgattgatcagaacagagatggcttcatcgacaaggaagatttgcatgatatgcttgcttctctagggaagaatcccactgatgcataccttgatgccatgatgaatgaggccccagggcccatcaatttcaccatgttcctgaccatgtttggtgagaagttaaatggcacagatcctgaagatgtcatcagaaacgcctttgcttgctttgatgaagaagcaacaggcaccattcaggaagattacctaagagagctgctacaaccatggggga

SEQ ID NO: 109595 - DNA, 396 bp, Zea mays
  Clone ID: MRT4577_3144C.1
aacacatgcttcagcaacgcacggaagccagctcttgtctgttccgactgcttctccatgcgctcctccctgctgccgctcgcgcccagctccatcttctcctgagcgcccagccgaggtccctgtgccatcgccgcgctccagctccatctcgccatggccgccgcgcctgctccctggccggcgctcggcttcgaactcgccccatctccctggtcgcgttggttttctgggcgtgtctctcttccctgctggcagccacgctaatcttcctggccgcgacctcgctttgctctctacgtcgctgttcgccgggtcaagcctcatgttgtcgcgtcctatttcctgctcgccagtgtgccctcttggctcgctcggctttaagtcccaatcgcg

SEQ ID NO: 109596 - DNA, 821 bp, Zea mays
  Clone ID: MRT4577_31450C.1
atcttatcttcgaacagccttggctacttcaggtgaaagcaactgctggttagtttgacgacaacgaccaacatggatcaaaccaccagtgttgcggcatgtctcaccatatcgattttctttctcaccatcaaaatgatcaaaagaagaacgctgcaccaagagggaccttcacttccaccagctgtgagtgttgtttcactgtcagcatatctgcctacatttctatccaagggcctatctgccgtgattcaagacctgcacacaaagatgggtagtgtgttcacaataagtctttttgggctgaagaaggtgaccttcctggtaggaccagaggtcacagcccatttcttccaaggctcagaatcagagatcaggcagtccgatatctacaaagtcacggtgcctgtttttggccgaggggttttgtatgatgtggacttggctactaggagcaggcagattagcttttgtctcgattcgataaagccaatgaacttgagaggccacgttgattccatggttaaggaagtggaggactacttcacaaaatgggagcagcatggtgtagttgacataaagcatgagatggggaacctgatcttgctgatcgcaaatcgatgcttgcttggaaaacagttccgagagaatatgtttgaagaagtatccacactcgcccatgatatttttgataatggcttccacttaatcagcctcttcttcccatatctccctatccaccacaccatcgtcgtgacaagctcgtgctaagctgggagagatgatccatgaggtcgtgagatcacgtaggagttcaggcc

SEQ ID NO: 109597 - DNA, 310 bp, Zea mays
  unsure (1)..(310): unsure at all n locations
  Clone ID: MRT4577_31451C.1
attgggtggtggttttttttttttgggtttttttttttttttttttttttttttttttttttttgggcaattttaaaaaaatttttattccttttgaacaggaggggaaaatttatttttttttgcctgtttgcctaaaaaaaaggtttaaccttgccctaagggatttgcttcctatgaaccaattttaattagactttttccgggcatgccnnttaaaatgaaaggttttttgggacccctggacatggatttccaaaaaaatttgacgacactggcaccctgaaattgttaaattcaatgcaagcct

SEQ ID NO: 109598 - DNA, 143 bp, Zea mays
  Clone ID: MRT4577_31452C.1
caagcctcaggagtgagtcgtatcattcgactccatcgctgggtcgttcaccgccgcctcaggacacggcgtcgtaacgggtgacgcgctcggcgcatgaactgcagaatacatggacgggttcgtcatcgggccacgctcga

SEQ ID NO: 109599 - DNA, 875 bp, Zea mays
  unsure (1)..(875): unsure at all n locations
  Clone ID: MRT4577_31453C.1
cctcgaggccggccgggccgggacccctttcttttccgttcttctccataccccaatcactgctactcagcagccaactctttcgcaaccaaatatttcttctggcgttttggggtttgcaaaccgctatcgacattggagttggagcagaatgtgatctgtccaattcttctcttgtcttatttttggcgtgctttgctcttctttccccctatttcctgaggaggggttcccgtcttgatctcttgcgtttagtgtggcttcgaagagttagcagctgccatggcacagaatgtgtgggaggcggacaagatgttggattcctacatttatgattacctgttgaagaggaacctgcagaacacggcgaaggcattccaagccgaaagcaacgtgccttcggctcctgtttcgattgatgcgccaggggggtttctcttcgaatggtggtcggttttctgggacgtcttcattgcaagaacgaacgaaaagcattctgattctgccacttcttaccttgagtcaattaaagcacgggagcagcagcaacaatcgcaacaccagatccagacgcagcaactctcgctacagaggcatgcgcaacagcatccgcaagagcagcagcaatggcggcagcagaagcaacagcagcgcagcgaaaacactgattttccaactagtgcccagaatggtactgttgctgctgatccaccagcgcgacaaaatgatacaactgcaggtactttatctgcaaaaatatttgaggatagaatgaaaattactgnttcagagggatgtttcagaagagacttcaatgaaagcaaggctcactgaaaccatttgcccattactggaatcaaacccaactacatgct

SEQ ID NO: 109600 - DNA, 619 bp, Zea mays
  Clone ID: MRT4577_31454C.1
aatttcccccactcttcccagttccctgatgctgccggtgaagagggtttgggggtgtggacctaacatttgtccggccgatctccacgtcaaagtcgtcgcttccgttccgttcttcttccactccactccacatcactgatcgagatcgtactcaatgctctagtactagtaaactccacgagcacgctgccacacgcaagaatcgaagctcttctcctcgatgccaatgccagggtcttcctccgcgaggctcgtccacctgctggcgtccgccttgtgctgcgccatcctcctctgcgccgacgcgtcggtgcacgactataccggcgagcggttcgtcggcctcggcaacgccttcgtcctcaatggcggcagcgagggcgtctacgcctcccccgccgcggactccttcatccgattcgagaaggtcgcctttaagaggacgccggagtccgctgccgcggccgggaaggacggcaaccgcacggtcacaatcacggcggtcatcctcgaggccgcggaccgcggcgcggtcgggggctctgatttcgtcgccggcggcgcgcgcgcgctctgttgcacgccggacatggcgaagcggggcgcgtgcaccgag

SEQ ID NO: 109601 - DNA, 324 bp, Zea mays
  Clone ID: MRT4577_31455C.1
cccgtccagcggcaggagggcctcctgagaccggcgcaacgccttctttgtggccatccacgactacatcgtaccgccggatgctcgcggccgcagcagcaggaggaagcgccccgagtacgggactccccagccgccagggcccaaggcgtactgcataggccagaacaagcgcagcaactgcaggcgccagaagaaggtgaacccgtattgcggcaagggcggaggaggctgcccactcccaccgaggccgcccgcggacgacaagaaaccctgcagcaggaccagcatcaccaggggctcccttgcgaaaccgatgccctt

SEQ ID NO: 109602 - DNA, 156 bp, Zea mays
  unsure (1)..(156): unsure at all n locations
  Clone ID: MRT4577_31456C.1
gcggcggatctccctcggcgccgcggcaccctcgcgtctccgcacgccggatcggacggaccccggccccctccttcccaactnccaacgttggcaaagaagaggaagggcgtttcctaaaccaccataaacctgccagcatggccccgcctgccc

SEQ ID NO: 109603 - DNA, 517 bp, Zea mays
  Clone ID: MRT4577_31457C.1
aaatagggcccccacaaaatatcataaaaaagcgtggggaaacaacacatacataaaggggctctaaatctaaacaaaaaaacaacggggtacactaaggggaagcccaactttatatgaatacaagagtccacacatttgggggcaccaaatttgagtttcattctatgggttcctgggcaaaaaaaaggggaaaactagacatagcaaaaagctccaagcaacacgggggggggctcgaagctgcccttgggcttttccctgtgcttgagcacacccacacgcccgaggttccccccaccgggggccatgaccacgttgccgaggtgaaacttgaggaaaaccatgatcttgtggggctcgagaacttgagggggtcgctggcctcgaggagcgggtcggggtagcggatggggcggccgccataggggtttaggggggggatgcctttttggccaaaatgaacagacctcaccttgtggagcttgaactgattgggggaaaacagaagcacctt

SEQ ID NO: 109604 - DNA, 288 bp, Zea mays
  Clone ID: MRT4577_31458C.1
ctctgcgctttctgccccctcctccagctactgcgggatattttctccagcgcctccggtgtggctggtccgaccgccgcacggttctctgccgtgcaagattcgccgctcagttttcgtggagtcggtagttgtccgtggctcggccatgtgttcctgaaacgggcctttgatgccagtggtgggcgcccacgctctcctgccgacgaggacgagccgttctttgacccctcgtggtaccacctccaggtcgtgtatgaattgctcctacggttcgtcatgtccccg

SEQ ID NO: 109605 - DNA, 1980 bp, Zea mays
  Clone ID: MRT4577_31459C.1
tttttttttgcttttggccggccgccgaaaactccaaaagctctgcgctttctgccccctcctccactcctcgagatcccatccatggtggcggccttcgcacctcgcccccggatctgagcccctccagctactgcgggatattttctccagcgcctccgcttcgctggtccgaccgccgcacggttctctgccgtgcaagattcgccgctcagttttcgtggagtcggtagttgtccgtggctcggccatgtgttcctgaaacgggcctttgatgccagtggtgggcgcccacgctctcctgccgctatgtggaagcagtttctcggcaaaatctcgcggaagtcccccaaatcaggcgggcgcgggggctcgcggccggcgaagtcgccgtcgtcgcgtggcgccgccaatggggcgccgccggagctgagcgcttcgtcgccggcggcggcggcgtcgcccttccccccgccgtccggggcggagaccagggaggacgtgttcctccgcaagctcaacgtctgctgcgtggtgttcgacttcgcggccgagcgggggaaggactcgccggaggtggaaaggaagcggcaggtgctcgtgtccctcgtcgactgcgtctctgaggcggaggagcccctcacggaggcgatgctctcggcctgcgtacgcatgttcgccatcaacctcttcagggtcttcccgcccaagctccggtccggtgccagtgccgccaccgacgaggacgagccgttctttgacccctcgtggtaccacctccaggtcgtgtatgaattgctcctacggttcgtcatgtccccggtcgtcgatgtcaaggttgctaggaagtacatggacaactccttcatctctaggcttcttgaccttttcgattctgatgatcctagggagagggaatgcttgaagacagtgctgcacaggatatacgggaaatttatgggcaatcgcccgttcattcgcaaggctgtgagcaacatcttctataggtttgtgtttgagacagatcaccacaatgggattgccgagctactggaggtgtttgggagtgtgattaccggctttgcgaagccattgaaagaggagcataagttgtttctatggaaggcattgattccacttcacaaaccaaaaacggttggagtatatttaccacagttgacatactgcattacccagtttatcgagaaggaaccaaagctcacagggactgttatcagaggcctcctgaagtactggccggtgacgaacagtcagaaggagatgatgttcttaggagagttggaggaggtgctggagctgacagaaatggcagatttccagaagtgtgctgttcctttgtttcgcaggatcgcacagtgcctgaatagctctcattttcaggttgctgaaagggccttattcctgtggaataatgaacatttgttcgacctgatctcccaaaactgccaagttatcctgccaatcatctatccagctctggagaggaatgcccgttggcactggaaccagtcagttctaaatgttacaatgaatgtcaggaaaatgttctttgacatggatgagagattgctgctggcttgtcagaccaattttcaagaggaggaaaagaagcgggctgcatctgaggagcgaagaagacttgtgtgggagcatctcgagaggaatgccgcatttcatcctgtaaccggagacattggctttgcagttcctcctacatctgctcctctggttgctcccactatgacatgattaataatgggctcatatgtaattcataccgcctgattgttagctaggtttgggtgtttggtgttgccccaggaattttgttgcctttgtaagccccttgtgaagtctgtaattaatagatgctggtttgacaatgaatgcttgattctttggtgtactctcaagttatggtcatatctttgtatctcaagataatgcctagttctactt

SEQ ID NO: 109606 - DNA, 470 bp, Zea mays
  Clone ID: MRT4577_3145C.1
caaccccaccacaaataaggttaaagggaaccccgccccagaaaaaaaaaccccggcccattttagggctaatttaagggcctaacccggccggacccaccccaaaaaaaatgaaaccgggtttaacaaacagaaacgggggagttagaagggccaaaaccctgggaccacccaactgggaaattggggaggggaaatttgttaaccccggagcggccccccgttgggggtcccacggttaaattttggccctcggttcctgggtgctttccctaacggggctcgggttcgggttcctaaaccccccgggtaaaggggggcccccgtctttgggggggttggggggtttttggttgctccgggggtggcccctgcccttagggaagaaggggaaaaaaaagccggggaaatcgggggggccccgtgcccggaacaacctaccggggggggggtagggcctcggcctgggg

SEQ ID NO: 109607 - DNA, 264 bp, Zea mays
  Clone ID: MRT4577_31460C.1
cacgcatctacgatgagtcggtcaacaacgacgagatcgccgctgacctcaaggagcacgtcatcaatcacgtgatgcctgataagtacctcgacgagaagaccatcttccacgtcaagcagtctgggcgctttgtcataggtcggccttacggtaactccggtctcagcggacgcgcgatcatcaatgacacttcccgccgcttgggaacccagagtggtggctccttctcacgctgtgacggcacattagtcgacggcagtg

SEQ ID NO: 109608 - DNA, 605 bp, Zea mays
  Clone ID: MRT4577_31462C.1
tgtttctatggaaggcattgatttcacttcacaaaccaaagacggttggagtatatttaccacagttgacatactgcattacccagtttatcgagaaggaaccaaagctcacagggactgttatcagaggcctcctgaagtactggccggtgacgaacagtcagaaggagatgatgttcttaggagagttggaggaggtgctggagctgacagaaatggcagatttccagaagtgtgctgttcctttgtttcgcaggatcgcacagtgcctgaatagctctcattttcaggatcagctgggtcgacgatgtcagaagatcacgagcagtcgcgtgaagacgcttcccaaaaaccttattcgccctctcccggtgcaggatctagaagacgaagggttccggagacctgctctcctgatcgcagatgcacctctgcggtcgggacgaagggaactaaaaggcggctcagctatgaagagaggcgaaagcgaactgggatctgggatgatttggaggctggctgccgggctccttttatagggccgagtccgtgacccccgtgcttatccacccacgaaaatctcgcaatcagttgagattttgtag

SEQ ID NO: 109609 - DNA, 1798 bp, Zea mays
  Clone ID: MRT4577_31463C.1
ctcgaggtcccggcccgggagtctttattcccgcgcaaccatcatgcacgactggctgtgccagccaaagccccgtcgtgctcgtccatgcgcatcccatccgcctccggatctccgatctgtccccattatcttctgctcgatcctttattttcttcctcctcccggagcctcaattcactctcctgtcgggctcatgagtgccgcgccgtgcgccgacgacagagctacagctactagccgccgcgagtcgagcggcgggccggctcctcctgcggcgacgacgatgaggatcatggcgcgtacgctccgcggggaccgggtggcgctggacgtcgacggcgccaacacggtggcgcagctcaagtccatgatcatggcccgcgagggcgtagccgccggcgaccagcggctcttcttcgccggccgacacctcgacgacgacggcatgcccgtcgcgcactacggcgtgcgccacggctccgtcgtcttcgtcagcctccgcctccgcgccgacgacgcctcgcagtcgcagcaggagcaggagatgcgtaacgtgcaaacgcagccagtcaggaccgttagccaactactgatgattgaccagcagccgatgatgcgcttcgaagacggcgacggccacggccacgaggaggccgtggtcaaggccacgacgacgaggccgccggtgtcgcggcggtcgctccgcaagatcctgtcgcggctgcacgtggacgtgtggacggcccagcacgacgccaagttcctggacctgctgcagcggcgcacgcgcggctgcggcgtgggcgtgggcgacctcaccgcggacgactggtctgccatccgcgccgagctcaacgcggccacggggtccgcattccccgtcgaggatctgcagcggcggctgggcgagctccggcgcgagttcgacgccgtcagccggatcaaggaccacccccgcttcacctacgacgcgcgccgccatgtcgtcgtcgccaaggagaccgagtggaagcgctatgtgctggttcgtgcggacagctgctgcccgttgatcacacgcgccgcgcggatcaccaattcacccggatatggtcttcttctcttagtaacgatcttgatttccgcggcggtttcaggagaacccggatgcggtggcgtacgaggggagaagcacgcacttcggtcgcctccgggcgatcttctccggcagcggcgcagagacgcgcgggcgcggcgggcccatacgccgcgagtcacgggccaagagatgcctgagcaagctgctgcgcagctttgggctccggtgcaagctgtgagaacggtgacactgatacttgtatgctaatgttgctagctagtgggtgggtgacatgcgagcgacacgattggtcaaagctccgttgttgcacgcagtttgtacatgaaaggggtgaagtgcctcgttttcttctgtctgtctctgcgtttcagattgccagcgaattcccttttttttacgattctttttcgtgatggaccaaatatcgatcttggcctacgcgaggtcgtgaggatgcccattttctggtagcatcaaaagtcttgaaacatttttgtccacaactcctgcgaccggaaatcttgctaaggatcatccgaagtaagatgtaaggagctttgatgaaaaattaacctcgaagactaaggtgagaatttagagcgagtttaaactgttgtatagtgtagtattctatgttatgtcagtgttatattgttttgtgttggattgttaaatatcgtctgttataagggaagt

SEQ ID NO: 109610 - DNA, 2772 bp, Zea mays
  unsure (1)..(2772): unsure at all n locations
  Clone ID: MRT4577_31464C.1
cacgcgcaccagcccaccgcccagcactccagccgccagaacagagtctacggcgccgccgtcgcacgacaggagagggagagagagagagacgcgggctttgacttgccgccggtgcgtccgtgcgtgcctggtgggaggagtgggagacgccggtacagtacaggagccatggcgccgagctgctacgacgcggcagcgtccatgctcctctgcgccgaggagcacagcagcatcctgtggtacgacgaggaggaggaggagctggaggcggtcgggagaaggagaggccggtcgccgggctccggggacgacttcggcgcggacttgttcccgccgcagtcggaggaatgcgtggccggtctggtggagcgggaacgggaccacatgccggggccgtgctacggcgacaggctgcgcggcggcggcggctgtctctgcgtccgccgggaggccgtcgactggatttggaaggcttacacgcaccacaggttccgccctctcactgcctacttggcagtgaactacctcgatcgcttcctctcgctgtctgaggtgccggacggcaaggactggatgacgcagctcctcgcggtggcgtgcgtttctctggccgccaagatggaggaaaccgccgtcccgcagtgcctggaccttcaggaggtcggagacgcgcggtacgtgttcgaggcgaagacggtccagaggatggagctcctggttctaacaaccctcaactggaggatgcatgccgtgacgccgttctcctacgtggattacttcctgaacaagctcagcaacggcggcagcacggcgccgaggagctgctggctcttgcagtccgcggagcttatcttgcgtgcggccagaggaaccggctgcgtcgggttcaggccgtccgagatcgccgccgcggttgcagccgccgtggccggagacgtggacgacgcggacggcgtcgagaacgcctgctgcgctcacgtagataaggagcgggtgttgcggtgccaggaagcgatcgggtccatggcgtcctcggcggccattgacggcgacgctaccgtgccaccgaaatctgcgagacgcaggagctcccccgtgcccgtgcccgtgcccgtgccgcagagccctgtgggggtgctggacgcggccccctgcctcagctacaggagcgaagaggcagcgactgcgactgcgactgcgacttctgctgcctcacatgggccccctggctcttcaagctcgtcctcgacctccccggtgaccagcaaaaggaggaaactcgccagccgatgtgatggatcgtgcagtgaccggtcaaagcgcgcgcccgcccaatggaccaaagagtgaattgactagggcgtctgcttgctttctgatcaaagagtgcatcgagaggcggcagaatggaggaaaggggattttnnnggcatgacgagggcaaaggagttgatgaataaagacgcgacgaggtggacagcacctaaattgccgatcttttctttgcaaggggagtaggggggaccttgctggggcctnnnngtgggtagtagacagcccagcacaaaancctggttggtgtgccacgaccacaatggccgcgccagccatggctttgtaggaaacacaagggcgctagaggagatccgatgggatgactcagaataaagatagtggagggaccagaccgtatgcagtatgtgcaacaactaggcactggcatgcttatgctcaagtaatctgataacttgaatgttgtgtatccgacaaactgcttctgtgaagagagaaatgcaggtagacgannnnnnnnnnnnnnnnnnnnnnnnnnnnnnnnnnnnnnnnnnnnnngaattcggcacgagctcgtgccgaattcggcacgaggtaacttctacgcctacgagacgctgaagcggctctaccgtcgcgcgaccgggcggcgtcccggcgcggacgtgggccccgtggcgacgctgctcatcgggtcggcggcgggcgccatcgccagctcggccacgttcccgctagaggtggcccgcaagcagatgcaggtgggcgctgtgggcgggaggcaggtgtaccagaacgtcctccacgctatctactgcatcctcaagaaggagggcgccggcggcctgtaccgaggtctcggccctagctgcatcaagctcatgcccgccgccggcatcgccttcatgtgctacgaggcgtgcaagaagatcctcgtcgacaaggaggatgaggaggaggaggacgaagccggcggcggagaggatgacaagaaaaaggttgaatgatcaaagttcttggccaagaaggtagcaatgtcgtgaagcgtacgtgaactggaaacggatggacaagtatatttggagtttgatgtggtgtttccggatcgtgtgtttgtctcagatgaaaaaaatacaatattttgagtccaagttaatcaatgttccatttgcctatccggagctcaatttgttaggttgcatgttccatgtaattactatatttgcctatttcaattttcaagctcttttcgttgtgtttagtaaactgtggtgtgaccacttacggtcacaataaccatttttatctgtttttggtataataagcatgtctgtgttcggtccaaaaaaaaaaggctcgtctttccgggaacacaagttggctaccgcggtcaagcaagtctttagcgtctttcttgtggctcataattaaaatcaacaggccgtctttttaaaccgtcttgctgggaaaaaccct

SEQ ID NO: 109611 - DNA, 315 bp, Zea mays
  Clone ID: MRT4577_31465C.1
gagacttaaaacaaaaacacagacacaggcagagagagacttatagacagacggagagaacacaaaaaaaaaaaaataaaaaggggtgggccgggtattgatcttcgaatggctcttggtggtggcagtggccttcccctgtgtgctgttcgatgaggttattaaatttgtgtggcggtgcctgacaactatgtgccataaaacaatcatgtgaagaagattggtcttattatatacttatcgataaacatagcttactatttgaatttctctgcaagaattcgttattcaatttgagctcccctatttttattt

SEQ ID NO: 109612 - DNA, 403 bp, Zea mays
  Clone ID: MRT4577_31466C.1
cacgcgtccgcataaacccacttgcccacgcgcacggcaagccggcaaggccacgcgagaaattccatctcgagcagagcgcagcaacacgtgcgcggaggtcacagctccgatcgacaagccggccaagcagccacacatgcctcctcacatggcggcgatctcgcaccggatcgcaggatccggcccgcgcgtcgccgttgtggcgccgcctcgcccgcgggggcgcgctgccgtggtcgcgggtgctgcggcgaagggcgcacatcgggagcggacgctggagggcgcgagtgacgacctgagggccgccgcggctcagtgtctggactgggctcccgcgcggcgtcgggtgcgggccgtcttcgcgcccgtgcttcccaccctcgaccactggcttttc

SEQ ID NO: 109613 - DNA, 193 bp, Zea mays
  Clone ID: MRT4577_31467C.1
atccatcggaggtgctcttttcttacacttctttctttttccgatgcaagaaagaaaaaggggacctgttaacaccaagccgcagacattgctgctccctttgatcgttactcaggaccatcgatcccgatcgtcgttaatctatgcatcgaccggcgaactccaccgtatcccatctggaataccttctcgc

SEQ ID NO: 109614 - DNA, 408 bp, Zea mays
  Clone ID: MRT4577_31468C.1
gtactatattggatattggggaaaaccctaaccctagctgggttgggagatgtatttataataagagcatctgggcctaggcccattacagagggacgagactaaaccctaatacagttctaacactaattattaattggatttggacaccaatacttatgattggagcaaaaaggtcaaagttttagaccaatgcatcctctttgttcacaaccagtggcactgacttgatgccctttaccctaaccgagaagcaatcgaggcaaaggacgatccattcaacactctgaatcaagaataagacaatcaagtgttggtgagaaactaaaaccggacctaaagcgatggtgcactatgttctctgtctctatgatggtgccacattcgagcccagtcgatgctaatgga

SEQ ID NO: 109615 - DNA, 428 bp, Zea mays
  Clone ID: MRT4577_31469C.1
ggtcaggaaggttgaacccgccccaacccattttttaaaaactttcacgggctttaaaaggggggaattcaaaggggtttctttggattactatatggggatcaaccggggggccaaaaaaggcactttggtttgccctccaacgggggaattgggaacccccatagccccaaattctcaagttttaaatttttgggggggggtcaaaactggcaagcaaaagcaattccttttccatatttaaaaaaaaccctttttccatgggatttgggtgatcccccccttttgaataccaatccaaccacaatttatgtttgccattttttttcttaaaaaaaactttggctggggcacccggatctttcacatatttaaaggttttaaactggaggtcaccggccaacttataaaaattttcaagctcaaaa

SEQ ID NO: 109616 - DNA, 928 bp, Zea mays
  unsure (1)..(928): unsure at all n locations
  Clone ID: MRT4577_3146C.1
cattgggtacctcgaggtcgccagcgggccgggtccccgtccagagcgcgagcaacccacgccgccccgctgtctccgccggtccgcccccgtccctcccctcccccgaatcgcgtcgtcccgtctcctgctgccgcggaaccctcgccatggcggaggcgcccgagaccgccgcccccacccagccgcctcccgcgccggcggcttcgtccccgcctcccaagtcggggatcccgccgcggtacgacctggacgccaagtgggacgcgtgcctcgacctctccatccgccgcgtcgcctactcctccctcggcggcgccttcgcgggcctcctcctcttccgtagccctactactcgctgggcatcagttgcccttggagctggtgtggggataggggctgcatacactgaatgctcatacttattcaatggtgctccaaagtgttcacccaaagtatcaactattccctctgcacactctgatgggggagataagtaaacccttgctgttggattggtccatctcggtggagtttttgtatgtgtgaagtaccggttgtttcatgctggatattgcgctacttgtggccatagtatgtcattgaagctagatgcgcctcacttgagagttttgttgcaaacctattccaattgtggtctgatgacccctggcaaagagcttttgcaagctgacgttgaaacggtggcttggtgaccgctaataaattttccatcatgtgaacttgttctcaaaaaaaaaaaaaaaaaaaacggaattgcaaaatacatgagtaatatgcttttacacattgcacgacccgtttttgggtctattgcctaagggccttgtcgcttncttcagaacgacgggtcggaataaattcctgggtgaactattcactaatttatataggttttgataagccg

SEQ ID NO: 109617 - DNA, 485 bp, Zea mays
  Clone ID: MRT4577_31470C.1
aaaggcagcacaacaaagaacggttattactaggacctaggtatcggtgatatcaccggctagctagaaggaactacgcacggcagcactgaatccaacaggcgccctactccactattgatggaacataaactttaagctgagagagagagaatgcaacttccctaaagaagactgttaccctatcataccattatattgaaaaacactgatgagatacttagcttaacagagggcgaaaaatttatcattaatagcatgtatccccttgggctgcatacgaggttgtgattacttgctattatatgggctttcacacctggtagctttgatgtatggtttaaatgtccagctcttttaacttgaccactttctcttcaaagctttttactgtgttaagctccctcatactttgaatctaaggtctgttctctgtctgataaactatttgagacagcctcgggaatgctggtcttggtacctga

SEQ ID NO: 109618 - DNA, 505 bp, Zea mays
  unsure (1)..(505): unsure at all n locations
  Clone ID: MRT4577_31471C.1
atgtactcaactatgataatgtcgtgtttacattttnnnnnnnnnnnnnnnnnnnnnnnnnnnncatcctaggcctgggatctgaccaaaggtgcannnnnnnnnnnnnnnnnnnnnnnnnnnnnnnnnnnnnnnnnnnnnnnnnnnnnnnnnnnatttgcagaccatatgcattcttataatcaggatgccctggtcgagcttcctcgctcgctccctgagcgcatgctggccatggaacttgttcagcccaccctggtcaagcacaaacatcagcatcggcagaacgaattagctaccannnnnnnnnnnnnnnnnnnnnnnnnnaagaggccgtcgatcgggtatgcatgcnnnnnnnnnnnnnnnnnnnnnnnngctaagaggnnnnnnggaccggcagtaagggagtggaagcaggggcagaaattacgggtgattagcgtgggcgagaggctgggttacaatggacctgggtggggtggtgatggccgcggacgacagt

SEQ ID NO: 109619 - DNA, 383 bp, Zea mays
  Clone ID: MRT4577_31472C.1
attcggctcgagcgaagctccaaccatctatcataaagataaacgtcctgaacgaggatgggctattgcggcctctgctgctgcttgttgccttataggcctgacgtctgtgtaagaggtgctagtggctctggagcatgatgtatgggctctacggactcttgatctgctgaatgaaagccggcccaatgcacagagtataacaaggaccgacatatgccacacagtcgaatgtacccatatctgtagagaatacaatgtatgaatgcccacggcaaagaatgcgttcaacgtggtcacaaagaatcatctgttcatgggaatagtctctataacgacagtatcttagatcctgatatctcaaatcctgtggaagttcttaa

SEQ ID NO: 109620 - DNA, 161 bp, Zea mays
  Clone ID: MRT4577_31473C.1
tcttctgttcccttccacgcgatcgaaaccggggcgcgaattaatcatgcgggggcagccctctccaggcgctccaccccgcgtcgaggacccccttcccgccccccgccttgtcttgttcgcgttcccctttgcccgcgtgtgcttcgtccggctgtttt

SEQ ID NO: 109621 - DNA, 146 bp, Zea mays
  Clone ID: MRT4577_31474C.1
ggccgctttttttcttttttttttagatacggaaggcttaaattcacgccaggaacctcacacgtcaagcccaccagcacgataccaccgcaccaaaagccaggtcccatagccccagaaaaatacatacgtcaacccgcgacgga

SEQ ID NO: 109622 - DNA, 439 bp, Zea mays
  Clone ID: MRT4577_31475C.1
gcacgagcctccctcgccttcgccttcgccggcaggagatttccaaccaccaaccgctcgaaccgaccccgaaccctcctcccctctcgcgctatggcccaggacctgttgatgctcaagggttggcatgtcctgtgagggcgtgagtttgtgaagcctggtccaaggcgaggatccctgggtccaagatggcaaggcgtcgagtcctacgacgtagacatcatggaacatgaaggttcaactcggtggcacagcgggccaactggctgaccaacctgaacgcccggtcctggcaaactgtttccaaggactggcaagaagacttcggttctggcgaaggctggagggcccgctggaacacaggctgcaactccctgaccaaccaacctggccgagcggccactcgcctggacaggcttcgactgatctggcatagtgc

SEQ ID NO: 109623 - DNA, 225 bp, Zea mays
  unsure (1)..(225): unsure at all n locations
  Clone ID: MRT4577_31476C.1
aaccattataattattccccncaccccaaggagaccacggggttatctttcaaaacccaaaccaaatgtgacaacagagctgggacaggagcgcttgtcatgtactggcaacatcttattatttatctttcaaccagcttaattacgccccgtgcattgaacaacaacattagtcgaactgttttgctacaacgccctccctgagccacaaaatgtatcggacca

SEQ ID NO: 109624 - DNA, 1101 bp, Zea mays
  Clone ID: MRT4577_31477C.1
gttgctcgcctctgatcaaaccctaaacatggagttgatttatccgctccagccatgggtaggttgcagactgagtctgtcaaggatgccatctcccaaattgatggggatgccaaggagaagaataggaagttcactgagactgtggaacttcagattggtctgaataattatgattcacagaaggacaagcgtttcactggctatgttaacttgccccatatccctcgtcccaagatgaacgtgtgcatgcttggtgatgcacaacaccttgaggaggccgagaagatgggacttgactacatggatgttgaggctctcaagaaaatgaacaagaacaagaagcttgttaagaggcttgccaagaagtaccatgctttcttggcatcagaggccatcatcaagcagattccccgtctccttggtcctggtctcaacaaggcaggcaagttcccgaccctggttactcaccaggaatccctcgagtccaaggtgaacgagactaaggcaacagtcaagttccagctcaagaaggtcctttgcatgggtgtcgccgtcggcaacttggcgatggaggagaagcagatccagcagaacatccagatgagcgtcaacttccttgtttcccttctgaagaagaactggcagaatgtgagatgcctgtacgtcaagagcaccatggggaagccatacagggtgttctaagtctgctcttttgtgaagtctgctaggttctggagccgaggttttattgaattaaactcttgttaagagtatgtttttggacgatcctatatttcgtcctggcgctactatgtttcagaatggtggtactactataagtatcctggcgctctaagtattgcttgaaaggatcaatataatttgcgtgtcatttctttcctcagcggcgctgcagaatagaaccgatcgaggcggagttgtctgtcatctcatcatctctcagtaatattcacacgcgctgcgtctctcccaagggcgccgccaacttgtacatatagcagcattttttttgggttctttcacgaagcaagcttataaagagattcctggcggctttgcaaaaaaaaaaaaaaaaaa

SEQ ID NO: 109625 - DNA, 996 bp, Zea mays
  Clone ID: MRT4577_31478C.1
ggcgattgggttcctcgaggccggccgggatcccattttctctcctctctccgtcgccgcctcggcaccaaaccctacgcagggagttgattgatcgattgcagccatgagtaagttgcattccgagcttctcaaggattgcatctcccagatagttcaggatgccaaggagaataggaagttcactgagactgttgagcttcagattagtctgaagaattatgatccacaaaaggacaagcgtttcagtggctctgttaagttgcctcacatccctcgtccaaagatgaaggtgtgcatgcttggtgatgcccagcacgttgaggaggctgagaagatgggacttgactacatggatgttgaggccctcaagaaaatgaaaaaaccccaagaacaagaagcttgttaagaggcttgccaagaagtaccatgctttcttggcatcagaggccatcatcaagcagattccccgtctccttggtcctggtctcaacaaggcaggcaagttcccgaccctggttactcaccaggaatccctcgaatccaaggtgaacgagactaaggcaaccgtcaagttccagctcaagaaggtcctttgcatgggcgtcgccgtcggcaacttggcgatggaggagaagcagatccagcagaacatccagatgagcgtgaacttccttgtttcccttctgaagaagaactggcagaatgtgagatgcctctacgtcaagagcaccatggggaagccatacagggtgttctaagtatgctcttttgtgaagtctgctaggttctggcaccgaggttttattgaattaaactcttgttaaggatatgtttttggacgatcctatatttcgtcctggcgctactatgtttcagaatggtggtactactataagtatcctggcgctctaagtattgcttgaaaggaacaatataatttgggtgtcatccccccaaaaaaaaaaaaaaaaaaaaaaaaaaaaaaaaaaaaaa

SEQ ID NO: 109626 - DNA, 1316 bp, Zea mays
  Clone ID: MRT4577_31479C.1
ggccgcttttttttttttttttttctttttttttttttttttgggggtatgacacgcaaattatattgatcctttcaagcaatacttaaagcgccaggatacttatagtagtaccaccattctgaaacatagtagcgccaggacgaaatataggatcgtccaaaaacatactcttaacaaaagtttaattcaataaaacctcggtgccagaacctagcagacttcacaaaagagcatacttagaacaccctgtatggcttccccatggtgctcttgacgtagaggcatctcacattctgccagttcttcttcagaagggaaacaaggaagttgacgctcatctggatgttctgctggatctgcttctcctccatcgccaagttgccaacggcaacacccatgcaaagaaccttcttgagctggaacttgacggttgccttagtctcgttcaccttggactcgagggattcctggtgagtaaccagggtcgggaacttgcctgccttgttgagaccaggaccaaggaggccatcatcaagcagattccccgtctccttggtcctggtctcaacaaggcaggcaagttcccgaccctggttactcaccaggaatccctcgagtccaaggtgaacgagactaaggcaacagtcaagttccagctcaagaaggtcctttgcatgggtgtcgccgtcggcaacttggcgatggaggagaagcagatccagcagaacatccagatgagcgtcaacttccttgtttcccttctgaagaagaactggcagaatgtgagatgcctgtacgtcaagagcaccatggggaagccatacagggtgttctaagtctgctcttttgtgaagtctgctaggttctggcaccgaggttttattgaattaaactcttgttaagagtatgtttttggacgatcctatatttcgtcctggcgctactacgttatcagaatggtggtactactataagtattgcttgaaaggatcaatataatttgcgtgtcatacccactaaaaaaaaaaaaaaaaaaaaaaaaaaaaaaaaaaaaaaaaaaaaaaaaaaaaaaaaaaaaaaaaaaaaaaaaaaaaaaaaaaaaaaaaaaaaaaaaaaaaaaaaaaaaaaaaaaaaaaaaaaaaaaaaaaaaaaaaaaaaaaaaaaaaaaaaaaaaaaaaaatgtcccacctttttttgggggatttttccccccaaaaaaaaaacactttagggccgccccccccgttaaaaaaaataccttttcccccctctttttttacctttcccaccttaaaaaaaaatactgtcccccc

SEQ ID NO: 109627 - DNA, 289 bp, Zea mays
  unsure (1)..(289): unsure at all n locations
  Clone ID: MRT4577_3147C.1
aaagggacaaggacaaaacgaacggcaactgcggccaanccctccgcaggccacaccagcaagccagcggaagcaaagacgaagccgcagacgaacgggaggacggaagaccgacgggnccagcccagccccccgaggcacgccgcgagggagaggagccnccaccgatacccccaaccgcacgacgcagggacgagcggggccaacaacaccaggcgccgcgacccacccgagccacacaggaggtgcgcaagccgagggcgcccgcaccaacggaacccagggaaca

SEQ ID NO: 109628 - DNA, 1833 bp, Zea mays
  Clone ID: MRT4577_31480C.1
gctcagaatttctatttgtgttatctggattacttttatccatgatttatgacagcttggggatggaccattaaacaacctgacatcatcagttagcatgctctacggtttaaaatgggctggcttgggtgtgtgtgttacagagcatgttggggtgggtgcttgatttagatttttggataggtttgggctacaacagctgactgattggctatgggttggggtggattagacccccattagcaggcttattccaatctgattctttgggagcggggtccaactgttagttcattctcataatgaaaatggatgtgagatagattcaggttcttgtctcgacacatgagatggattcacgtagcttgcttattattattgattattctactgtttttgccttctgcaattcttcctattggcaggagtatttggaattctagagtattgttcccatccagatagattatctctgcctaataaattatgcccattgattattgcagtaagttgcattccgagcttctcaaggattgcatctcccagatagttcaggatgccaaggagaagaataggaagttcactgagactgttgagcttcagattagtctgaagaattatgatccacaaaaggacaagcgtttcagtggctctgttaagttgcctcacatccctcgtccaaagatgaaggtgtgcatgcttggtgatgcccagcacgttgaggaggctgagaagatgggacttgactacatggatgttgaggccctcaagaaaatgaacaagaacaagaagcttgttaagaagcttgccaagaagtaccatgcttttttggcatcagagaccatcatcaagcaaattccccgtctccttggtcctggtctcaacaaggcaggcaagttccccactctggtcactcaccaggaatccctggaatccaaggtgaatgagacgaaggctacagtcaagtttcaactgaagaaagtcctttgcatgggtgtcgcggtcggtaacctgtctatggaggagaagcagatccaacagaacatccagatgagcatcaacttcctcgtgtctcttctgaagaagaactggcagaatgtaagatgtctctacatcaagagcaccatggggaaaccattcaggattttctaagtctgttttttttgtgaagtctgctctttatgatatttggtttttgaaccgaggttgtcttgaactaaaactcttgttagatcatgtttggttggtaggatatttgagtctgggcaggtgtcttactcttgcgccatgtctttgtaatctctctatataagttttttgagaggctcagtataatatgcgtattatacgttatacccaatcgtttctgttactgtggaaaatgagtttccgccattgctgctgcgcccttgggtagcgcccctctacttacgggatagagccttgtaggaagtttttggtcactaatctggctgctattactagacattttgtgtaaagcgcaggcctagtgtcttaggttcttacgtgagttgggttaggagaagggattaacctggtgcttttgagtccaggtgctaggatttgaagggtcagtgaggtttggatagcctagtgtctgatggctatacatactatatttataaaaatattgtgtgatgactatacaaagtatctcaataaaataaaaaaaacccccctgtgccggtccagtctgacctgtgatgtaataggcagaaaaaccatatttggttttatatttttattcggatgtaataatacgcgattgttgttggacacttaagacagacaacaatacacatatgtagtgtt

SEQ ID NO: 109629 - DNA, 161 bp, Zea mays
  unsure (1)..(161): unsure at all n locations
  Clone ID: MRT4577_31481C.1
tcgagtgcctagttggtcattgacacttttccaggcaaaagagacatcttgctctctcgtctnatgtgcccgtagtaaggagagagcatgagatagtcatgctcaacactaacatagccacatatcagcgtcatagcctgtggtgactgaatgtatgcaca

SEQ ID NO: 109630 - DNA, 1049 bp, Zea mays
  Clone ID: MRT4577_31482C.1
aggccggccgggccggggatatgatgaccctttccccagatgatcgacgctgaacatactgagcgctacattttctcgttcgagaaagccaagccagaactctgattctcctctcgctccgttgctcgcctcgggtcaaaccctaagcagggagttgatttatccgctgcagccatgagtaagttgcagtctgagtctgtcaaggatgccatctcccagattgttggggatgccaaggagaagaataggaagttcactgagactgtggaacttcagattggtctgaagaattatgatccacagaaggacaagcgtttcagtggctctgttaagttgccccatatccctcgtcccaagatgaaggtgtgcatgcttggtgatgcccagcatgttgaggaggccgagaagatgggacttgactacatggatgttgaggctctcaagaaaatgaacaagaacaagaagcttgttaagaggcttgccaagaagtaccatgctttcttggcatcagaggccatcatcaagcagattccccgtctccttggtcctggtctcaacaaggcaggcaagttcccgaccctggttactcaccaggaatccctcgagtccaaggtgaacgagactaaggcaacagtcaagttccagctcaagaaggtcctttgcatgggtgtcgccgtcggcaacttggcgatggaggagaagcagatccagcagaacatccagatgagcgtcaacttccttgtttcccttctgaagaagaactggcagaatgtgagatgcctgtacgtcaagagcaccatggggaagccatacagggtgttctaagtctgctcttttgtgaagtctgctaggttctggcaccgaggttttattgaattaaactcttgttaagagtatgtttttggacgatcctatatttcgtcctggcgctactatgtttcagaatggtggtactactataagtattgcttgaaaggatcaatataatttgcgtgtcatacccacaaccttttctgccaaaaaaaaaaaaaaaaaaggcccctagggcc

SEQ ID NO: 109631 - DNA, 954 bp, Zea mays
  Clone ID: MRT4577_31483C.1
cccgaaggtcctcccgaattcgctctagtgtcgaccgcctcgggtcaaaccctaagcagggagttgatttatccgctgcagccatgagtaagttgcagtctgagtctgtcaaggatgccatctcccagattgttgggggatgccaaggagaagaataggaagttcactgagactgtggaacttcagattggtctgaagaattatgatccacagaaggacaagcgtttcagtggctctgttaagttgccccatatccctcgtcccaagatgaaggtgtgcatgcttggtgatgcccagcatgttgaggaggccgagaagatgggacttgactacatggatgttgaggctctcaagaaaatgaacaagaacaagaagcttgttaagaggcttgccaagaagtaccatgctttcttggcatcagaggccatcatcaagcagattccccgtctccttggtcctggtctcaacaaggcaggcaagttcccgaccctggttactcaccaggaatccctcgaatccaaggtgaacgagactaaggcaaccgtcaagttccagctcaagaaggtcctttgcatgggcgtcgccgtcggcaacttggcgatggaggagaagcagatccagcagaacatccagatgagcgtgaacttccttgtttcccttctgaagaagaactggcagaatgtgagatgcctctacgtcaagagcaccatggggaagccatacagggtgttctaagtatgctcttttgtgaagtctgctaggttctggcaccgaggttttattgaattaaactcttgttaaggatatgtttttggacgatcctatatttcgtcctggcgctactatgtttcagaatggtggtactactataagtatcctggcgctctaagtattgcttgaaaggatcaatataatttgcgtgtcatacccaaaaaaaaaaaaaaaggggcggcc

SEQ ID NO: 109632 - DNA, 3164 bp, Zea mays
  Clone ID: MRT4577_31484C.1
agggggaaaagcaagacgcgtgagcacttccttatcgtctcttcctttcaccccctcgaccccgatcgaatcgctcgaacaattccctgtgcatcgatcgatctaggcttgcgcgaggatccaattccatccggctctcctttgagctcgtgatcctcggagttggaggagttcttcgcgagtctctttttgccccgatttctttttggcttatttgtgcgagttttctcaggagcagaagggaagaggcagtttgcaattccgatgcacccaggcctcaaaaaaaaaaaaaaaaaaaaaaaaaaaatcgggctccgttgctcgcctcggcaaaccctaagcagggaatccgcagtaatctgagttccagattgcaaggagaagactgagactgtggaacttcagattggtctgaagaattatgatccacagaaggacaagcgtttcagtggctctgttaagttgccccatatccctcgtcccaagatgaaggtgtgcatgcttggtgatgcccagcatgttgaggaggccgagaagatgggacttgactacatggatgttgaggctctcaagaaaatgaacaagaacaagaagcttgttaagaggcttgccaagaagtaccatgctttcttggcatcagaggccatcatcaagcagattccccgtctccttggtcctggtctcaacaaggcaggcaagttcccgaccctggttactcaccaggaatccctcggtgagccaactctgattctccgaggcatccgcatcgatcttcaaaccgccactcaccaccaccgcccgccctcgacagcgccggacggcctcgggtacggccgggacaggcaaaccgtctaagacgtcatcctaattccttcacgctaatctctctgcttcctctgttcctcctctttcccctcctccccctcccgttttcctttccctttttcctccacacaagcaaggcgctcaacctgccgcccgggaaaaaccctagaccggcgatgtccgtccccggcgcccccgcgggcggcggttcccgcagcttcgacttcggcgccgacgacgtgctctgctcctacgatgacttcgccgcctcgtccgagcccaagcgccccgatccggccgacagtgtgcccgattttcatgatagcagattggggaggccatttgtgaaaccttatgaacaagaaagttatgggaaagaggatgtgctttctgctgttgagaaatgcatgaaaaagtatgctgataatttgctacgatctcttgagggaatcactagtcggctttcgcaactggagatttattgctataagcttgagagatccataggtgaacttcgaagtgatgtgcttcgtgatgagactgaccataggttgaagtctcttgagaaacatctaaatgaagtacacaggtctatccaaattcttagggacaaacaggagttagctgaagctcagaaggaattggccaaatttcagcttacacaagatacatctaaaaagaaggaagatgtaccaacatttattcctgagcaaaagaagcctgaagaaaaccctgacacatcaaaccagcaactggctcttgttttgcctcatcaggtgaacctgccatcacttgcccctagagcttctgaatcagtccaacagtacaagaatcaacctgtgcaaccatcagacccaacccctcctgtgccacagcaggaccgctatgttcttagccaagccatcgtctactacccacagcgccaagctccaggtatccaggacacacaagggcaaaaattgcaaccagaagtgcaatacttaccagcaagacccccagcacaagatgttccggtccatgctccatcccaaccacctcaggctggaaaccaaacacagccacagccttaccctccttaccagcagcagtggcaccagcaatcctcccagccagctcctgcaccggtggcccagacacagcagactttctcacagacatttcctccacccgcacagcagcctcagttatcaaacgtgcagcagtttccaccgcaaccagtacagcagccccaatccaatgctcaacagtatcctccaccagtgcaaccacagcaatctagcccacagcttcctcaggcaatgcaaccacaacatcctcctatgcaaactcagatgagacctcaaaccccaccaaactacccgcattatccaccccaccagccattgaaccccacccctgaaactcttcctggcaatgtggctatgcaaggatcatacaacacttctgttccatcaggtgccaaccgtcctgaactgccatattcgtatggaggggctggcatcccactgtctcagccactgccacagcacaacatgcaaaggcaccagctaccaccttcaagtcagggctcctttgggccaccacctccaagcaaagggtcctatgctggctctccacagtatgcaccacagggcaatccgcaaggctacagcacaggttacgcttacccaccaaacggccctccagcagtccagccgcaacagatgccccctggcggagttggcatgagtcatccgggttcgcatatgatgcgtggccatccctacggagaaatgatggagaaggcgatcaccatgggataccctagggaccaagtgctgaacgtcacccaaaggatggccgagagtggccagtcaatggatttcaacaccttgctcgacaagctgaacgaagcagggtcgggagctccaccaccacgcgcgtggtgattggatccagtttgggcgccgtgcttggtgtcggttatgtgacttacgactgttatcatgcagctaaataaataagatttgggttgatgccgtgtacttcttatctgtacaatgtgcatatgtgattttttttacatgtaactgccactggtactacgaacgcatcgcaccaattggactgttcagatattatgtatatatattcggaagcaattactggcaggcatcctaaaaaaaaaaaaaaaaaaaaaaaaaaaaagtactctgcgttgttaccatttttgtagcgtgtcatgtgtccgttgcgttgataatgtgaacaactgttgtccgtcgacttcagcttgccgctaaattttgtaaagactcttttggatccctagattttatctactccccctttttaattat

SEQ ID NO: 109633 - DNA, 221 bp, Zea mays
  Clone ID: MRT4577_31485C.1
tggccgctgcatcgacgccgcgccagccccgcctgctcttcccggcaccgagcgggttggagctagcgcttcgagtaggagcctggagtagttgaacgacctgcataatgacccagtcacctcctgcagcgcatggcctgttggttaggacatcttccatgtggccatctaccatcatggggccttcggacagcccatgtgcaggtgtggtattcttggtg

SEQ ID NO: 109634 - DNA, 419 bp, Zea mays
  Clone ID: MRT4577_31486C.1
cacgatcatgtagtagaggcagctgacaccaagactgcctaccatctgtctcagctgagccagcatgtggcagcgtacggttgttcacactgcttacagacgacaaatttttataacaatagcttatggactttggctgctttcatcagtttaaccaaacgacaacgcacaaaattgctacgatataaaataaacaactcagaagcaaatcgaccacaaaagcccgtcttactcataaagcactaccgccttctcctgcatggcatccgcttactcctcccagcatagaagattagccaatttgtagtacttcttcataggaggaggagcactctacacgttctcgccgtcaaagcagtggaaaacagatttgggccgaggtagcaacaagcgtcttcagcagcacagaagcctctggt

SEQ ID NO: 109635 - DNA, 530 bp, Zea mays
  unsure (1)..(530): unsure at all n locations
  Clone ID: MRT4577_31487C.1
agtttaaggggggggggggggnagaaataactgtggcggggaatcttgcctatacactanctggaatgggcgcccgggttggaatcttcnatgccgacgtgtttgggccaagcgtaccgagtatggggtctcctgaaaaccgggtgctagtgatgaacggggggggggatatattcttccgaccgagtatttgggcgtgaaaatggggtgcttcggggttgcggggcaaggaagggggatcatgcggggtccaatggggtcaggagtcatcaatcaggtgcggaccactactgagtggggggaacttgactgcggggtgatcgatatgcctcctgggacaggcgacatacacttaacactctggcaggtggctccattgactgcgncgaggattgtgaccacccctcaaaagcgtggtttcattgagtgggccaagggaggaaggatgtgctctaaactgaaggtgccttgggtggcgggtgtgaagaacatgtgctattttgaggctgatgggaaacgttattacccat

SEQ ID NO: 109636 - DNA, 1272 bp, Zea mays
  Clone ID: MRT4577_31488C.1
ggtaccctcggagccggccggggatagaagagagaagaaacagacagcctaaagcccttcctctctcctcggcgccggaatggcgaaaagcggcggcgagtccactgtggaggttgcgtcctccagctcctctcctattcccgcttccgcgtcggctacgaggccgaaggcgaaacaccgtatagagatcgaggggtaccctgtggatggcgtctccattggcggtcaagagacttgcgtcatcttcccgactctgagcctcgccttcgacatcggccggtgcccgcagcgcgccgtctcccaggagttcctcttcgtctctcacgggcacctcgaccacatcgggggccttcccatgtatgtggccacgcgggggctcttcaggctgcgtccgcccaccattttcgtccccgcgtgcctccgggacctcgtggagaggctatttgaggtgcaccgcgccatggaccagtccgagctcaaccacaacctggtccccctggaggtcggggaggagtacgagctcaggagggacctcaaggtcagggctttcaggacctatcacgccatacccagccaggggtatgtgatatactcggtgaagcagaagcttaagcaggagttcattggcctaccagggagcgagatcaagcggctcaagctatcaggtgtggagatcacaaatacggtgtccacccctgaaattgctttctcgggggatacaacagcagatttcattcttgatccggataatgcagatgtgctgcaggcaaaaattcttgttgtcgagagtacctttccagacgactcaatttcagttgagcatgcaagagaatatgggcacacacatttatttgagataacaagtcaggccgacaagcttcaaaacaaagctattctactgatccacttttctgctcgttatactacagaggaaattgatgcggcaataaacaaattgccaccgtctttccgtagcagagtttatgccttgaaggaaggcttctaataaaaacatgaaccaggaaatcagtattgaagttttgtcggagcagttttccaaattggattgcgtgggtatttttcaccggaaacctttttgctatgtgtgctctgatgatactataccaatcatctgaaggttcatgcggggctttttgttgtcggtactcatgcttgtgacattggaatgtttgaatggtgaaatgcgaaacatcatgtgtaagcaccatttacttaatttctttttgaaaaaaaaaaaaaaaaaagcggctg

SEQ ID NO: 109637 - DNA, 903 bp, Zea mays
  Clone ID: MRT4577_31489C.1
gggaccctcgaggccggccgggaatgttcgtctttcgtacagagcatatgaagttgtgagcctgcccttgacccgtcgctcctagacttgaagactcgagaagtcgagagaaaagacgtgtcaacgtcactacgtcagcgtcctctgcctccgccatccatggccgacaaccgcaacctcccgccgacctgggccaccacggccggcttcggcttcctgaccctcaactccggggtcgccatctaccgcgcgtggggcgacttcgcgtccatcctgctggtaacaggctcgtactccgctctgctactcctcttccgctgcctccgtgactacgagcgcgcggcgcccgggtccccggccagggcgcgggcgagacgcgctgtgtggccgctcacctcgctgctcaccgtggccttcgcctggaaggttgcggcggccatgccgtcggccgccgccgcggccgtcgtctgggcgctcgccgtcgccaccaccgccggtggcttcttcgccctcttcgttcccggttgaatcgaagccatggaccgctcagatgccccgattcgtgtacggactgccaaggagactgcagcaggaccctgtatttttgtactaatcattatatgtatatattgtagtatattgtatagtactagtgtatggtgcgtgcctatgcgcgcgtagcgatctgcttagtagcatagtataatgtatgattattgtatatatgtttgagtaaataagcacgtaagagcaaagcaaaggaatccaagttccggtgtttgttgtaagataaacgagcgtattataagttgtaacaatattatattgtttcaagcaagttgtacatataaaaaaacattaaaaaaatatgagtgataattccagtaaacttttatagttttg

SEQ ID NO: 109638 - DNA, 281 bp, Zea mays
  Clone ID: MRT4577_3148C.1
tgcagatgggcatgccagtgactgccctgagggagaagacaggggcgccgtcctgcgggtcgtcccctgcgagttcctcggcagcggccgtgagctcgacgccatggaggtagaagatgcggcggcagacacggttgtggccgcggttgtacggctcattgcagttgaagcagaggccgaggcggcgccgttccgcctgttcctccggtgacagccgcttcaagggcggaccctctggtcgcggctggggcgcgcccacgggtggtgcagggagggcgagc

SEQ ID NO: 109639 - DNA, 391 bp, Zea mays
  Clone ID: MRT4577_31490C.1
aatattcaatacacaatatgctgcattcaccttgaccgtctcggattctcaacagatgattgaaaatacgaaaccaaataaacaatgcgcaatgcgcctgctgtggcagcaaatgaatggttggattcacttgacttctcggattctccacaggtgattgaaaatatggaaacccgataaatgcacaagacactagtaccagcagataaatgcaccgtcatgtcaacattacgtcaacttggaggacaaagggaatttgccaacgcaattttcaggacatgagtggagtaagctgtttgctaaagagatcaccaagggctccacgaacatccaattgatcacaacagataagtttggtaattaatggatagaactctttcaggtgcctttt

SEQ ID NO: 109640 - DNA, 595 bp, Zea mays
  Clone ID: MRT4577_31491C.1
cggccgcgtggggccagaaacctagccggaaattcgtccaggataggggctgtatcgtagggagtagtcgaagcggactggacaggagccgagcaaactatctgcagaagaggttcaagggttgccgtgcggactccggagctgtgagaatctaccccgaggtaagctcttagagtcgtagtcaaagaggagaagccaggccgggaacaaacagaaaaagcaacaaggagtacaggactcagtgcaccaagaataggaaagagcaaagaccagaacaattaacttcaagatgcttgaagtgaggactacaagaaggccggctctcgccgacatctctggtggtgggttctttatcaggacagtagaatcgccaggagctgtgctggtgaatggtgctgtcaagcggccggctcggcagtttctgtcaccttcaaacaacaaggagaatgtgccaccagtgggagctttgagggctacaccaaagaggaggacccccttgcctgactggtacccgaggacaccactccgtgacatcacatcaatcgtcaaggcaattgagagggagagtcgtctgccagatgctgcagctccagca

SEQ ID NO: 109641 - DNA, 583 bp, Zea mays
  Clone ID: MRT4577_31492C.1
aaattcggcacgaggccagtgcagacatacatcgtgtattagacttacgggcacctgttattgtaaaggttttgaaaggaatgtgcatcatggatgctcagatcttcagaaggcacctgaaagagttctatccattaattaccaaacttatctgttgtgatcagatggatgttcgtggagcccttggtgatctctttagcaaacagcttactccactcatgccctgaagtctggcagtatttcctcccttgcatagatcttgttggaacatattcttcgtcagcatttttgtgcaaacatggagcaccggttgggtgcttgacatccttaacgcgctttctggtgcaacagctactccctaggaacttaagagcttgatcagcgggaacggcaggcttgtactttggagctatttatctgtgcccggacagggatgatgcttccattatacagtagagtagtgttggtaatatgtacacattgttgagaacgttgtacttgaggcctgttgttattatacggcaatagtagattgtttgcggcaaaaaaaaaaaaaaaaaactcgaggaggggggcgtgtacc

SEQ ID NO: 109642 - DNA, 660 bp, Zea mays
  Clone ID: MRT4577_31493C.1
gaccgggcgtacacgcgcgcttcaccgcttgattcctaggactcgtacccgccagggtagttgtacaactgactcgtctgcttccgcatagtctctgaagatgacggggatcacgacgatctacaacacggggctcaacttcggcggccccgccaccatgaccttagggtggttcgtgggcggcgccttcaccatgtttcttttgcgcctccatggccgagatctgctcctccttccccacctccggcggcctctactactggagcgcgcgcctctccggcaagcgctgggcgcccttcgcctcctggatcaccggatggtacgctgactgcccgtccgcagccacacacacacacacaccatgcatctcgatcgcgagcgctacgttcttttaggaattggggattcaagggcccgggtcccggggtggaatggatcatgtgaaaacatagcttcacttacatctacagcataataagactacacgagtaggtagtaggtttgctctgattgagacaaggacttttagcgatgaacacagcgacaactcccctgcatttagaaccttgttggtgacatccattctctctttaagtttccagcacgttgctgatgtactactatacatttgattattccagcacatttctttttagactc

SEQ ID NO: 109643 - DNA, 1793 bp, Zea mays
  unsure (1)..(1793): unsure at all n locations
  Clone ID: MRT4577_31494C.1
gggacgntgatcggtacgcgtgggtgtcgtttcaattgctcttggcgctttagttcatctgattgaagttggtggtcaccagttcagtgatggtgattgggatacatnnttaaagagtattagggatgcatcatacacaacacagcctcttgaattgctcaattcattaagatttcagaaatcaaaacaccagcagttactttcaagagaagaaagcaatgcacaaggcaatagttaccttgacagccagggggaaccctccatcagtgacagtaataatggtgagcataatcatccagaggcaggtctgcaaactatcctggagaattcagaagatttaccgtcaccatcagggagaacacaacctgccgttttcccacgtggccaaagctttggacaaagaattatgggcaatatgatggataatattttggtcagaagtcttacgtccaaatcaaaaggtcgaacagatgatattgctccaccctcacctgtgaaggcccctgatgatgaggctgacaaggctgaagaggaagaaagccctatgatggaaactgtcaggagcaaatgtattacacagttactgctgcttggggcaattgacagcatacagaagaagtattggagcaggctaaaagctacacagcagatagcaataatggatatcttgctctcactcctagaatttgcttcttcatataactcaccttcaaatcttcggacgaggatgcaccatatacctccagaaagacctccactgaatcttctccgtcaagaactagctggaacaacgatttatttagatatcctccataaatcaacagtggagcaggatgaaaaggactccattgaggaaacaaatggtttaaatgtggaatctgatgaccaggaaaagatcaagtacctagcagaagggaagctggtttctttttgcggacaggttttgaaagaggcgtctgatttacagcctagcactggggaggctgccagtgcagacatacatcgtgtattagacttacgggcacctgttattgtcaaggttttgaaaggaatgtgcatcatggatgctcagatcttcagaaggcacctgaaagagttctatccattaattaccaaacttatctgttgtgatcagatggatgttcgtggagcccttggtgatctctttagcaaacagcttactccactcatgccctgaagtctggcagtatttcctcccttgcatagatcttgttggaacatattcttcgtcagcatttttgtgcaaacatggagcaccggttgggtgcttgacatccttaacgcgctttctggtgcaacagctactccctaggaacttaagagcttgatcagcgggaacggcaggtccctaggccacatcttttttttttggatgacgcaagggaagtagcttgactgatgcgcacaccgtgtttttcctagcaggcttgtactttggagctatttatctgtgcccggacagggatgatgcttccattatacagtagagtagtgttggtaatatgtacacattgttgagaacgttgtacttgaggcctgttgttattatacggcaatagtagattgtttgcggcaagccaaaaaaaaaaaaaaaatcgttttttgtgcgtctaattctctgacttgcagaattgcggtggcaaatacccattgccctccaagttgtgcgttagcgtatttatccgtagttgacagcaatgaacatattactactgctttctgtattttctattaacgcatgcacatagtttattgggtttccatattttcaa

SEQ ID NO: 109644 - DNA, 931 bp, Zea mays
  Clone ID: MRT4577_31495C.1
ccggccggggccccactgacagccgtcgaggacgccatcctcgctcttgcgtccgtgattcgcgcccccacccgctgacagccatcagcgatcccatccacgcgtcgcgccccatctgtgcccctccatcggcgccccgccccaaaccacctgtttcgtccctcacctctgcccccaaatccgagccaccactgcccgccgctcttcgtcgtcctccggacgcccatgctgccgccctctccccaacaccgtcgccccaccccgctggagatcccagccgtggtccatggaggacgtgcggcgcgacgaggaggtcctgcagcgggccggtgttgtcgtgtgcggggacgaggtgacggcagcgttctacgcgcattggtgatggcttcttcaccgtgttccgcacgcacttctactgcgccgtccgcggggagctccgcaccgatgccaaggtggccggcttcgacgggatcgtaatctccaggagctgtgccgcctccacgccaccgtcaagcgcatcctcggcatctgcttcggccaccagcataagaaacacgactcttacgaagctcctatcaaatctaaggagcctttgattttcaatgttggattccggcaatttacggccattgttttcatccgacaacatcaactgcaataaacataagatggagagatttctgcaccatggctggttttctgttgcctctgtatatgcttcaatttccttccttccacttcctctaatagttttgaagaacagagatggcgagcaatctaccattgcagctgtaggttcgctaaaaagtgtggatccaaatcggatcattctaaagaaaattgttctgactaggtaagcttgggtgcatctatcttcacaaggaattctagttatgcagagtcctggtgttcgttaagatgaaaaccaact

SEQ ID NO: 109645 - DNA, 872 bp, Zea mays
  Clone ID: MRT4577_31496C.1
aattcggcacgaggtcttgaactgctgtactcattaggattccataaatcaaacaaccagcagttactttcaagagaagaaagcaatgcacatggcaatagttaccgtggcagccggggggaaccctccatcgttaataatggtgagcatagtcatgcagaggcaggtccacaaactagcctggagaattcggaaggtaccacgagcagaggtttaccgtcaccatcagggagaacacaacctgctgtttccccacgtggccaaagctttggacaaagaattatgggcaatatgatggataatcttttggttagaagtcttacatccaaatcaaaaggtcaagccgatgatattgctccaccctcacctgtgaaggcccctgatgatgatgagactgacaaggctgaaggggaagagagccctatgatggaaactgtccggagcaaatgtatcacacagttgctgctgctcggggcaattgacagcatacagaagaggtattggagcaggttaaaagctacacaacagatagcaataatggatatcttgctctcactgctagaatttgcttcttcgtataactcaccttcgaattttcggacgagaatgcaccatatacctctagaaagacctccactgaatcttctccgtcaagaactagttggaacaacaatttatttagatatcctccataagtcaacagtggagcaggacaaaattgactctattgaggaaacaaatggtttaaatgtggaatctggtgaccaggaaaagatcaagtacctagcagaagggaagctggtttctttttgtgggcagattttgaagaaggcgtctgttctccagcctagcactggggaggctgccagtgc

SEQ ID NO: 109646 - DNA, 334 bp, Zea mays
  Clone ID: MRT4577_31497C.1
agcagtggtaacaacgcagagtaccggggtgcaacagctattccgtaggaagttaagagcttggtcagcgggaacggcaactccctaggccgcatatttttggatgacgcaaggaagtagcttgattgtttcgcaccgtgttttccctagcgacttggatgacacaagggatgatgcttccattatacagtagagtagtgttggtgacatgtacgcattgttcaggacattgtacttgaggcctgttgttattttatggcaatagtagattatttgcgccaaaaaaaaaaaaaaaaaaaaaaaaaaaaaagtactctgcgttgttaccactgct

SEQ ID NO: 109647 - DNA, 125 bp, Zea mays
  Clone ID: MRT4577_31498C.1
tcgagtggtcaagacgcaaacaacaatgcctgacgccaagcccaagagctggccatgctggtgcaacagtcggggagaactggtacatagtctggaggtggcactattagaggtgctgtctctga

SEQ ID NO: 109648 - DNA, 687 bp, Zea mays
  Clone ID: MRT4577_31499C.1
aaaaaaaaaaaaaaaaaaaaaaaaaaaaaaaaaaaaaaaaaaaaaaaaaaaaaaaaaaaaaaaaaaaaaaaaaaaaaaaaaaaaaaaaaaaaaaaaaaaaaaaaaaaaaacgggcccctggccccccccaagtttatggttgtttttgtttggccccccctgggaagaggaagggtgcccccccgggtttgggcccccctggggggggccccccgcaaaaaaccgggggggggcccggggggccccgcccccgggggcctgggggggggcccccacccccccgggaaaaaactggagggtgggggcggtttcaagggttttcggggggggaacaaggggaaaaaacacaacggggaaaaaaaaaaaaaggccggggggggaaaccaaagttccggggcctttaggggcccctttggcggcgaactccagggggccaattggccccgggaattcccaagggcccccaaaaaaggccctttccctggggaagaaccccccaaaaacccccccttggaagggggaccctttctcccccgcccgggaaaaaagccccaccccccccggggggggggcgcccggttttctcgccccccaaataaaaaaccctttgtaaaccccttcccaaagggccccccggcgggggcggaaacacccccggggcctgaacaacaaaaaccgggggcggaa

SEQ ID NO: 109649 - DNA, 628 bp, Zea mays
  Clone ID: MRT4577_3149C.1
atatcctccctatgaacgtatgagccagctcgatgcacatgcattggccttctgccgttgataaccccagagtgccggaatctccgctgactgaatacgtaagattctgtatgggagtaatccttttatttttgctattttgcgtgatcatgacctaagaagattgatcgaatgtgctcaggatcactcacaagttcagaaaaacctcttgtatcttgcttgaatcgcagattgccaatcgcagactgttgccagcgagcctctaatgcctactcctatcgcatcgcctgtagcatgactgatcatgtgagaggtgactatgtcaccgcaaggacacctctgactcctgatgagacgtatgtgtagccgatatcaaggatcatcaggctctactgttatgctacatacgcctattgagagcgacacctggcatgctcatctgaatggtgctgatgtgagatctgctaccattccgctttgaacaagcaagatgctgaggccctagtgtcctagacctcgagcttctagagcctcatgagcactggtgttgacgcacgttgcaaactactaagcctagaagtcctgatgtttttacgagctatccgttttaagttccgaaatatgtatg

SEQ ID NO: 109650 - DNA, 435 bp, Zea mays
  Clone ID: MRT4577_314C.1
acactgagttccgtagagacaggcgttttcgtactcgcctatctgcgcgacccaaagcgctccctccttctcccattacttgtctcatttctcaccaccggcgtcgctacccgctttcgacgacaccatgagggagtgcatctcgatccacataggccaggccggtatccaggccggaaacgcgtgctgggagctgtactgcctctttcatggcattcaagctgatggtcacatgcccggtgacaagaccattgagagaggtgatgatgcttacaacaccttcttcagtgagactggcgctgagaagcacgtgccccgtgctgcttttgatgaccttgagcccactgacatagatgaggagaggactggcacctatcgacagctatttcatcctgagcagcttatcagcggcaaggaggatgcaggcaacaactt

SEQ ID NO: 109651 - DNA, 2286 bp, Zea mays
  Clone ID: MRT4577_31500C.1
taatttagtaaattccatacagattggaacatgaaaggtttacacaatttatgtattcataggatcagtgcactcctcggattagtttgaaggctatcgctctcctgcgtatatgtgaagatcgtctggcagagggattcattccaggcggcgctattaaacctattgatgttgttccagaggaattttgatgtgtctgagcattactggtttcctatgctagctggtttgtctgatttgactttggactctagaccagaagtcagacattgtgcactggaagtgttgtttgatttgttgaatgaaagaggacataagttctcttctcccttctgggagagtatttttcatcgtgtactatttccaatttttgatcatgtaaggcatgctggaagggatggactttcttcttctggggatgattggcttcgtgatactagcattcattcactgcagttaatctgcaaccttttcaatacattctataaggaggtatcctttatgcttccacctcttctcagtttgctgcttgaatgtgcgaaaaaaacagaccaaactgtcgtttcaatttctcttggcgctttagttcatctgattgaagttggtggtcaccagttcagtgatggtgattgggaaacattattaaagagtattagggatgcgtcatacacaacacagcctcttgaactgctcaattcattaagatttcagaaatcaaaacaccagcagttactttcaagagaagaaagcaatgcacaaggcaatagttaccttgacagccggggggaaccctccatcagtgacagtaataatggtgagcataatcatccagaggcaggtctgcaaactatcctggagaattcagaagatttaccgtcaccatcagggagaacacaacctgctgttttcccacgtggccaaagctttggacaaagaattatgggcaatatgatggataatcttttggttagaagtcttacgtccaaatcaaaaggtcgaacagatgatattgctccaccctcacctgtgaaggcccctgatgatgatgactgacaaggctgaaggggaagaaagccctatgatggaaactgtcaggagcaaatgtattacacagttactgctgcttggggcaattgacagcatacagaagaagtattggagcaggctaaaagctacacaacagatagcaataatggatatcttgctctcactcctagaatttgcttcttcgtataactcaccttcaaatcttcggacgaggatgcaccatatacctccagaaagacctccactgaatcttctccggcaagaactagctggaacaacgatttatttagatatcctccataaatcaacagtggagcaggatgaaaaggactccattgaggaaacaaatggtttaaatgtggaatctgatgaccaggaaaagatcaagtacctagcagaagggaagctggtttctttttgcggacaggttttgaaagaggcgtctgatttacagcctagcactggggaggctgccagtgcagacatacatcgtgtattagacttacgggcacctgttattgttaaggttttgaaaggaatgtgcatcatggatgctcagatcttcaaaaggcacctgaaagagttctatccattaattaccaaacttatctgttgtgatcagatggatgttcgtggagcccttggtgatctctttagcaaacagcttactccactcatgtcctgaagtatggcagtatttcctccgttgcatatatcttgttggaatatattcgtcatcagcatttttgtgcaaacatggagcaccggtggtgcttgacatccttaaggcactgtctggtgcaagtgcaacagctattccgtaggaagttaagagcttggtcagcgggaacggcaactccctaggccgcatatttttggatgacgcaaggaagtagcttgattgtttcgcaccgtgttttccctagcgacttggatgacacaagggatgatgcttccattatacagtagagtagtgttggtgacatgtacgcattgttcaggacattgtacttgaggcctgttgttattttatggcaatagtagattatttgcggcaagcctcgtttttgtgcgtctaataaagtgaggtcctgatgtatagccttgtctgacctgcagaattgcgttggcaaattccctttgtcctccaagttgctgtaatgttgacatgacggtgcatttatctgctggtactagtgtcttgtccgtattgggttcatgcattgtttgatattccgt

SEQ ID NO: 109652 - DNA, 533 bp, Zea mays
  Clone ID: MRT4577_31501C.1
ggtaccgcgccccctttcgagtttttttttttttttttttttttttttttttttttttttttttttttttttttttttttttgggtttttggttaaaacaattaatttttaagggggttccaatttcatgcccacatggccctacagtttactagtattcctaataaagttcataagcttgaagggccttagtcataatcgcagccctgttttacaagggtttttcattaaccaacagggggaggccataacattcatgtgggttgcctttaaaatgttgggccccctttcaagtccgatgacaaactgaagggggtggaccttttttttcctagggttttccatgggaaactgtttcccttttggaagccgcttgtaatgacttgattttaaccataatttttagactcggccttgttgttggaaaaaactccagccctttctttgtgaggggtccaccttgggttgttaaaaccgggtggccttttttttacaaacctagggtttttcctcctttcactaaactcaacttg

SEQ ID NO: 109653 - DNA, 789 bp, Zea mays
  Clone ID: MRT4577_31502C.1
atggacatctttgctgggacctttgctttgattagacacggcgtttgaaaacttcacgttaaagggcacgcttggcaagttccttcaatgtcgccagttaaaccttccctatccagttccaaacttgcaaccccccctcccctcccctcccctccctcctcctacaagcaacagcagcagcacaccggcctccaagaggaggcgcggagaggaggaaggtgagagcggttgcctccgaaagcaagccatcactggcggctaccaaatgcaggcatgcatgcatgcatatagcgaacaggacaagaagaagcagaggaggaggaagaaggacaagtaggggcagagctcaaggacgtcaagaaaacggtcgctcgctgccacccaccatgtcctatgatcaggtgctctcgccgctcttcggtgccggcgggcgatcggcgtggagagcggctcagcacggcggcggcgacgcggtgacgaggcagatactcaagtgcacgcggtggcagctggaggagaccaccgacttcgtcacctgcccctaccactactactgcgacagctcctacccgggcgactactccgcggccgtcgacgtcctcgtcgccgccttcgccgcgtactgcttcctctccaccctcgcgttcaccgtcctcgacctcgtccgggggaaacgcggcagcagcagcgcggcgtcgccggcgcccggcgtccggggcatcaggaggaagtacctggtcccctaagcccgttcctgctcccctggtgctgctcgcgctcgcagggggc

SEQ ID NO: 109654 - DNA, 2085 bp, Zea mays
  Clone ID: MRT4577_31503C.1
agaataggaacccataccctaaacaggggttgggagtgatattaatagagtgagtaactgggccaggcccattacacagggggtataacggtcattacaaggggaataacacaaaccctagacgggtagtctaacacccccccgcagtcacaactctatcctgtacagatgttgagactggaacgaaagtctaagaatacactcgacggtagtcccttggtgaagatgtcggcgaactgcagcgtggtggggacgctgagaacccgaacgtcaccggcagcgacacgctcgcggacgaagtgcaggtcgatctccacatgctttgtgcgctgatgctgcacggggttggtggagaggtagaccgcgctgacgttgtcgcagtagacgagggtggcgcgctggaggggactgtggagctcgtggaggagctggcgcagccaggaggcctctgccacgccgttggccacggcacggtactcggcctcagcgctggagcgagagacgacgggctgacgcttggcggcccaagagacgaggttggcgcccaggaacacggcgtaaccggaggtggaccggcgcgtgtcgggacagccagcccagtcagcgtcggtgtagaccacgagctctgacgttggtgatggtcggagaagtaggccgtagtcgagggagccgcggaggtagcgcagaatccgcttgagcgcagtgaggtggggctcccgcggagtgtgcatatgcaggcacacctgctggacggcgtatgcgatgtcgggcctggagaaggtgaggtactggagcgcgccggtcaggctccggtaggacgtcgcgtcggcgaccggaggcccatcgtcctcagagagcttggcctgagtgtcgacaggcgtggagcagggcttgcagtcagacatgccagcccgctccaggatgtcgatggcgtactggcgctggtggaggaaaaggccctggggccggcgctcggcggtgatgccgaggaagtggtgtaggggccccaggtccttcatcgcgaactcccgctgaagggcgacgatcgtgcggtgtagaagatcggcggtggatgccgtgagcacaatgtcgtcgacgtagagcaggaggtagacggtgtcgtcgccgcgccggtagatgaacagggacgtgtccgacttggcctcgacgaagccgatggaggccaggtaggaggcgaagcgactgtaccatgcccgtggcgcctgcttgaggccgtacagggaccggttcagccggcagaccagatccggacggtcagcgtcgacgaagccggtgggctggctgaagtagacagtctccgtcagagtgccatgcaggaaggcattcttgacatcgagctgatggatcgcccagtcgcgggagagggcgagggagaggacggcgcgaacagtggcgaacttgacgacggggctgaaggtctcgtcgtagtccactccggggcgctgggtgaaaccccgaaggacccaacgggccttgtagcggtcgagggagccatccgaggtcagcttgtggcgaaatagccacttgccggtgaccacgttggtgcctggtggacacggcaccaggtcccaggtgtggttggccaagagggccgcgtactcctcctccatagcacgacgccaatgtggatcggcgagggtagcgcgaacggaggatggcacagggtatgcgtccggaggagtgcaggtcgtatccgctgccaggatcacccggtcgacggagcgaagaacgccagcggcgcgccgagtcaccatcgggtggacgtgccccgggtcgaggtggatggcgaccgggtggtacactgacgactcggagtgggccgccggaacgtcgggagcggcgggtatggccggctcgcggcggtgatagacgacaacggggttggcaaagcgggccgtgctcgtcgacgggcccgagtcggcaggcgccgaggtggcggtgtggctgcgacggtggtagacgagcgcggggtcggcgaagcgagtcggggtcgacggggccgcgtgtggcgcaggcgtgatcgacggggacgcccgtggcgcgggaatgggcccgagcggtggc

SEQ ID NO: 109655 - DNA, 388 bp, Zea mays
  Clone ID: MRT4577_31504C.1
aacagtcgtaactgataagagataaccgctcatatgggatgtggtgctatttgcgacagggcgcacaccaaactctcatagactgcacatgcaagctgcacgcgttgagattgaccgcgttgctgccatcaaggttgacgaatattttcgtacttttgctcctagtgaatgggctgtccgtgatgtaacaaaccagattaatctaacagcagtggcattagtgcaggcaactagctttgctaaaactgcgtttggtggacagcaagtgcagcctgatcacagagatgagcacttggctgcgttctgcatgccaccactatctgtcatgggcctctatgatgaacaggccttataggaagccaatggtgatactcttgttttcataata

SEQ ID NO: 109656 - DNA, 969 bp, Zea mays
  Clone ID: MRT4577_31505C.1
ggtagtcgtatcagctaccaagatcagccggtcgataggtcggagaacgccggcggcgcgccgggtcaccatcgggtggacgtgtccggggtcgcggtggatggcgaccgggtggtacaccggtggctcggggcggtctgccgggacgtcgggggccgcgagcgtggctgacgcgcgggggtgatagacgacggcgaggtcggcgaagcgcaccgggcttgtcgacgggcccgagtcggcaggtgccgaggtagtgacgtggcggcggcggcggtagacgagcgcggggtcggcaaagcgagccgtgggcgtcggcggggccgcgcatggtgcgggaggggtcggcggggccgcgcgtggcgcaggcgtggtcgaaggggccgcgcgaggcgcgggaataggcgcgagccgcgacgtcgaggacgcacggggtgcgggtaacggcgcaaggcggggcgcctgggaggagggggagaccgaatcggactcgaggagggagtcgagatcggtaggtggggaggggccagcaaggggaaacacattctcgtcgaagacgacgtgacgagagatgatgatgcggtgggaggcgaggtccagacaccgataccccttgtggtcagatgagtagccaaggaagaggcagcgggtggagcgaggagaaagcttatgaggtgcagtagcagaagtgttagggtagcaggcacaaccgaacacgcgaaggtggttgtaggtgggggttgtgccatacagggcgaagtagggagtagggtggcgcaccgccgtggagggaagacggttgagaaggtgggtggcggtgtgcagggcctctgcctagtagctggaagggagagacgcctggaagagaaggcagcggatcatattggtggtggtgcgaatcatgcgttcggcccgaccgttttgggcagaggtgtaggggcacgagagacgcaactggacgccatgagtgag

SEQ ID NO: 109657 - DNA, 713 bp, Zea mays
  Clone ID: MRT4577_31506C.1
ggagaaggtaccgcagccgcacaggcacagctcctgcggcatggcgcagtggagcagcgtggccgcgagcctggaccggtggattgggcttgggcttgggccatgccgctgcggctcaccgccggcaccgtcccgggcggcgatgccacggcgcgggcgtgcgaggaggaacggcggcaaggtcgtcggatgcgcgtccgtcccgcgggagcaggccgagctgccgccgcttgccgtcgacggcaccgaggaagaaggcgtaggcgggtgcggagcgtgcggcggcgcggggtgggtgctctgcgacttctgccagggcaagaagaacaacgtcaagtcggagaccggcagccgggtgtaccgccgctgccccacctgcaaggctgcgggcttcatcctgtgcccaagatgcagggtgtacaagtgcgtcaccttcccagagagcactgaatcgtgagcgtgtcatggtggtcgcacgtgtttgttccaaatccatgtatgagtctgcagaagagatctgtgtgaattactactattatcttctgaagatatttaaaggagaattattatattctgaccgtgtttacagtagaacacctgtctgtgcacgtatacagttttaatttcacacgcagagatgctcgctcttcctcaaaaaaaaaaaaaaaaaatttgcggccgccgacgcgtttcgatcgcctgacagaaaaaaa

SEQ ID NO: 109658 - DNA, 201 bp, Zea mays
  Clone ID: MRT4577_31507C.1
tcgtactgttttaaaccatccccactctttttttttcacccgcgagcggacacactccctgtcctcttggcccgataccggtcccggccggccggcccggcggcgggggcggttgttccgacgcttgggcccctgtgaacccgttggtgccacaaagggggctttgccacaaatggcggttccgggggtttttccggttcc

SEQ ID NO: 109659 - DNA, 213 bp, Zea mays
  Clone ID: MRT4577_31508C.1
actcgcccgcagtatatggtactatggatttcaggcatgtcgacaaacaccaacgaaacagctgagccgttcgcccattattacaagctgtcatacggaaacctgaccaagtattttcatgccactggaacaagcaaaattaggattcttcgcttgctacagagtctgcagacgtgcaacagtctaggccgcctgacgcctttgcctgagagt

SEQ ID NO: 109660 - DNA, 343 bp, Zea mays
  Clone ID: MRT4577_31509C.1
aaaaacaggaatccacaaacttttttattatccatggatggataggatagatcacacctaatcggattttggcccctttctcattgtatagacagaagtttattccactggtccaagacccttccaagagtacactttttttcgtcgcaagcacagttgttacacaatcctcattctgaccataattttttcgggactgggaggggcaatagccagccccaacaacatggggcgcctccctcggttaaagcaccaccccaaatctctggttgctttgctattaacgaggcccatgccaaataccggcaatatggccccccgggtggcggttcatttccccgcc

SEQ ID NO: 109661 - DNA, 199 bp, Zea mays
  Clone ID: MRT4577_3150C.1
catggtttgggcattctttatcattcacactctgtctttgcgcactcctttgtcattcttaatgatttgagctgcgttctaattagaaccggggtggtattcatttgagctccaggctttgctgggggtgtgtgtattgctgtggatttttgtgtattggttgcctcccttactctaatgctttcacttttaaccttat

SEQ ID NO: 109662 - DNA, 4411 bp, Zea mays
  Clone ID: MRT4577_31510C.1
aaacagtgttttatatatccatatacaaggtctgctgatttatatatccatatacacggtctgaagatgacctcatgacatgacatttccaagcagcactaatgaagctgaagcttcacgctccaccgaatattattactgtactcggtcgaactgaatttcattaccgaacagcaagaaaaaatgacaaaagttttcaagcgtcacgaagaaaattacataatgcaagaaactcagctgtttcaaacattcaggcaatccagttcttcctaaagcaaaactacacaagcaatcatatgcctgcaggatcgcaaactgggggctcgaattttcattcacccaacacaggattcaacagacttgcaatgtatacattagccacttggggcaagtaaaacttctggaacatctgtcatcgatcaaaaatatagcgaaatagcagccccagggcgcggaagtgttgggatagcatgcacagaaacacacaagaaagaaagaatcgaaatggaaggagcttttctcggtgaggcggttaacaacggtgggtagcggtgtgcacaaggctctgcatcctatctgtctgggagagatggtttcctgatgaaggcaatgaatcatattggtggtggtgcgaatcatacgctcggcccaaatgttctgggcagagttgttggggcacgagagacgcaactgaacgccactggggaggaagaatgagcgggaggaatgggaaaaaccctaaccctagaatagggttgggcagtgtattaatagaccaaataactgggccaggcccattacaagagacgggtatctaacacccccccgcagtcacaactctatcctgtacagatgttgagactggatcgaaagtccaaaaatacactcgacggtaaccccttggtgaagatgtcggcgaactgcagcgtggtggggacgctgagaacccgaacgtcaccggcagcgacacgctcgcggacgaagtgcaggtcgatctccacatgcttcgtgcgctgatgttgtacagggttggtggagaggtagaccgcgctgacgttgtcgcagtagacgagagtggcgcgctggaggggactgtggagctcgtggaggagctggcgcagccaggaggcctcggccacgccgttggccacagcacggtactcggcctcagcgctggagcgagagacgacgggctgacgcttggcggcccaagagacgaggttggcgcccaggaacacggcgtaaccggaggtggaccggcgcgtgtcgggacaaccagcccagtcagcatcggtgtagaccacgagctccgacgtcggggatggtcggagaaggaggccgtagtctagggagccgcggaggtagcgcagaatccgcttgagcgcggtgagatggggctcccgcggagtgtgcatatgcaggcacacctgctggacggcgtaggcgatgtcgggcctggagaaggtgaggtactggagcgcgccggtgaggctccgataggacgtcgcatcggcgaccggaggcccgtcgtcctcagagagcttcgcctgggtgtcgacaggcgtggagcaaggcttgcagtcagacatgccagcccgctccagaatgtcgatggcgtactggcgttggtggaggaagagaccctgaggccggcgctcggcggtgatgccgaggaagtggtgaaggggccccaggtccttcatggcgaattcccgctgaagggcgacgatcgtgcggtgaagaaggtcggcggtggatgccgtgagcacaatgtcgtcgacgtagagtaggaggtagacggtgtcgttgccgcgccggtagatgaacagggacgtgtccgacttggcctcgacgaagccgatggaggccaggtaggaggcgaagcgactgtaccaagcccgtggcgcctgcttgaggccgtacagggaccgattcagccggcagaccagatccggacggtcagcgtcgacgaagccggtgggctggctgcagtagacagtctccgtcagagtgccatggaggaaggcattcttgacatcgagctgatggatcgcccagtcgcgggagagggcgagggagaggacggcgcgaacagtggcgaacttgacgacggggctgaatgtctcgtcgtagtccactccggggcgctgtgtgaagccccgaaggacccaacgggccttgtagcggtcgagggagccatccgaggtcagcttgtggcgaaatagccacttgccggtgaccacattggtgcctggtggacacggcaccaggtcccaggtgtggttggccaagagggccgcgtactcctcctccatagcacgacgccaatgtgggtcggcgagggcagtgcgaacggaggagggcaccggggaagcgtcgggtggagtgctggacgtgtcagctgccaggatcagccggtcgacggggcgaagaacgccagcggcgcgccgagtcaccatcgggtggacgtgtccggggtcgcggtggatggcgaccgggtggtatacggacggctcggagtggaccgccggaacgtcgagagcggcgggtgtggccagctcgcggcggtgatagacgacggcggggtcggcgaagcgggtcgcgctcgtcgacgggcccgagtcgggggacgccgaggtagtggcgtggccgcggcggtggtagacgagcgtggggttggcgaagcgagccgggttcgacggggccgcgcgtggcgcaggcggggtcgacggggccgcgcgtggcgcaggcggggtcgacggggccgcgcgtggcgcaggcgggatcgacggggccgcgcgtggcgcaggcaggatcgacggggtcgcgcgtggcgcaggcgaggtcgacggagccgtgcgtggcgcaggcaggatcgatggggccgcgcatggcgcaggcatgatcgacgtggccgcgcgtggcgcaggcggggtcgacagggccgcgcgtggcacggaaatgggcgcgtgctgtggcgtcgtggctgcacgaggagcaggtaacggcgcaagacgaggcgccaggggtaggggggaaaccgagtcggactcgaggagggagtcaagatcggtgggtggggtggagcctgcaaggggaaacacatcttcatcgaagacgacgtgacgagagatgatgatgcggtgggaggtgaggtccaggcaccgataccccttgtggtcaggggagtagccgaggaagaggcagcgagtagagcgaggagaaagcttgttaggggcggtagcggaaatgttagggtagcaggcacagccgaacacgcgcaggtggtcgtaggaaggggttgtgccgtacagggcgaagtgaggtgtagggtggctcaccgccttcgagggaagacggttgaggagatgtgtggcggtatgaagggcctctgcccagtaggtggcagggagagacgcctgaaagagaaggcagcggatcatgttggtggtggtgcgaatcatgcgctcggcccggccgttctgagcagaggtgtagggacacgagagacgcaactggatgccgtgagtgaggaagaaagagcgggatgcgttgttgtcgaactcgcgaccattgtcgcactgcagggcacgaaccgggcgccgaaactgggtggatacccaggcgaagaagtgagtgagggtggtaaacgtgtcggacttcagccgaagggggaaagtccaaaggaaatgggagtagtcatccagaatgaccaggtagtatttgtagccggagaggctaaggacaggagatgtccagagatcacagtggacaagatcaaaggcttgaacagccctggacgtggaagtggaaaagggaagacgggagtgacggccgagctgacaagcatgacagaggcgctcagaagagccccgagtgtatgatatgtcggagtggccggaaagctgggacatgacgtcaggtccagggtgcccgaggcgacggtgccaaatggcggaggaggtggtggtagtagtaagtacaggagatgaggctactctggtgtggggagtggagggcaagtgaagagaatagagggggccggagctgtcacaacgagcgagcacagcatgtgtgggaaggtgacgtatggtgaggccccaggggtcgaactccatagagcactggttgtcactagtgaagcgacgcaccgaaaggaggggatgagtcagtccgggagcaacaaggatgtcgttaaggcagaatggtcctggaagaaccgatgtacctactgaggtgaccgggagggtggaaccgttgccgacgacgatagaggtaggatgtgaggggtggggtggatgggagtggagtaacgaattagtggtgggggtagtgtggaaggaggccccggagtcaaccacccaatcggtggtggttcgggaaggtggaagtggcgaaggaaaggtgtgag

SEQ ID NO: 109663 - DNA, 3854 bp, Zea mays
  unsure (1)..(3854): unsure at all n locations
  Clone ID: MRT4577_31511C.1
ctatcctgtacagatgttgagactggatcggaagtctaaaaagacactcgacggtaaccccttggtgaagatgtcggcgaactgaagcgtggtggggacgctgagaacgcggacgtcaccggcagcgacacgctcgcggacgaagtgcaggtcgatctccacatgcttcgtgcgctgatgctgcacggggttggtggagaggtataccgcgctgacgttgtcgcagtagacgagggtggcgcgctggaggggactgtgaagctcgtggaggagctggcgcagccaggaggcctcggccacgccgttggccacagcacggtactcggcctcagcgctggagcgagagacgacgggctgcctcttggcggcccaagagacgaggttggcgcccaggaagacggcgtagccggaggtggaccggcgcgtgtcgggacagccagcccagtcagcgtcggtgtagaccacgagctccgacgtcggggatgggcggagtaggaggccgtagtcgagggagccgcagaggtagcgtagaatccgcttgagcgcagtgagatggggctcccgcggagtgtgcatgtgtaggcacacctgctggacggcgtaagcgatgtcgggcctggagaacgtgaggtactggagcgcgccggtgaggctccggtaggacgtcgcgtcggcgaccggaggcccgtcgtcctcagagagcttcgcctgagtgtcgacaggcgtggtgcagggcttgcagtcagacatgccagcccgctccaggatgtcgatggcgtactggcgctggtggaggaagagaccctgaggccgacgttcggcggtgacgccgaggaagtggtggaggggccccaggtccttcatcgcgaactcccgctgaagggcgacgatcgtgcggtgaaggaggtcggcggtggatgccgtgagcacaatgtcgtcgacgtagagcaggaggtagacggtgtcgtcgccgcgccggtagatgaacagggacgtgtccgacttggcctcgacgaagccgacagaggccaggtaggaggcgaagcggctgtaccaagcccgtggcgcctgcttgaggccgtacagggatcggttcagccggcaaaccaggtccggacggtcagcgtcgacgaagccggtgggctggctgcagtagacagtctccgtcagagtgccatggaggaaggcattcttgacatcgagctgatggatcgcccagtcgcgggagagggcgagggagaggacggcgcgaacagtggcgaacttgacgacagggctgaaggtctcgtcgtagtccactccggggcgctgggtgaagccccgaaggacccaacgggccttgtagcggtcgagggagccgtctgaggtcagcttgtggcgaaatagccacttgccggtgaccacgttggtgcctggtggacgcggcaccaggtcccaagtgtggttggccaagagggccgcgtactcctcctccatagcgcgacgccagtgtgggtcggcgagggcagtgcgaacggaggagggtaccggggaagcgtcgggtggagtgctggtcgtagcggctgccaggatgagccggtcgacggggcggagaacgccagcagcgcgccgagtcaccatcgggtggacgtgcccggggtcacgatggatggcgaccgggtggtatacggatgactcggagtgagccaccggaacgtcgggagcggctggaggggccggctcacggcggtgatagacgacggcggggtcggcgaagcgggccgcgctcgtcgatgggcacgcgtcggggggtgccgaggtagtggcgtggccgcggcgatggtagacgagggcggggttggcgaatcgagccggagtcgacggggccgcgcgtggcgtaggcggggtcgacggggccgcgcgtggcgcaggcgggatcgacggggccgtgcgtggtgcaggcaggaccgacggggccgcgcgtggcgcaggcggggtcgacggggccgcgcgtggcgcaggcggggtcgacgggtccgcgcgtggcgcaggaggggtcgacggggccgcgcgtggcgcaggcggggtcgacggggccgcgcgtggcgcggaagaggtcgtgggggccgcacgaggagcaggtaacggcgcaagacggggagccgaaggtgggggaggaatcggatcggactcgaggagggagtcaagatcggtgggtggggtggagccagcaaggggaaacacatcttcgtcaaagacgacatgacgagagatgatgatgcggtgggaggtgaggtccagacaccggtaccccttgtggtcaggggagtagccaaggaatagacagcgggtggagcgaggagaaagcttatgtggagcggtagcggaagtgttagggtagcaggcacagccgaacacgcgaaggtggtcataggaaggggctgtgccgtaaagggcgaagtggggggtagggtggcgtaccgccttcgagggaagacggttgaggaggtgggtggcagtatgcagggcctctgcccagtagctggcagagagagacgcctggaagaggagacagcggagcatattagtggtggtgcggatcatgcgttcggctcggccgttctgggcagaagtgtaggggcacgagagacgcaactggacgccatgagtgaggaagaaggagcgagaggcgttgttatcgaactcgcggccattgtcacactgcagagcacggaccgggcgacgaaactgagtggatacccaggtgaagaagtgtgtgagggtggtgaaagtgtccgacttcaaccgaagcgggaaggtccagagaaaatgggaaaaatcatccaaaatcaccagataatatttataaccagaaagactgagtacaggggaggtccaaaggtcacaatgaaccagatcaaaagcctgctcagcccgagaagaagaagtagtaaatgggagacgagtatgtcggcctaactgacaagcatgacagagaccctcaaaatgtcccctactacatgaaagatcgagactactggtaatcttggtcatgacgtcgggtccaggatggccgagacgtcgatgccatgtggtggaggaggtggtggagaccaaggcaggaggtggagacacgccggcggtggagggctggagcgtgtagagaggccccgagctgtcacagcgggcgagaagggtcctggtggccagatccttcacagaaaaaccagaggggtcaaactcaatggaacaagagttgtcagtagtgaatcgacgaacagaaagaagattgtgggtgatgtggggagctacgagaacatcgttgaggtaaaacggcctaggaagaaccgaggcacctactgaggtgactggcagagtggaaccgttgccaacgacgatcgaggatgggtgagaggggagtgggggatgagagcgagagagcgtgcctgccgtgggggtggtgtggtacgaggcaccggagtcgatcacccagtcggaggggggtggggtcatcgccatggtgctgaaagcagcagcgagggaggtgctgtcccaaccaccagccggcggggaccaaggcgtcgaggtgtgggtccccgggggcaggagcgcgggcggagcctggggcgcgacgggaacaccataaggaggtgcgccgtagtgaggtgtagtcaggagggcgggcgccggaggacggggggtactcggtgcctggcccggccacatggcgatggtcccggtccaggggttgtagaatgacggccacgcgtggccgccaccccggccggaaggaccaccacgagaggagccgcccgttccacggncggcctcgcgggagcgacgacccccgtgggtcgtggaaagtggacgagggg

SEQ ID NO: 109664 - DNA, 665 bp, Zea mays
  unsure (1)..(665): unsure at all n locations
  Clone ID: MRT4577_31512C.1
gaaggcccaagggccttgtagcggtcgagggagccgtccgaggtcagcttgtggcgaaataaccacttgtcggtgaccacgttggtgcctggtggacgcggcaccaggtcccaggtgtggttggccaagagggccgcgtactcctccatagcacgacgccaatgtgggtcgacggggcgaagaacgccagcggcgcgccgagtcaccatcgggtggacgtgctcggggtcacggtggatggcgaccgggtggtatacggacggctcggagcggaccgtcggaacgtcgagagcggcgggtatggccggctcgcggcggtgatagacgagcgcggggttggcgaagcgggccgcgctcgtcggggccgcgcgtggcgcaggcggggtcgacgttgccgcgcgtggcgcaggcaggatcgacggggccacgcgtggcgcaggcggggtcgacggggccgcgcgtggcgcggaaatgggcgcgagcggtggcgtcgtggccgcacgaggtgcaggtaacggcgcaaggcggagcgccgggggtggggggaccggattggactcgaggagggagtcaagatcagtgggtggggtggagccagcaaggggaaacacatcttcgtcgaagacacgtgacgagagagatgatgcagtgngaggtgaggtccc

SEQ ID NO: 109665 - DNA, 3075 bp, Zea mays
  Clone ID: MRT4577_31513C.1
ctatcctgtacagatgttgagactggatcgaaagtctaaaaatacactcgacggtaacccctttgtgaaaatgtcggcgaactgcagcgtggtggggacgctgagaacccgaacgtcaccggcagcgacacgctcgcggacgaaatgcaggtcgatctccacgtgcttcgtgcgctgatgctgcacggggttggtggagaggtagaccgcgctgacgttgtcgcagtagacgagggtggcgcgctggaggggactgtggagctcgtggaggagctggcgcagccaagaggcctcggccacgccgttggccacggcacggtactcggcctcagcgctggagcgagagacgacgggctgcctcttggcggcccaagagacgaggttggcgcccaggaagacggcgtagccggaggtggaccggcgcgtgtcgggacagccagcccagtcagcgtcggtgtagaccacgagctccgacgtcggggatggccggagtaggaggccgtagtcgagggagccgcggaggtagcgtagaatccgcttgagcgcagtgagatggggctcccgcggagtgtgcatatgcaggcacacctgctggacggcgtaggcgacgtcgggcctggagaacgtgaggtactggagcgcgccggtgaggctccggtatgacgtcgcgtcggcgaccggaggcccgtcgtcctcagagagcttcgcctgagtgtcgacgggcgtggagcagggcttgcagtcagacatgccagcccgctccaggatgtcgatggcgtactggcgctggtggaggaagagaccctgaggccgacgttcggcggtgatgccgaggaagtggtggaggggccccaggtccttcatcgcgaactcccgctgaagggcgacgatcgttcggtgaaggaggtcggcggtggatgctgtgagcacaatgtcgtcgacgtagagcaggaggtagacggtgtcatcgccgcgccggtagatgaacagggacgtgtccgacttggcctcgacgaagccgacggaggccaggtaggaggcgaagcggctgtaccaagcccgtggcgcctgcttgaggccgtacagggatcggttcagccggcaaaccaggtccggacggtcagcgtcgacgaagccggtgggctggctgcagtagacagtctccgtcagagtgccatggaggaaggcattcttgacatcgagctgatggatcgcccagtcgcgggagagggcgagggagaggacggcgcgaacagtggcgaacttgacgacagggctgaaggtctcgtcgtagtccactccggggcgctgggtgaagccccgaaggacccaacgggccaggtcccaagtgtggttggccaggagggccgcgtactcctcctccatagcgcgacgccagtgtgggtcggcgagggcagtgcgaacggaggagggtaccggggaagcgtcggatggagtgctggtcgtagtggctgccaggatgagccggtcgacggggcggagaacgccagcagcgcgtcgagtcaccatcgggtggacgtgcccggggtcgcgatggatggcgaccgggtggtatacggatgactcggagttagccaccggaacgtcgggagcggctggaggggccggctcacggcggtgatagacgacggcggggtcggcgaatcgggccgcgctcgtcgacgggcccgcgtcggggggcgccgaggtagtggcgtggccgcggcgatggtagacgagggcggggttggcgaatcgagccggagtcgacggggtcgcgcgtggcgcaggcaggatcgtcggggccgcgcgtggcgcaggcggggtcgacggggccgcgcgtggcgcaggcaggaccgacggggccgcgcgtggcgcaggcatgatcgtcgtggccgcgcgtggcgcaggcggggtcgatggggccacgcgtggcgcggaaacgggcgcgagctgtggcgtcgtggctgcacgaggagcaggtaacggcgcaagacggggcaccgggtgtgggggtggaaccgggtcagactcgaggagggagtcaagatcggtgggtggggtggagccagcaaggggaaacacatcttcgtcgaagacgacgtgacgagagatgatgatgcggtgggaggtgaggtccaggcaccgataccccttgtggtccggggagtagccgaggaagaggcaacgggtggagcgaggagaaagtttgttaggggcggtagcggaaatgttagggtagcaggcacagccgaacacgcgcaggtggtggtaggaaggggatgtgccgtatagggcgaagtgaggtgtagggtggctcaccgccttcgagggaagacggttgaggagatgcgtggcggtatgaagggcctctgcccagtaggtggcagggagagacgcctgaaagaggaggcagcggatcatagccactggcatgttggacaatgctaccaggtcagatggaacttctagtgttagcttgaacttggccttaaatgcaggatcatcccaacatggaaagcacctccgtgcatcagcggcttcaaactgtgtaactgccatatttcttgactctccattgtacacatatttgctcctgtaaaatcccctcatctgatcgttgagcgtgccggtgaagtccatggtgagcacgccctctccgaagggcagctcccggtcgaagctgatgaccatgatctcatcctcatcgaactgagccacatctgtcggcgccaaatcctggaaacggatggaggcgcgatcgacatccagctcggcagcgttgaggacgaggaagcgggtgggcgcggacacgacaacggcgatggccgcggcgcccgtgaaggtgcacgcggcgaggtccgggcggaggcggaggtcgtagcggagcggggccgcgaagtgcgggaggcgcgcatgcccccggaattggtccggcgaggccgccattgcagctggtgcggagggagggcgaccgaggagcggcggcgtgcggcggtggaggtggacttgtgtgacgaggaaagtgcggaaacggcgacggtagggagctaccttcggacttaaatcaaaacc

SEQ ID NO: 109666 - DNA, 486 bp, Zea mays
  Clone ID: MRT4577_31514C.1
gggaaaaaagagaggtcaccattcccgggaaaggggcaaaaacaactttttttttttggaatttaacaacccccccccgtaacaaagttagggggatttaaacccaaaaggagaaaacctccccctggcccggcgaaaaagaccccctttatttgggttggggcccccctaacccaggacccccccggataaaccccccccccaactttaaaattcggggtacaaaaacccccccggaataaaaaagggggggcctccaggggaacccccaacccaaccaggtttttaaacccctatttaacccccacctcgggacccaggcggccgggggttggttccccaaccccccttttttttttctaaccaaattttgggggggggggggtccctagggaaagcaaaatccgggttagaaaaatttttgggcccacccaaccggagaaaatttttaccctgggaaagggggcggccaaaaactatccaaaa

SEQ ID NO: 109667 - DNA, 705 bp, Zea mays
  Clone ID: MRT4577_31515C.1
cggtacctacgacacccttcgcgtgttcggttgtgcctgctccctaacacttccgctactgcccctcataagctttctcctcgctccacctgctgcctattccttggctactcctctgacccaaggggtatcggtgtctggacctcgcctcccatcgcatcatcatctctcgtcacgtcgtcttcgatgaggatgtgtttccccttgatggcccctcacgcgacccactgacctcgactccctcctcgagtccgatccggtctccccctcctcccaggcgccccgccttgcgccgttacccacaccccgtccggcctcgacgccgcgactcgcgcctattcccgcgccccacacggccccgtcgaccacgcctgcgccacgcgcggccctgtcgaccacgcctgcgccacgcgcggccccgctgaccccccccgttgatcaggcctgcgccaggcgcagccccgtcgacgcccacggctcgcttcgccgaccccacgctcgtttatcaccgccgctgccacgtcactacctcggctcctgctgacccgggcccgtcgacgagcccggtgcggttcgccgaccccgccgtcgtctatcatcgccgcgagtcggccacgcccgcggccctcgacgtcctggtagaccaccctgagccaccggtgtaccacccggtcgccatccaccgtgaccccgggcacgttcacc

SEQ ID NO: 109668 - DNA, 666 bp, Zea mays
  Clone ID: MRT4577_31516C.1
atactttccatctacagtccccgttcgcgttacttctctagccgcgaatagatcacacagtgcctgctctcctcgtgaatcgccttacatggctccgtggctgtctgacgaagataatcgtcaagaagtccgtgaagctgttactcagcgcccactacgaacgccacgagtggcttaagtcctggtggccaattccgatcggaattcatgacctggccgggcggaagttgcaggaatgcgactcttaatgcccaaccttgtgtatggttgtgacaagtcgactacgtagtacctcccgagagggcgtcacaaggttgtgggccacgatggtagatgaacatggacgtgctcgtgatgcacgagaggactcactgcgctgaacctgcgcttagatctgtccgctcttaacgttacaggacactgagcatcatgctgtacagctccagcttctggttgctctagagcttgctatgctccataacagggaagtctgtgagtatgatctactgcctcaacggctacatcttcggtgacatcgatgagctcaagtgacgactttgctagtgcgttggtagaaatcagatacctatcgacttccagctatttgcaagtagtactcaacgctacgtgctacatcctactgttgaccgtgcatgtatccatata

SEQ ID NO: 109669 - DNA, 1677 bp, Zea mays
  Clone ID: MRT4577_31517C.1
atggtgactcggcgcgccgctggcgttctccgccccgtcaaccggctgatcctggcagctgctacatccagcactccacccgacgcttccccggtgccctcctccgttcgcactgccctcgtcgacccacattggcgtcgcgctatggaggaggagtacgcggccctcttggccaaccacacctgggacctggtgccacgtccaccaggtaccaacgtggtcaccggcaagtggctctttcgccacaagctgacctcggatggctctttcgaccgctgcaaggcccgttgggtcctttggggcttcacccaacgccccggagtggactacgacgagaccttcagtcccgtcgtcaagttcgccactgttcgcgccgtcctctccctcgccctctcccgcgactgggcgatccatcagctcgacgtcaagaatgccttcctccatggcactctgacggagactgtctactgcagccagcccaccggcttcgtcgacgctgaccgtccggatctggtctgccggctgaatcggttcccgtacggcctcaagcaggcgccacgggcttggtacagtcgtttcgcctcctacctggcctccatcggcttcatcgaggccaagtcggacacgtccctgttcatctaccggcgcggcgacgacaccgtctacctcctgctctacgtcgacgacattgtgctcacggcatccaccgccgaccttctacaccgcacgatcgtcgcccttcagcgggagttcgcgatgaaggacctgggacccctccaccacttcctcggcatcaccgccgagcgctggcctcagggtctcttcctccaccagcgccagtacgccattgacatcctggagcgggctggcatgtctgactgcaagccctgctccatgcctgtcgacactcaggcgaagctctctgaggacgacgggcctccggtcaccgacgcgacgtcttaccggagcctcaccggcgcgctccagtacctcacgttctccaggcccgacatcgcttacgccgtccagcaagtgtgcctgcatatgcacactccgcgggagccccacctcactgcgctcaagcggattctgcgctacctccgcggctccctcgactacggcctccttcttcgcccatccccgacgtcggagctcgtggtctacaccgacgctgactgggctggctgtcccgacacgcgctggtccacctccagttacaccgtgttcctgggcgccaacctcgtctcttgggccgccaagcggcagcccgtcgtctctcgctccagcgctgaggccgagtaccgtgccgtggccaacggtgtggcagaggcctcctggctgcgccagctcctccacgagctccacagtcccctccagcgcgccactctcgtctactgcgacaacgtcagtgcggtctacctctccaccaaccccgtacagcatcagcgcacgaagcacgtagagatcgacctgcacttcgtccgcgagcgtgtcgctgccgggtcatgggtacacattccaacagtcccaagaatagatccacctgtccttgccatgcataatcccttggactgccatgattgtgtccaaaaaggtgatgtattcctcatagggttcgttggacatcggagtgtgaaagttgtcacggaaattggtgccttacaagaattgagctag

SEQ ID NO: 109670 - DNA, 1133 bp, Zea mays
  Clone ID: MRT4577_31518C.1
tgatcatcataatcccaattcgaatatgaaattatttattggtcttgtacttttattttttgtatgttcatctttcgcaggagatgttctcgaattaactcctgaaaactttgataccgtccttgatggatccagaccagcattggttgaattctttgctccatggtgtggacattgcaaaaatttggctcctgaatatgaaaaattggcaactgcattcaaaaaagcaggagataaagtggtcattgcaagcgttgatgcagataaatacagagaacttggatcaagattcgatgtcaaaggattcccaaccattttctacttcaaatctggaaatgttgctgaaaaggaacaatacaatggagatagatctgcagaaggaatggcaaaattcatcaatgaacaagctggaactaatgcaagaattgttaaacctccttcattcgtcaaagttttggatgcaaccaattttgattctattgttggagattcttccaaaaacgtcctcgttgaattctatgctccatggtgtggacattgcaaatcccttgctcctaaatatgaagaacttggagcagtttacagcaacgaaaaggaagttgtcattgcaaagatcgattgtgatgcagaaggaaacaacgcaattgcaagcagatttggagtcactggattcccaaccttgaaatggtttcctaagggaagaaagagcgaaaaggaagaagaagcatacaatggagaaagaactgttgaaggatttgtcaacttcatcaatgaacgtgcaggaaccaagagaaccattgctggaggattcaaggaggattatggaagactttccttctttgatgatctcgtcaacactcttgttgcaggagataactctgctattgcagctgcagaaaacaaagcaaaagaactcactggacaagatagagaattcgcagatatttatgttagattcatgaaggtttaccaaaaacgtggatcttctttccctaaagaagaaatccaacgtcttggacgtctcctccaaggatctggagtcactcgtgcaaagagagatgaatttgttctcaaaaccaacattctcacctctttcaccgattaaatttattattaattaaaaaatttacagt

SEQ ID NO: 109671 - DNA, 659 bp, Zea mays
  Clone ID: MRT4577_31519C.1
atggccgccgccgccggtcaccacgtcgccgccggggctcccaccgcggccagcacgcgtgctgccgacctcgctgctgtgcacaggacagccgcagccacctccgtcgagcaccacaacgccgccggggctcccaccagggccagcacgcgtgctgccgacttcggcccctccggatttggcctcccgggctacccgacatgcgccggcgtcttcacctgtctaccctcgccaacacgtctcaccggacacccgccccctgggttcccccccactcggccgctcgtcgccgacgccacctgggcttctccgccgccctccaccgactccatgctgccatccaccatcgccgccatccaggcggccctagccgcctcgcaggagcgcgagcgtgccgcgtctcgtgctctggaccaggagcgcgccctggccgccacactgaccgcccagatggccactgtgcagcgtctcatcctcagccctcctccggtcgactcggggacaccaccgccaccccagatgctacccacgcctctggactcgaggctgaccacatcgccgctctccatgcccaggccgccggactacagaacatctggtccctcgtgtccgtcgttttggacccggcgtcctctcactaccctcgctggagggggcag

SEQ ID NO: 109672 - DNA, 717 bp, Zea mays
  Clone ID: MRT4577_3151C.1
ccggcccccctttctcgccccctgctttcccccttcaggtaatatgatggagaccccagagactatctcaaaaggcgacacagccaagacggttgaagtctgttcagcacacgggatcacgtcgaacgagttctcagagctccgtgagcgtgcagttgcagccaaggccacagcgtactgtccatacagccagttccgcgtcggagcaacggtcctctcaagtgagggtgagctcacgagcggcgcaaatgtggaaaacgcggcgtatcctgtgggaacatgtgcagagcgcgtggcccttggtacagctgtgacaagcggccatcgtgggttccgagccattgctgtcgcaactgatattgcgccatcggcgagtccatgtggaatgtgtagacagtttattcgcgagttttgcacactggatacacccattatcatgttcgataagaatgaggattttgtgattgcaaaactgcgacagcttttgccaatgtcttttggacctgaccagcttccacctccgggagcaccaggaacaagatgaaaggatacttgggacacatcagtgtcttgcatattgttgttggatatgaatggatcacggcgatatcatgtgagagtatctgttctctgcgagcgcaccaggaaactttgggtactacatccttccttagcctgcgtctctatgtgtatcaatggttgatagactgagctgca

SEQ ID NO: 109673 - DNA, 297 bp, Zea mays
  unsure (1)..(297): unsure at all n locations
  Clone ID: MRT4577_31520C.1
aataaataaacgcgcccttttcataccaaaaatagcaatgaaatttcctcgggcggcgtgcggctgcgcagatccgtacgccgacccaggccagggcgcccaaattaggcaaattccgcccgggatcgacagaattgggtcggaatcggctcagatcgatggagtcgggagaggggcgcccaccttggctgatccgtcgtggaggcccatgacgaggcgcacttcttctcgcggcggccggagccggagcgtngcccatcgtcgtcctcgtccgcggaccggcgctcctgcggttgg

SEQ ID NO: 109674 - DNA, 272 bp, Zea mays
  Clone ID: MRT4577_31521C.1
ggggcccggtaggcaaaaaaaaaacaggggtgtttttttttgaaattccaagggaagccccgcctgcctttgtcaaaatgaaaccaaaatctaccgccgccgccgttgtaatagggttcccggggggggggggggtctaggggggggggttgaaagggagcccttgacattgggggggtgggcaaaaatggttagtgatcctgggcggaccaggagagcgagaggatttccccctaaaggaaggggttccaggtgttggggagtcccggggg

SEQ ID NO: 109675 - DNA, 177 bp, Zea mays
  unsure (1)..(177): unsure at all n locations
  Clone ID: MRT4577_31522C.1
gtcantgcagnctgattttgcnacttgatgcccgtgtagatgatgttaactgtggaaaaccttancttggaggtacacctgnttgncanngccnaatgcncccatatannatcccngatgggntggaggactatgcatatccttgctnctgctacancggnagccatacctgntgtt

SEQ ID NO: 109676 - DNA, 2154 bp, Zea mays
  Clone ID: MRT4577_31523C.1
gaattctctagaccagtgtgctctaaagcgacaatggccgcgagttcgacaacaacgcctcccgttctttcttcctcactcacggcgtccagttgcgtctctcgtgtccctacacttctgctcagaacggccgggccgagcgcatgattcgcaccaccaccaacatgatccgctgccttctcttccaggcgtctctccctgccacctactgggcagaggcccttcataccgccacacatctcctcaaccgtcttccctcgaaggcggtaagccatcctacacctcactttgccctgtacggcacaaccccttcctacgaccacctgcgcgtgttcggctgtgcctgctaccccaacacttccgctaccgcccctcacaagctttctcctcgctccactcgctgcctcttcctcggctactcccctgaccacaaggggtatcggtgtctggacctcacctcccaccgcatcatctctcgtcacgtcgtcttcgacgaagatgtgtttccccttgcaggctccaccccacccaccgatctcgactcactcctcgagtccgatccggttctccccacccccggcgccccgccttgcgccgttacctgtacctcatgcggccacgacgccaccgctcgcgcccattcccgcgccacacgcggccccgtcgaccccgcctgtgccccgcgcggccacgtcggccacgcctgtgccacgcgcggccccgtcgatcatgcctgcgtcacgcgcggccccgacgaccacgcctgcgccaagcgcggccccgtcgatcctgcctgcgccatgcgctgccttgtcgaccctgcctgcgccacgcgctgccttgtcgaccccgcctgcgccacgcgcggccccgtcgaccccggctcgcttcgtcgaccccgcgctcgtctaccaccatcggccggtcacgccgctacctcggcgcctgccgactcgggcccatcgatgagcgcgaaccgctttggcgaccccgccgtcgtctatcaccgccgcgagccggccatacccgtcgctcccgacgtttcggcggtccgctccgagccgtcagtgtaccacccggtcgccatccaccgcgaccccgagcacgtccacccgatggtgactccgcgcgccgctggcgttcttcgccccgtcgaccggctgatcctggcagctgatacgacctgcactccaccggacgcatccccggtgccctcctccgttcgcactgctctcgccgacccacattggtgtcgtgctatggaggaggagtacgcgaccctcttggtcaaccacacctgggacctggtgccgtgtccaccaggcaccaacgtggtcatcggcaagtggctatttcgccacaagctgacctcggacggctccctcgaccgctacaaggcccgttgggtccttcggggcttcacccagcgccccggagtagactacgacgagaccttcagccccgtcatcaaattcgccactgtctgcgccgtcctctccatcgccctttcccgcaactgggcgatccatcagctcgacgtcaagaatgccttcctccatggcactctgacggagactgtttactacagccagcccaccggcttcgtcgacgccgatcgtccggatctggtctgccggctgaaccgatccctgtacgacctcaagcaggcgccgcgggcatggtacactcgcttcacctcctacttggcctccatcggcttcgtcgaggccaagtcggacacgtccctgttcatctaccggcgtggcgacgacaccgtctacctcctgctctacgtcgacgacattgtgctcacggcatctaccgccgaccttctacagcgcacgatcgtcgcccttcagcgggagttcgcgatgaaggacctgtggcccctacaccacttcctcggcatcaccgccgagcgccggcctcagggtctcttcctccaccagcgccagtacgccatcgacatcctggagcgggctggcatgtctgactgcaagccctgctccacgcatgtcgacactcaggcaaagctctctgaggacgacaggcctccggtcgccgacacgacgtcctaccggagcctgaccggcacgctccagtacctcaccttctccaggctcgacctttagagcacactggtctagagaattc

SEQ ID NO: 109677 - DNA, 364 bp, Zea mays
  Clone ID: MRT4577_31524C.1
ttgtgggttttttttttatttttttttttttttttcccctctttttttttttttttttatctttgggaaattggaaaaccagaaaactggaaccctattccatccattacaagggatatcagggcccccctggggaatgggaaaaaaaaaaatatttggcccggaggcattttgagaaacctggcccaaatttatcacttttttccccaactaaaattcccccaggaccggagctatcacccccagagttaacaaaagccccaagggtttttttcacccgcccacctggttgggccccctggtggggcactatttttaaaggctttaatttttcccttattgccggtgcttttgtgcctttacc

SEQ ID NO: 109678 - DNA, 581 bp, Zea mays
  unsure (1)..(581): unsure at all n locations
  Clone ID: MRT4577_31525C.1
tcgagcggccgcccgggcaggtttaaaaaaaaaaaaaaaaaaaaaaaaaaaaaaaaaaaaaaaaaaaaaaaaaaaaaaaaaaaaaaaaaaaaaaagaaaaaaaaaaagaaaaaaaattttacttaccccaaaaaaacacataaggaaaaaattgttttgttcttcgtccggggccccgtttggggctttttttgcaattttccttcgggttggttgtcgtttttcctttctttttgggggcccttttccctttttttgggggggctttacattcccttggccggggtttttcaaattggtttgggggaaacccctgtttttccccattttattccccttggggtcccccccctttttcccttttggctattttcccttttggcccgttcggttggcctttccaagcagtggcccattttgtttggcaattgtgcgccccctgtacggggccattaccccccctttttttggcgttttcccccggggggccggtttcttttcccacccccttacccccccttttttttgttcttttccctcctttacttgcgggtttccccggtttttcccgnaaagtttta

SEQ ID NO: 109679 - DNA, 129 bp, Zea mays
  Clone ID: MRT4577_31526C.1
ttaaatcgcggacctttactttaggattgagataggccctgtctagtctggggagatacatggtgttgcttacgcataccaataggggatgaaccaaatgcgtgcattgggattgcgatctattctacg

SEQ ID NO: 109680 - DNA, 405 bp, Zea mays
  Clone ID: MRT4577_31527C.1
gcgccggaaattcccgggtgcgacccacgcgtccgatagcgtcgccctaggacacataactggggggtgtgatgagacaaggctcttgtccctacaatgcggaccggcatctactgtaggagggaaagggaccgacgccaattattccgcaaggccggacacacctagagctgtacagaaagcaaaacccccgtaatgttccgggaaccacctgggatttagaggtggtgagccccatgaaaatcatgggctgtatctttaaccaccacagatcagagcgataaggacttttactcacggaaacatatggtaacgtggcagatataaaaaaatccgggcgagccgaggtatgacctcttgaacaggtcagcgggtctatacggggaaaaagctacctataacaga

SEQ ID NO: 109681 - DNA, 258 bp, Zea mays
  Clone ID: MRT4577_31528C.1
cgaccccgcgtccgccctcttttcccctgccgcgtgcgtagagtagctgcggctgttggcgcaagctcattcttgctgctgtgtgctgcgcgagcaccgttctgacagagatcgaacttggtgcgtgaatgcgaaggcggggtacgtgtcaacctcttaaaggggttcttaggcgggtggctgctccctctgctctttgcttattcctgggtggcggggcttgatggtctttcttgccggtcggttgcaccccctccc

SEQ ID NO: 109682 - DNA, 232 bp, Zea mays
  Clone ID: MRT4577_31529C.1
cggacgcgtgggtgtgaatctacatggatcagccaaaaatttaccagcttcatgtgcctgaaagccaaagcattcacctgagctgtggatgttcccacagcatgtcgtgccgactatgcgcacaccattgtgcatacttaatgcatcctacgattcgtggcaagccaagaacgttctaacacctagttcagttgatccgaataagacttgggcccaattgcaagcttgacat

SEQ ID NO: 109683 - DNA, 171 bp, Zea mays
  Clone ID: MRT4577_3152C.1
tcgacactctcaagttgaaatgccctgtccacattgtcggatgattagactccatcacccgacggtcaatagcctggtaagcaaggctggatcggctccgaaagccgatccggtcgagcctcagcatgtgtgcgaccatgccttaggcactggcgcccactgctttatctg

SEQ ID NO: 109684 - DNA, 312 bp, Zea mays
  Clone ID: MRT4577_31530C.1
gtcaacgtccgcaaatacctccagcctcgcatggaacatcatagaaactcaaaactggtagggccaacagattaacattcttcatcaacatatttttcgtctttaatctcatagctatttctgcatgcgttgcttacgctacaaatcagccttaatgctcacaacctcatatagcttacctaatagcgagatacctcttatcaatgatagcttacattattctaaaacccagcttttcatccatataggctacatccatccacttcatcacgcaacatacctatatcacccttcttgactcaactataatca

SEQ ID NO: 109685 - DNA, 658 bp, Zea mays
  unsure (1)..(658): unsure at all n locations
  Clone ID: MRT4577_31531C.1
ccgcgtcgacttttttttttagtatagaaacgtatttcgaaacgattaacgcgctaataaatacattttttttatttcaaaaatcgaactgttattttatccccgtgtaaaacgacgcaaaaatcgtctcgatatgtacaaaaagaaaaaacacataggttttcttcagtataaatgaacataaagcgtgattgtaattttgattttgtatgtttgtgggtaggtgatgacttagaagcatttacggtggacaatgcctgggccggattcgtcgtattcttgtttggagatccacatctgttggaaggtggacagagaagccaagatggaaccaccgatccatacggagtatttacgttctggtggggcaatgatcttgattttgattgtgcttggggccaaagcggtgatttccttttgcattctgtcggcgatacctgggtacatggtggtacctccggaaagtacagtgttggcgtacaagtccttcctgatgtcaacttcgcacttcatgatggagctgtatacggtttcgtggataccgcaagattccattcccaagaatgaaggttggancaaggcttctgggcaacggaaacgttcgtttccgatggtgatgacctgtccgtcaggtaattcataggatttctccaatgag

SEQ ID NO: 109686 - DNA, 122 bp, Zea mays
  Clone ID: MRT4577_31532C.1
tcatttgataggtcccataccgcttaatcattgacctgacagtccattatgatcccagggaatcatgcgggaactttctattctattttagcaccatgactttccataaaaatggttttact

SEQ ID NO: 109687 - DNA, 370 bp, Zea mays
  Clone ID: MRT4577_31533C.1
ttttctcttttttttttttttttttttttttttttttcggttggtttaaacaagccaacatttcccccccaaaaaaatccattttccttcggacccccaaattcattaccatcacaaccattacatgcccaagggtgcctatacttaataatgtcccgtcaaaaactaaaagggcctcaccatcactcttccgcttataacaaaattttgtccattggaaaattctaacataaccataaaaaaatggcaaaaaatgaattttggatcttaacaacatctttcacaccaccgcatcacaaccggaaaaaagggccatttcacccctcctcctggctgaaaaacctggcaagcctgttggagaccaccattt

SEQ ID NO: 109688 - DNA, 764 bp, Zea mays
  Clone ID: MRT4577_31534C.1
caacaagggctaccgcccaccggccaccaccccacgcgcgtctcacgccatgggcagcgcgtcgtccccgccatcgcacaggcggtggagctggggctcggcgctggcgggcgcggcgacgacggccgccgccacggccctagtgctgtgccggccgcgggacccgcggttcgagctcatctccatcagcctgtccgccttccacttccgcccgccggcggcgctggacatcgggctcaccctcaccgtgcacgccaccaaccccaacgtcgtgcccgtgcgctacgggccctccaccgtctccatcctctacggcggcgcgcacctcggcaccgcccgcctcgacgccggcgagcagcccgccacctcctgccgcctgctccacctcccggcgcgcctcgacggtgtcgagctcgcgcaccgcgcccgcgccctcctctccgacgtcgcgcgccgccacatggagctggacgcggccgtcgagatcgccggcgaggccgcggtgctgctctggtcccgccccttctccgtccgcatcgacagccacatcaccgtcgaccccgtcttcctggaagtcgtcgagcaggagaaccgatcggagatgcagctctacctcgcttgaattttttttaccaactagactagagtagatgcgatgcccaaagatcatatcaagtctagtaaaaaaaaccctatcgcttatcttgtgcagtgctcaaaatgcaaaaccttatcatttgttcgcacaatgcaatgcagcattc

SEQ ID NO: 109689 - DNA, 368 bp, Zea mays
  Clone ID: MRT4577_31535C.1
cccacgcgtccggaacaattgaaatgataagtaaaaagtattgttccttcaaatcaaaggtgagactatctacataacactaaatggggatactttaaataattatttcaaaataatatatatcttaaacatctaaacctgctaaataacttaataattattactacaacatatttaattcataattattaaaatacctaattccttattaataaaaacatagtgttcgccccctttaaatataccaaacttatcttcccctttcttcaataaaaattctttttttattttgtcctctaatatttaatcaattccccccctttttacaaacaccttataccagaataaaccccttttatctaccccat

SEQ ID NO: 109690 - DNA, 599 bp, Zea mays
  Clone ID: MRT4577_31536C.1
gtataaatactatttggtgattttggatgatttttcccattttctctggactttcccgcttcggttgaagtctgcacattaccaccctcacacacttcttcgcctgggtatcacccagtttcgtcgctcggtccgtgctctgcagtgtgacaatggtcgcgagttcgacaacaacgcctcccgttctttcttcctcactcatggtgtccagctgcgtctctcgtgcccctacacctctgctcagaacggccgggccgaacgcatgatccgcaccaccaccaatatgctctgttgccttctcttccaggcgtctctccctgccagctactgggcagaggccctgcacacagccacccacctcctcaaccgtcttccctcgaaggcggtgagccaccctacccctcacttcgccttatacggcacagccccttcctatgaccaccttcgcgtgttcggctgtgcctgctaccctaacacttccgctaccgctcctcataagctttctcctcgttccacccactgcctattccttggttactctcctgaccacaaggggtcccggtgtctggacctcacctcccactgcatcatcatctctc

SEQ ID NO: 109691 - DNA, 526 bp, Zea mays
  Clone ID: MRT4577_31537C.1
cccactcgtccgcccacgcgtccgcccacgcgtccgcccacgcgtccgaaaaaaaaaaaaaaaaaaaaaaaaaaaaaaaaaaaaaaaaaaaaaaaaaaaaaaaataaaaaataaaaaaataaaaaaaaaaaaaaatgaaaaaaaataaaatataataataaagaaacctaaaatacaaaaaactggaacgaaattttatcatcattaatgactgggtaaatccctttttttacccaactttttttacttgcggcacatggcgcatttttgcagttgtttttttttgcgaaaaggtccgttcctgtggcctttcctatcagttgttctacctgaatggcccttgggactcgccttttttaggcgtttttaacccttcttttttttgtggttacgcgcattttgaacggttcacttgccggggccctttggccagatccttagggtttcttgggtttttttctcgccctttttgccggttttttcagtcgagttgtttttgggggtctcccttttgggttcttttttt

SEQ ID NO: 109692 - DNA, 503 bp, Zea mays
  unsure (1)..(503): unsure at all n locations
  Clone ID: MRT4577_31538C.1
gtgagcggctcctggggccggcttgcggcggtgatagacgacggcggggtcggcgaatcgggccgcgctcgtcgacgggcccgagtcggggggcgccgaggtagtggcgtggccgcggcgatggtagacgagggcggggttggcgaatcgagccggagtcgacggggccgcgcgtggcgcaggcggggtcgatggggccgcgcgtggcgcaggcaggatcaacggggccgcgcgtggcgcaggcggggtcgacggggccgcgcgtggcgcaggtagggtcgacggggccgcgcgtggcgcaggcggggtcgaagaagccgcgcgtggcgcaggcggggtcgacggggccgcgcgtggcgcggaagaggtcgtagtggccgtacgaggagcaggtaacggcacaaggcggggagccgaaggtgggggaggaatcggatcggactcgaggagggagtcaagatcggtgggtggggtggagccagnnnggggaaacacattttcgt

SEQ ID NO: 109693 - DNA, 4295 bp, Zea mays
  Clone ID: MRT4577_31539C.1
gaaacaaacgtcattgcatcagttttttcccctcaacaaatcatacgcaagcaactgccaatacaatgtagaataagcccacctgaaccttttcaagaatttataggcctggtcgcttaggtttaatttataccgacttctactgtttctacaatatttatctctatagattacagctgcagcaatctaaacaaccgactttaatctgacccgaacagcccatatgaatctaaacaaccgactttaatctgacccgaacagcccgtatgagatgatcacactgaggaaccgctaccttccaggccacatgtttacgcatcggcctgcagcagctcctgcactgtctgaccaagcttgggctcactcctaatgctctcgatccatctcgcgctgatccgcaccctctccaggctctgcttcagtgctctctcgaatgatggcttaacttggccagcaaagaactcggtaacctcgacagctttctcctcggaggtaaaccgtgggacaatggactcaatgaagtctgatatgagtgaactcgatttccatgtcttcaccacgtgatcccagttttccttctaccaggtccatgcaatgttctcgaaattctaaagcaatgctcaccttggatttaaaatacagatcatgtttctggtggcatgtttgcgtacaggaatgtgtagaagagttccacttcaggcatacttctgatgatctggatgtatttgttattgtttggctcctcaagcaatggggaactcagatgaccaactttgggcaagagagttgctaagggtaatcctgatcctagagttgtctgcacagccaggtcccctaccaccacttctgctatcttcctcaatgacctctccatgatatttctgaaatcatcactgcaataacagagttccaaatggatggttatgtaatatacccatggaggcaaccacagacaccaaaccacggacaagacattaaattcagacagagaaaataatgattctgtgcatggcgcatccttacactaaaaaattgtctcacaagttgcaacatagtaactgttatcatccacacataaatatgatatactaatatgataatttccaaatcatcatttcactcactacaaataccactcctaaatacagagcaccttgttgctctgttttagattaaataataatgttaaatgctaccagtgaagttcaggattgtgctaaatacaaaaggaagttcataatagcattgcatagagaaaaactgcagcacctaattatattaatttgctacactctttctcattctgaatccccatatacgtacagaaacaaaagtaacaacttaggccaatataagtcacatggcatatgacaaagactacaaagtaatttattagataatattataagagttagaataggaaaccctaaccctaacaggggttgggtgatgtattaatagactcagtaaactgggccagacccattacataggggtgagatagtaattacacgggaaaatccccaaaccctaaggcctagtttgggtactctagtattgaagtggtttggagggattagagagtgtataaatccccaataagttaaaaactcctgcaatacatctcaatccacttgaacccctctcattactagagtatccaaactaaccctaaacgggtattctaacaccccccccggcaatcacaactctatcctgtacagatattgagactggagcgaaagtctaaaaatacactcgacggtaaccccttggtgaagatgtcggcgaactgcagcgtggtggggacgctgagaacccgaacatcaccggcggcgacacgctcgcggacgaagtgcaggtcgatctccacgtgcttcgtgcgctgatgctgcacgagattggtggagaggtatactgcgctgacgttgtcgcagtagacgagagtggcgcgctggaggggactgtggagctcgtggaggagctgtcgcagccaggaggcctctgccacgccgttggccacggcgcgatactcgtcctcagcactggagcgagagacgacgggctgccgctcggcggcccaggagacgaggttgacgcccaggaacatggcgtaaccggaggtggatcgacgcatgtctggacagccagcccagtcggcgtcggtgtagaccacaagttccgacgtcagggatggtcggagtaggaggccgtagtcgagggagccgcggaggtagcgcatgatccgcttgagagcgatgagatgaggctcccgcggggtgtgcatatgcaggcacacctgctggacggcgtaggcgatgtcaggcctggagaaggtgaggtactggagcgcaccggtcaggcttcggtaagacgtcgcattggctaccgggggcccgtcgtcctctgagagcttcgcctgagtgtcgacaggtgtggagcagggcttgcagtcggacatgccagcccgctccagtatgtcgatggcgtattggcgctgatggaggaagagaccctgggaccgatgctcggcggtgatgccgaggaagtggtggaggggccccaggtccttcatcacgaactcccgctgcaaggcgacgatcgtgcgctgtagaaggtcggcggtggatgccgtgagcacaatgttgtcgacatagagcagaaggaagacggtgtcgtcgccgcggcggtagatgaagagggacgtgtccgacttggcctcgacgaagccgatggaggccaagtaggaagcgaagcgactgtaccaggcccgcggcgcctgcttgaggccgtagagggagcggttcagccggcagaccagatccggatgagcttcgtcgacgaagccggtgagctggctgcagtagacagtcttcgtcagagtgccgtggaggaaggcattcttgacgttgagctgatggatccccagtcccaggagagggcgagggagaggacggtgcgaacaatggcgaacttgacgacggggctaaaggtctcgtcgtagtccactcccgggtgttgggtgaagccctgaaggacccaacgggccttgtagcggtcgagggagccgttcgaggtaagcttgtagcgaaatagccacttgccggtgaccacgttggtgcctagtggacacggcaccaggtcccaggtgtggttggccaggagggccgcgtactcctcctccatagcgcgtcaccagtgtgggtcggcgagagcggtgcgaacggaggaggggactggggaggcgtccggtggagtggtagtcgtatcagctgccaagactcgtgccgaattaggttgaagaacgccggcggcgcgccgggtcaccatcgggtggacgtgcccggggtcgcggtggatggcgaccgggtggtacaccggtggctcggggcggtctgccgggacgtcgggggccgcaggtgtggccgactcacggcggtgatagacggcggggtcagcgaagcgcactgggctcgtcgatgggcctgggtcagcaggtgccgaggtagtgacgtggcggcggcgatagtagacgagcgcggggtcggcgaagcgagtcgtgggcgtcaacagggccgcgcatggtgcgagaggggtcggtgggcctcgcgaggcgcaggcgtggtcgacgaggccgcgcgtggcgcaggcgtgatcgacgggaccgcgcgtggcgcgggaataggcgcgagccgcggcgtcgaggccgcacggggtgcgggtaacggcgcaaggcggggcacctgggaggagggggagacggatcggactcgaggagggagtcgaggtcggtgggtggggagggccagcaaggggaaacacatcctcgtcgaagacgacgtgacgagagatgatgatgcggtgggaggcgaggtccagacaccgataccccttgtggtcaaaggagtagccaaggaagaggcagcgggtggagcgaggagaaagcttatgaggggcagtagcggaagtgttagggtagcaggcacagccgaacacgcgaaggtggtcgtaggtgggggctgtgccgtacagcgcgaagtagggagtagggtggctcaccgccttggagggaagacggttgaggaggtgggtggcggtgtgcagggcctctgcccagtagctcgcagggagatttgcctggaagagaaggcagcggatcatgttggtggtggtgcgaatcatgcgctgcccagccgttctgggtggaggtgtaggggcacgagagacgcaactgaatgccactggtgaggaagaatgaccgagaggcgtggttgtcgaactcgcgcccggtccgc

SEQ ID NO: 109694 - DNA, 270 bp, Zea mays
  Clone ID: MRT4577_3153C.1
atgacgccatcacgtcgtctagctcatcgtccacctgaagcccaacctaccatgggtactacctcactgatgagcccggggtaccacttcgtttggcagcccaaccaagagtcatcggtactcgtcatgtcgcgcgcgttcgacgactactatatcgaggattgtggcgtcatcttagcatcggaggtgacgcagaggaggatcgacaacagtgaccagttcgtcatcctcgccaccgtcagggtagcttttgtgccgacctgcctttaa

SEQ ID NO: 109695 - DNA, 1344 bp, Zea mays
  Clone ID: MRT4577_31540C.1
atggtgacccggcgcgccactgacattcttcgacctatcgatcggctgatcttggcagctaatacgactaccactccattggatgcctccccggtcccctcctccgttcgcaccgctctcgccgacccacattggcgacgcgctatggaggaggagtacgcggccctcctggccaaccacacctgggacctggtgccgtgtccaccaggcacctacgtggtcaccagcaagtggctatttcgccacaagcttatctcagacggctccctcgaccgctacaaggcccgttgggtccttcgaggcttcacccaatgccccggagtggactacgacgagactttcagccccgtcgtcaagttcgccactgttcgcaccgtcctctccctcgccctctcctgggactgggcgatccatcagctcgacgtgaagaatgccttcctacacggcactctgacggagactgtctactgcagccagcccaccggcttcgtcgacaaagctcgtccggatctagtttgcgggctgaaccgctccctctacagcctcaagcaggcgccgtgggcctggtacagtcgcttcgcttcctacttggcctccatcggctttgtcgaggccaagtcggacacgtccctctttatctacctccgcggcgacgacaccgtctttcttttgctctacgtcgatgacattgtgctcacggcatccaccgccaatcttctacagcgcacgatcgtcgccctacagcaggagttcgcgatgaaggacctggggcccctccaccacttcctcggcatcaccgccgagcgccggccccagggtctcttcctccatcagcgccaatacgccatcgacatactggagcgggctggcatgtccaactgcaagccctgctccacgcctgtcgacactcaggcgaagctctcagaggatgacgggcccccggtcgccgatgcgacgtcctaccggagcctgaccggtgcgctccagtacctcaccttctccaggcctgacatcgcctacaccgtccagcaggtgtgcctgcatatgaacaccccgcgggagcctcatctcaccgctctcaagcagatcctgcgctacctctgtggctccctcaactacgacctcctactccgaccatccctgacgtcggaactcgtggtctacactgacgccgactgggctggctgtccagacacgcgccgatccacctccggttacgccgtgttcctgggcaccaatctcgtctcctgggccgccaagcggcagcccgtcgtctctcgctccagtgctgaggccgagtaccgcgccgtggccaacggcgtggcagaggcctcctcgctgtga

SEQ ID NO: 109696 - DNA, 2851 bp, Zea mays
  Clone ID: MRT4577_31541C.1
gtaagaaacatgagattatttcagtcattcagttgcaataaatatcaccgagtttaatctgagacaagttccatatgaaagtgaaagcaaattattataagatacatcataagccaaggatgaattgccacgggcacaccggagcgcgccagtgatggtaccagcacagcacccccacagttgaggttgttcacctcaggacaggggtgtggtggcggacgccattgatggccatcttttcacctccattctccgcgtggaagttcatgctggggaggaatttattagcagatgcgaagctaacgtgctcttgatgagctagcgtgccactccagtttgaagcactcgagattgtagagctcgtcgaaggcgagtgagatgtgctgctttcagggcataggttcctgccaaaggccattttgctgaaatagactgttggagtctggccgagcccattgccttctggcgaggcagtaagagccccggtttgttgcccaaacgtactcgggtattctaacaccccccattagttgaaactctatcctgtacagatgttgagactggatcggaagtttaaaaagacactcgacggtaaccccttggtgaagatgtcagcgaactgcagcgtggtggggacgctgagaacccgaacgtcaccgacagcaacacgctcgcggacgaagtgcaggtcgatctccacgtgcttcgtgcgctgatgctgcacgggattggtggagagatagaccgtgctgacgttgtcgcagtagacgagggtggcgcgctgaaggggactgtggagctcgtggaggagctgtcgcagccaggaggcctctgccacgccgttggccacggcgcggtactcggcctcagcgctggagcgagagacgatgggctgccgtttggcggcccaagagacgaggttggtgcccaggaacacagcataaccggaggtggaccggcgcgtgtcgggacagccagcccagtcagcgtcggtgtagaccacgagctccgacatcggggatggtcgaagaaggaggccgtagtcgagggagccgcggaggtagtgcaggatccgcttgagagcggtgaggtggggctcccgcggagtgtgcatatgtaggcacacctgctggacggcgtaggcgatgtcgggcctggagaaggtgaggtactggagcgcgccggtcaggcttcggtaggacgtcgcgtcggtgaccggaggcccgtcgtcctcagagagctttgcctgagtgtcgacaggcgtggagcagggcttgcagtcagacatgccagcccgctccaggatgtcgatggcgtactggcggatcgtgcgctgtagaaggtcggtggtggatgccgtgagcacaatgtcgtcgacgtagagcaggaggtagacggtgtcgtcgccgcggcggtagatgaacagggacgtgtccgacttggcctcgacgaagccgatggaggccaggtaggaggcgaagcgactgtaccatgcccgtggcgcctgcttgaggccgtacagggatcggttcagccggcagaccagatccggacggtcagcgtcgacgaagccggtgggctggctgcagtagacagtctccatcagagtgccatggaggaaggcattcttgacgtcgagctgatggatcgcccagtcgcgggagagggcgagggagaggacgacgcgaacagtggcgaacttgacgacggggctgaaggtctcgtcgtagtccactccgaggcgctgggtgaagccccgaaggacccaacgggccttgtagcggtcgagggagccgtccgaggtcagcttgtggcgaaatagccacttgccggtgaccacgttggtgcctggtggacgcggcaccaggtcccaggtgtggttggccaagagggccgcgtactcctcctccatagcgcgacgccaatgtgggtcggcgagggcagcgcgaatggaggagggcacaggggatgcgtccggaggagtgcaggtcgtatccgctgccaggatcagccggtcgacggggcgaagaacgccagcggtgcgccgagtcaccatcgggtggacgtgcccggggtcgcggtggatggcgaccgggtggtacacagacgactcggagcggggacggcggggtcggcaaagcgggccgtgctcgtcgacgggcccgggtcggcaggcgccgaggcggcggcgtggctgcgacggtggtagacgagcgcggggtcggcgaagcgagtcggggtcggcggggccgcgcgtggcgcaggcggggtcatcggggccgcgcgtggcgcaggcggggtcgacggggccgcgcgtggcgcaggcggggtcgtcgaggccgcgcgtggcgcaggcgtgttcgacggggccgcgcgtggcgcgagagtaggcgcgagccgcggcgtcgaggctgggagggggggagacctgatcggactcgaggagggagtcgagatcggcgggtggggaggggccagcaaggggaaacacgtcctcgtcaaagacgacgtgacgagagatgatgatgcggtgggaggcgaggtccagacaccgataccccttgtggtcagaggagtagccaaggaagaggcagcgggtggagcgaggagaaagcttatgaggggcagtagcagaagtgttagggtagcaggcacaaccgaacacgcgaaggtggtcgtaggtgggggctgtgccgtatagggcgaagtagggagtggggtggctcaccgccttggagggaagacggttgagaaggtgggtggcggtgtgcagggcctctgcccagtagctggcagggagagacgcctggaagagaaggcagcggatcatattggaggtggtgcgaatcat

SEQ ID NO: 109697 - DNA, 3743 bp, Zea mays
  Clone ID: MRT4577_31542C.1
tccatatccactctccaactaaaacaaaggaatatggtgaagacttacttccttttgtgctggatgcattgagtgagatagcttttcatccaaagttttcttcatctcgtgttgagaaggagagaagagcaattctttctgagctccagatgatgaacacaatagagtatcgggttgattgccagttgttgcaacatctgcactcagaaaacaaactgagcaacagatttcctattggacttgaagagcaaatacataaatgggatcctgataagatccgcagatttcacgagcgttggtactaccctgcaaatgccactttatatctggtgggggaaattgatgatattcctagagctgtgcgggaaatagaggcggtatttgaacacactctttcagaaaatgaaggaaatcctgtaccgagcgctaatccatttggtgctatggcaagcctttttgcaccaaagctcccaggtggttttacttcaaacctaactggtgaaaaatcacctgccacagataagctcgatgaactgaaattgcaacacaatccatcatttgttcctttaaccaaagaggagaatgcggtggaaagtgtttgacagtgaaactggtatatcacaacgccgtctttgttgcggaatttccatcaactacaagattacacaaaatgaagctagggttggtgtcatgcggctaaggacctgcgcagtgtactcatgaaaaggatatttttgtctgccctacattttcgaatcaatacaagatacaagagctcaaaccctccttttacttcagttgagctggaccacagtgactctggaagggaagggtgcacggtcactactctcacagtaaccgctgaaccccaaaattggagaagtgccatcaaagttgctgttcatgaggtgcgaaggctgaaagaatttggtgttacaatgggagaaatgacccgttacatggatgcactgataaaagatagtgaacagcttgctatgatgattgacagtgttccctcagttgacaacttggacttcatcatggagagtgatgcacttggccacactgtcatggatcagttgcagggacatgaaagtttgcttgcagttgctgaaactgtcacccttgaagaggtcaacactgttggcgcggaagtattggagttcatttcagattttggaaaactcaatgctccccttcctgctgctattgtggcatgtgtcccccaaaaggtgcatgttgatggcgcaggtgaaactgaattcgagatatatccagaagaaatcactgaggctatcaaggcaggtcttgaggaacctatttaccgagagcccgagcttgaggtgccaaaggaattgattactcaatcagagctcgatgacctgaaatctcaatgcaatccttcatttgttcctttaaccaaagaggagaatgcggtgaaagtgtttgacagtgaaactggtatagcacaacgccgtctttctaatggaatttccatcaactacaagataacacaaaatgaagctagggttggtgtcatgcggctcatagtagggggagggagagcgacagaagattctgaatcaaagggatctgtcattgttggtgttcgtaccctgagtgaaggtggctgcgttggtaacttttctagggaacaggttgaacttttctgcgtcaataaccttatcaactgctcactggaatcgaatgaggaattcatatttatggaatttagatttgctttaagagacaatggcatgcgtgctgctttccaacttcttcatatggtccttgagcataatgtatggctagaagatgcatttgatagagcaactcagttatatttgtcttactatcgctctatccccaaaagtttggaacgttctacagctcataagcttatgttagccatgctaaaccatgatgaaaggtttgtagagccatcgccacattcactgcagaagttgactcttcagtcagttaaaaatgctgtcatgaaccagtttgtgggtggcaacatggaggtcagtattgttggtgatttcactgaagaagaagtagaatcttgtgttcttgattatcttgggaccgtgagggcttcgagttctctaaacacagaggagcgtattgagaagatttccttccgaccatttccatcagatgttcatttccagcaagtatacataaaggacacagatgagagagcctgtgcgtatattgcaggccctgctcctaaccgttgggggttcgctactgaaggaaatgacctatttaatgtcattcggatatctgatgctgatgcagaagtatctgaaccagtgagcttggatctaacagggaagagacacatcaatgttcgcagccaccctcttttctttggcatcactttgagtctgctaggcgggtacagtaatatatcaattctaggctatttacaacagttcgagattccatgggattaacatatgatgtttcttttgaattgaacctttttgacaaattgggtcttggttggtatgtaatcgcggtcacttcaactcccagcaaggtccataaagctgttgatgcctgcaaaggtgttctgagaggattgcatagtagccgaattgtggaaagggagctcgatcgggcaaagaggacactgttgatgaaacatgaagctgagacgaagacaaacgcctactggcttggtttgctagcccatctacaatcttcatctgtaccaagaaaggatgtatcatgcatcaaggaattgacgacattatatgaaaatgcaacgattgaggatctgtatattgcatatgagcacctgaaagttgacgattcttctttgtttgcttgcattgggattgctggcgctgaatctggtgaagatacaaacgatgacgagcctgatgtggatcttcatggcatgggtcccatgggaggccggggtctttcaacaatgaccagaccaaccacatgatcaccattgggatggccaacccttccaagggattaaccttgctccccaagacagggagtcacatggccctaggagactgcatgttgactgtcgtttcccagcaaaactgtttaaagataattcaagcatttgatctggatctggaagactattatatcctgagccacaaccaaaagcttggtggctgcattttttccccgaggagcgttgagttaatgactcagcaaggtcgtgaaaaagaatttattgtttgaggtcatgtagcttcacatgtacagtaaaagcaggttggttcttgcatacagttgttgtaactagtgcgttcagggcattgaagataggatgacagtagatcacagacgttgctgggctgcgaatagcgtaaggcatctgctgtaactgtaacgaaataatgaagcgcagtgtcaggaccctggatagatggcaagtgggtggcatgtgtgcctataaaaagggagaacgtatagaccaagggatatgaaagaaccatttgaacaaactaaatcctctctacctttccattactgttatctcttcataatctctcctctcatgtatcctgtttctctaccttctagaacaatttggctatcagatatcaaattagatcgtcttcctcgctgctatctccttcttcaacccttcttctacctgaacatctctcttctctccgatattcccttctgtggcgctaacacgcaggcatgtaacatttttgtgttattcttttgatcaaatatttatagcctttgttact

SEQ ID NO: 109698 - DNA, 1124 bp, Zea mays
  Clone ID: MRT4577_31543C.1
attttcccggccgggattgattgcatctctagtgcccgtcctccgtcctccggagcggctatgggcgaagagagggagttcgtgggcgctaggttggacgccggcctccgcgctgcccgcttctcgtcgccgccgtctgccgacgagtttgcggcagatgtcgagcccaagaacgtccctgcggtctttcgcggcgtggttaaggagtgggcggcctcctcccgttgggatcctctccatggcggcctcgattacctgctggaaaaagtgggacctgacgtggctgtggaagctatgatgtcaaacactggccatgtgttctacggggatctcagaagccatgagagggtgtctgtttcattctccacgttcattcagtcgtgcaagtcttacctggatcatatgaatgcagctagtgattcatccaaagagcagggaatgcttggggagccagctagttcaagggagacatgttcgaacagttcagagaacttggagcaagtctatttggcacaggtatctattatgaatgcagagaacaaagaaggatgctcattacaagttctggaaggcgacatccaagagcctatatttctgagaggaaaatcattttcgtcaataaacttttggatgaataagggtcacttgagatcaagtactcattacgatccccaccataaccttctctgtgtggtatctggtcgcaaaaaagttactttgtggcctccatctgcatccccattcttatacccgttgcctgtgtatggcgaggcctccaaccacagctctgttagtgtggaggagccagattattcaatatatacaagggcaagatacatgaaggaatattctgaaacagtaattctaaactgcagcgatgttgttttcataccagaaggctggtatcaccaagttgacagtgacgacttaacaatagcagttaacttttggtggaagtcaagaataatgactcaaatgttagaacatatggatgcctactatctacgccggattatgagcaacgaagattggcggaccaggacatgcgcataatggcgcacaagagcactcttggtcatctgaaagattgcacggatatacagcatatggtcaaaacattgaca

SEQ ID NO: 109699 - DNA, 757 bp, Zea mays
  unsure (1)..(757): unsure at all n locations
  Clone ID: MRT4577_31544C.1
tgcggccgcttcgaggnccggcccgggtctcggaaaaaagnaaanaaaaaaaaaaaaattaaacaaaggaaaaaaaaaaaaaaaaaaaaaaaaaaaaaaaaaaaaaaaaaacccttttgggaaaaaaaaaaaaaaaaaaaggcccctaggcccgcgccccctttaaaattagggaaccccccgggttgcggaatttcaatttaaactttttcaatcccgccaaccccaagggggggcccggacccaatttccccctatagggagtctttttaccccccctcctgggccgcctttttaaaccgccgggatgggaaaacccctgggtttccccaatttaatccctttgaaaaaattccccttttccccagttgggtaaaaaccaaaaaggccccccccaatcccctttcccaaaatttgcccaccctaaatggcaaaggaaattttaaacctttaattttttttaaaatttcccgtaaattttttgtaaaaccacctctttttttaacccaaaaggccaaaatcggaaaattcccttttaattcaaaaaaaaaaaccaaaatagggttaagtgttttcccattttgaaacaaaagcccccttttaaaaaacgggaactccaactcaaaagggcaaaaaaccgtttatcggggggagggccccctacggaaaccttcccccaaatcaatttttttggggccaaggggccgaaaagccttaattcgaacccctaaggggaccccccattttaaactttaac

SEQ ID NO: 109700 - DNA, 280 bp, Zea mays
  unsure (1)..(280): unsure at all n locations
  Clone ID: MRT4577_31545C.1
agcanaanagtgggaagatttntaggnagaggngnnaaacctaccgagccgggtgatagntggtngtccaagataggnnctnagnccaactttgatngcaaggaccctctaaatcnccttgtaantttaactgttagtccaaagaggaacngctctttggagactaggaaaaaancttntagagagagtaanaaatttaacacncatagtaggcctaanagnagccaccaattaagaaagcgttcangctgcaacacccactacctaaaaaatcncagac

SEQ ID NO: 109701 - DNA, 232 bp, Zea mays
  Clone ID: MRT4577_31546C.1
acgatgcatggaaactctcgcacatcacacattgactactaggcacgccctatctatgacagggctatccgaaatgactatcgcgatattaatgcttactaccaggaccgacaagctttacagagtcagtacgatctgaatgacgatcgcaatgccaactcacgacgtgcacgttacacagcacgaacactagttcacatcagccacgaaactaaactcacttccagactac

SEQ ID NO: 109702 - DNA, 633 bp, Zea mays
  Clone ID: MRT4577_31547C.1
actcgcgggtcggtcgagaacgatcgctgtctcttcttcccttctatcgagaagctgcccgcgcgctccctccgtagagtccaaaccgccacaggaagcgcaacagcggagtctccaaaatggccgccgaggacaaggagaccgactcgccgcagccgccggcgaagctgccccgtctctcctgcgccgacacgagcgccggagtggcggcctcgtcgcctctggttctcgggctgggcctggggctcggcgggggcggcgagcgagacgcggatgcgtccccggcaacggcgacgcccaagaggccgtcagcgctgacgttcatgcagcagcaggaactggagcaccaggtgctcatctaccgctacttcgcagcgggcgcgccggtgccggcgcaccttgtgctccctatctggaagagcgtcgccgcgtcctccttcggcccgcagcgcttcccctcgctgatgggcctggggaacctgtgcttcgactaccgcagcagcatggagccggagcccggggcggtgccggcgcacggacggcaagaagtggccggtgctcccgcgaaccgtggtgcccgggcccacaagtactggcgagcggggcacgtccacccgcgggccctcgagctcc

SEQ ID NO: 109703 - DNA, 2008 bp, Zea mays
  Clone ID: MRT4577_31548C.1
cattgggaccctcgaggccggccgggaagaagccggcagacacacactgcacgcacacacagacagccatggcggtcgggggcgacgccaacggcggcggcggcggggtgcgtcagcgccagcgcgggtgctcgtgcaccaaggcggacttcttcccggaggagtcgttctcgagctggtcggcgtacgggcgggcgctgcgcagcacggggccccggctggcggaccgcctcacgtcgcggtcgctggagtcgacggagctgcacgaggtgcgcgcccgcagcggcgccgacatgaagcgggacctcacgtggtgggacctggtgtggtttggcgtcggcgccgtcatcggcgccgggatcttcgtgctcactggccaggaggccagggaggacgtcggccccgccgtcgtcgtctcctacgtcgtctccggcgtctccgccatgctctccgtcttctgctacaccgagttcgccgtcgagatccccgtcgcaggtggatcgttcgcgtacttgcgagtggagctcggcgacttcatggcgttcgtggcggcgggcaacatcctgctggagtactgcatcggcggcgcggccgtggcgcgcgcctggacgtcctacttcgccacgctgctgaaccaccagcccagcgacttccgcatccacgcgtcgtcgctctccgccgactactcggagctggaccccatcgccgtcgtcgtcatcgcgctcgtctgcatcttcgccgtggccagcaccaagggcacctcccgcttcaactacgtcctctccatcgtccacatcgccgtcatcgtcttcatcatcgtggccgggctcaccaaggccgacgctgccaacatgcgggacttcatgcccttcggcgtccgcggcatcttctccgcctccgccgtgctcttcttcgcctacatcggcttcgacgccgtgagcaccatggcggaggagaccaagaacccggcgcgggacatcccgatcggcctcgtgggcgccatgacgctcaccaccgcgctctactgcgtgctcgccgtcacgctctgcctcatgcagccgtacgcgtccatcgacaaggacgcgcccttctccgtggcgttctcggccaggggcatggactgggccaagtacatcgtcgccttcggcgcgctcaaggggatgaccaccgttctgctggtcagcgccgtcggccaggcgcggtacctcacgcacatcgcccggacgcacatgatgccgccgtggctcgcgcaggtgcacccgcggacggggacgcccgtcaatgccaccgtcgtcatgctcgtcgccaccgcgatcatcgccttcttcaccgaccttggcatcctctccaacctgctctccatctccacgctcttcatattcatgctcgtcgccgtcgcgctgctggtccgccgctactacgtcgccggggagaccacggtcgccaaccggaacaagctggcggcgtgcatcatcgccatcctggcgacgtcgtcggccacagcgacgtgctggggggtgaacgtgaacgggtgggtgccgtacgcggtgacggtgcccgcgtggtttgcgtcgacggtgtgcctgtgggcgttcgtgccgcaggccagggcgcccaagctgtggggcgtgccgctagtgccgtggctgccgtcagcgtccatcgccatcaacgtcttcctcctgggatccatcgactacaagtcgttcatgcgcttcggcttctggacggccgggcttctcgtttactacctcttcgtcggcctgcacgcgtcctacgacacagccaaggcgctcgccgccgagtctgccatggccaaggtggaggatggcgacggcaagccggcacgaggcgccgtccataacggtgagtactgaagggaaatgtaatcgtgaatatgaagtcctatactatggttgttagtcgccgacaagcgaacctaagtttgtacaaatcttcagttatcatcagactgtcatttatttatgtgaatagcaaaaatcgaaaa

SEQ ID NO: 109704 - DNA, 338 bp, Zea mays
  Clone ID: MRT4577_31549C.1
attcggctcgagattggtactacaacataattttagacagaggtattgtatatttagaaacgggatatgttgtgaaactacaccgtatagcgacacttgcacctgcacaacaggggtttactttcacccatacaaattcctcacaaaatgccaacatccaaaggtacaccaagacgcaattagaaatgctgccaaacatggatacataccttgtgcacggatttgctggctatttagactctgttctatataaggatgatcatgtgggaatggagccaaacactgttacaacaaacagtgttagctggttcccgagctttttcccattgagaaagccc

SEQ ID NO: 109705 - DNA, 214 bp, Zea mays
  Clone ID: MRT4577_3154C.1
tcggccacacgttcgagcgcattcctactcgcttttaaacatcaacaggccgtacacacgagcggtcacatgcatgcattgaggcgatcactgtcttgctaactatgatatatttgcacggaagcatcaccacatatatgatgccactctacgttagtgctctcgctatggctaaaaggatgttgcactactgtacatagtgcaatctcttaca

SEQ ID NO: 109706 - DNA, 1828 bp, Zea mays
  Clone ID: MRT4577_31550C.1
tgggtacctcgaggccggccgggactcaatcccctcgccccgcggcgcctccgttcacagcgccatggcggggtggatctcctccaagctcaaagcagccgagaccctcctccaccagatcgatcagcaggcggcggaatccctcggcaagtccccatccgcttccgacctcgccacgctgcactccacaacatctcgctccgccgatgacctccttgacgtgccgctcccgcgcaggcagccgccgtccggcccgcccccctcactcggcctccgtctcgcagcgaagcgccgctccccgccttcccaagggccccgtcgctccgcatcggcggctgcgatgctcgcggtgcaggatcaagccggtggtgaaccaacggtgggggtggtggccgaggtgaaaccggaaacggatcgaggggatcgcgaggacggcaagagtgtcgcgtccgagagcgggagcgatgaggacttcctttggtcaggacccacgggtgcggaggattccgaggaggagaggcggagggaggaggagaggacgcggcggcgggctgagcggcttgcggccatggccgcacgcgctattgctgagcgcgaagatgctgttgcgaggctcgagggggagaaggcggggcttgagaagctgctcgccgagcgtgagaaggagcaggctcaggaggcttcagagttgcagactagtatgattgaaacattggaagcagtggagatagagaaacagagacatcacagcactagaatggaagcccttgcacgtttggctagacttgaggttacaaacggtgagcttgcaaagtcacttgccagggaacaatggaatctggaagttcaagtagatcaagtggcgcagcttcgagaggaagttgaattgaagaaacttactcaagataaatacagaagaaagctaacaaagatacaaaagacaagtgcccctccggttgatgaaatagaatctttgagaaggttcaagctggaggaagaaattattgatgcagaatacactctgacatgtgacagaattgtgagcttgaaggacaaggcaaggaagattgaagaaagcattgagctgactagaagagacatggttcatcctacagaggtggaaattgagctcaagaagaggcttgatcaactaactgatcggttgattcagaaacaaatgcaggtggagtccctatcttcagagaaggcagctctgttaatgagaatcgaggtcacgaggttgcttgacaatagcacctcatcatcagcttcctcaaactcatcaagattggacattgaagctggtgcatggcaacaatcacattcaccaacaatcacattcaccaacaatcacattcgcgacagaatacgggctggacagcagcaactgggatctgcaatccgacagctcgattcgatcttttcagccgggcatatcttcttgaggcggaatccgaaggcacaggtttgggccttggtgtacctggtatgcctccacttatgggtactgtacatactaacatcacacccaacagtgtcggaaactcgctctggggcaaccttttctttggagacattaaacaagactagcacttgattgctttttcctggcatgttctgatgttatattctggctgtatacatgaggcatcatacctttttctggttgagaaaaatcttagcatataatgcctcgtgcattttgttttggtacctgtccctatccccaattaaagtgtaacggtggctggttgcatacatgaagttggaattacttttggacaatggtggctggttttaaacaaaaacccaaaacaagccggccgtt

SEQ ID NO: 109707 - DNA, 448 bp, Zea mays
  Clone ID: MRT4577_31551C.1
aaaacaaccgggccaattcatcaccggggccatgggcggggggggacccaccccaaaggggacccaccccccggggcacaaccaacacaccccatccccctcatccccccgtctacccaacccccccccgggccttggcccccccgcccgggtgctgttgggcccccccggctctggagcccggaccccccccccccccccgcttggcaccccccctggaccaccccgctaaccccaccaaattcttcaccgggggaggggggtccggcaacttcctctttagcctcgcctggcccttgggtggcaagccccttttccccccaccggggggagggcccccttggcccccccccccgatggaccctttcctcgcctcgcctttcctgttcctctaggggcaagccccttgaggggccccaggagtgttttccacatgagccagctgccc

SEQ ID NO: 109708 - DNA, 1375 bp, Zea mays
  Clone ID: MRT4577_31552C.1
aacaagaactgggaaccatagttcatacgatcacaaaaaaaactctaagggggggtttggtttaaagaatcacttcatccaaaattgggggggcatcatgggtccattcttcaaatttggggggatgacctcattcctcatattagtactaactaaataactataaggaatgaggtgatgatggatcaactcaatccattccacaaaccaaacaaaaatgtgaggagtgaggagacgatggactagatcattcctcaaaccaaacagcctataaaagtctcgctcgcatatttacatctaatgctcgtttacgcagaagtcgttctacctggtcatcgaggcctgaaggggagtacatttttaccacagcattggtgattgctgcttcatttcttcacagcatgggcatgtgcttatacaaatggtggttgtcacttgtcagtaaattactacacgaacagagggcagaaactttcagacttaggaagtcactgattcaaaaatcgcttctataatcccgcaatgggccaaacagtcaaatcttcgctcccattattgcatctgtaagtttacagctgactatttctcaatcagactcggtacacttgctgcacaggaaaagtgaggtgccatgtacgctgaggatagaatcaactgccgggcatgccacatcacccggaaccattctcgcctttcttggtaagggtgtccacttcagctgttactgacgaactgacaccattctttccactgctctgtttcaatttctttgcaaaaagcctagcgatctgaaggtgcgttttcgccatgatctcagttctcttgagctccatctcccccttcttaatctcagcttcaaccctcatcctttctgtctccctgtacatctccatcctggcgtgctcaatcttcaagaacgagctagccagcagctcgatgctcttggctatatcgaattctgtgctctttctcttgctgggccggtcccaggccttgtccacctcctccacgtcctcgtcggccaccttactccttggggagctcacgttggcatcgctatcagcaggcccgctctccttctgcatgctgttgtcagccttctccgctttatccgggacggcgccattcgcgtccatgttcatcagatcagtgaatgcacctggaaccgcatcccgcagctgcgcggcaaagtcagcttctgcctcggcctccggtttcgccggagctcgcaagtctattctgctgttagtcagcgcctgctgctgctgcacctggtcagggccgacgggcggtcccttgagcaggccgtccatgcgggcgaagaacctccacgacgggccggcggcggccgggccggcgcgcgcctcgtgccgaa

SEQ ID NO: 109709 - DNA, 796 bp, Zea mays
  unsure (1)..(796): unsure at all n locations
  Clone ID: MRT4577_31553C.1
acttgtgcaacaaacgaattcaagcaaccaacggttacagatatctatggataagctggcagtttctgaaagtaagcctgcatggaggaatgaggtccaacttgacagtgtatcagaggatgggattggctggtcatccattcaaactgcgcaaaaccaaacttccatgaaacttgctggtatgccaatttgttcttttgctgctggtggtaactgcccgtatggggaagagtgccctcacatgcatggggatttgtgtgcgttctgtgggaaaatgtgcttgcatccttatcgtcctgatgagaggcaggagcatatcaagctatgtgaaaagaaccacaagcgtctcgaggctttgaaacgtagccaagaaatagaatgcagtgtctgcttggaccgtgtgctctcaaagcctactgctgctgaaaggaaatttggactattatctgaatgtgatcatcccttctgtatttcatgcataagaaattggcgtggcaactctcctacatctggtatggatgtgaactcagcactgagagcttgcccaatatgccgcaagctttcgtactatgtcattccaagtgttctttggtacttctcgaaagaggaaaagttggagatcactgaaaactacaaagcaaagcccaagtcaatagattgcaagtacttcgatttcggaacgggcacttgccccttcgggacaagctgtttctacaagcatgcttacagagnatggccgcttggaagaagtcgtactgcgacatcttgattgtgatgatggaagtacacttattgc

SEQ ID NO: 109710 - DNA, 260 bp, Zea mays
  Clone ID: MRT4577_31554C.1
atttttacaaatattttttatctcatcatccctccttcttccagcccggcttttatacataaaaaagccctccttcctttatttaattaaccatccatccctacttactcaccctaatttctttctcaatcttccctactcactatcaatatccttacctctccatcccccaaaatttacctaatttctacataacttcaaattttctttcattaaccaatcaatacttctcatatatccattcccttaatctttttttc

SEQ ID NO: 109711 - DNA, 220 bp, Zea mays
  Clone ID: MRT4577_31555C.1
atcaaatgagcccatgctgatgtgcataaatataaaagggctctacttattgcaagctgagtattaatgcataacaccctttagaactaggacaagcaaaaaacgtcttgtaagatggatcacccactatctttgttccaaatcagaatacaatacatatcgtaatttgtagaagtggaatcatagtagaaaaccatatcaaatacctgtggtctattta

SEQ ID NO: 109712 - DNA, 113 bp, Zea mays
  Clone ID: MRT4577_31556C.1
attcggctcgagacgggggtggcctcgatgccaggcccaggcaaattgccttggtggggccctttttctggtgaagagcaggattgtcaacagggatcctagatagttcgaag

SEQ ID NO: 109713 - DNA, 553 bp, Zea mays
  unsure (1)..(553): unsure at all n locations
  Clone ID: MRT4577_31557C.1
cganagagggagttcgccaagacgacttcatcaggggacacaagcaccttctgaaacgcatccaccggcgcaaaccggtgcacagccactcgctgcgcacccaagcgagcgggccgctagcggagtcccagaggcgcgagctcgaggacgagatcagcaggctcaggtacgagaagagcctgctcctggcggacctccagaggcagaaccagcagcagcgcgggatcagctggcagatgcagtcgctggagagcaggctggcgcagatggaggagcgccagaggagcgtcgtggcctccctgtgcgacatcctgcggaggcgcggggtcgttcgtgttccggcctccgcgatggagacgacggaccactccagcaagaagaggagggttccgattccgaagaccgatctcttcgtcgccggcgaacagcccaaggtcgaagagcagcaggtgctgccgttcctgcaggcggtgggcgcagaagcgccaggcgtgtcgacgatccgcgttttggatgccgagccgtttgagaagatggagctggccttggtgta

SEQ ID NO: 109714 - DNA, 262 bp, Zea mays
  Clone ID: MRT4577_31558C.1
aatgatgtgaattttctttctgttcggctcctatttttctcatcattttgttttctttaattgggttgaatggagtagatagaaatatttatggtttaggtaacagttagatgtttcctaagaatgcaaactgccttttccacacaaaggctgggaataaaattctgggtattctcgtattctcatttaaaggagtttagctttcagagagcaacagcaggattgctttcgaccttttagaagattggtctccagtacaggt

SEQ ID NO: 109715 - DNA, 280 bp, Zea mays
  unsure (1)..(280): unsure at all n locations
  Clone ID: MRT4577_31559C.1
aaaaaaaaaaaaaaacgtacgctacctcaggggggangtttaacagatcgagtggagcaagatccagacccctacggatgaggtggtggtgccctacgataccgacgcgtcgcctcccaaagatctcgaggagacgaagaagctgctggataagctcggtgaggataagcttagcgggggggtggggacgaccatggggtgcactgggcccaaggggggggttgaagacttttttttttgcacagggcctggaccttagtgtgattcgaatggagtccct

SEQ ID NO: 109716 - DNA, 143 bp, Zea mays
  Clone ID: MRT4577_3155C.1
ctcacattttggacctccaatgctcggcgcacgacctggtcacaatctttaagatgaagcttcacctgcaaagggccctgaggagccgtaagagaattattggcggggacacgtatatgtaagcgagtacaaaggtactcacg

SEQ ID NO: 109717 - DNA, 168 bp, Zea mays
  Clone ID: MRT4577_31560C.1
tctttattacgttgtttactttatattttttgttagatgaaatttgggaacgacgtgcttttgccctatatgatgggctctgccccttgtacctggccttctggatgatgcgcgacattatttagttgaacacagtgacaatggaggccgttgatcgtgcagcctggg

SEQ ID NO: 109718 - DNA, 506 bp, Zea mays
  Clone ID: MRT4577_31561C.1
ggatatggctgtctcgctgtcgtactaggtttggagccaggtaaccggtgctaggagggcgcgaaatggaggggacggtgggaactaggcactcacgcattctccacctactgctgacgctactgggaggcgacgccggaccggacaccccgaatgcgaacagcgcacgagaccgatcaccggtgtgacccatgcatccaaggcttgagctccaaaccgagccggaccaacaatggccgtgcggcgaaccgcctaagtgcttgctggagacaggcacgagcagggtctatgacgcgaggaccgagaggtgtgaaacctacaagtgctggcacaccagctcacatggtggtctactccttataaagaaacgggaatggatggactaatctaaagatacagcatagaattccatataaatggctatggggtagattgaagctaatactagagtccatgagaaaaacgaatgacgcatccgacaggcaccaaaaaccacaaatgaacat

SEQ ID NO: 109719 - DNA, 565 bp, Zea mays
  Clone ID: MRT4577_31562C.1
aattcggcacgaggccaggaggaacggcaacgcacacgccctttcgcacacaggagctggaggcgcccctggatccgggatccgacccggagtaccgggacttccagtttcggttcatcccggaggtgttcgagctccagatgggcggcggggtgaggaatggagacggcaaggtgacggcggagaaggttcttgggttcgagttcgacaaggtcaggatcagcattgcgtccagcgacgacgaggtggacggagaagcgccgccgaggagctccttctccggggcgagccacccgccggagccggtggacgagatagacaccgtctttgtcgctgtcgacggccgggagaagccggtccagaagccaatcatctcgtgggacgcgtccccgccgccgagcggcgcggcaagcccgcacagcagcatcgacagctccggcgccgccgccaccaccgtgacaatcacaagccttgcgccgagctgcaccgtcaccagccggagcgtcaagaccagtgttagtatcagcgcggccatcgatggtatgtggttggagcaacggaaccg

SEQ ID NO: 109720 - DNA, 315 bp, Zea mays
  unsure (1)..(315): unsure at all n locations
  Clone ID: MRT4577_31563C.1
gccagccaacnancgccgcnngaaaccaaccgagggcaagcgaacccaacccagcacacngccgacgcgganncgaanccgaggacgancgangacggngggcgccggcancgccgnccaggacggcagccgccgggcgcngggcgccaaggaccngcgggaggggcgcggcaacgngcncgngacgcggggggggggcggnggccaaaccaacggcgcgaaccacggcgaccggaccgcgcccgccgccagccgcagcaacaaccccgacgggaagcaccgggaccagcggaacgagagcacgaaccgggacaa

SEQ ID NO: 109721 - DNA, 835 bp, Zea mays
  Clone ID: MRT4577_31564C.1
cctcgagccggccgggacacttctgctgatctcgtacgtacaactagctagcaggctctactactccatagccaacactagctgcagcagcactgctgctccggcctccggtcatggacgactacggcaacgcgagcgcgggcacggcgccgccgcagcaatattactgccgctccgtgtcgccgccgtccagggtgtcgtcgtcgtgctcgccgccaccgcctcctcctcctcccgctgtcctgcaggtggtgggcaacgtgccgccgacgaccgtcgtcctgagcccgtgcgcggcgtgcaagctcctccgccgccgctgcgccgacggctgcgtgctggctccctacttcccgccgaccgagcccgccaagttcaccacggcgcaccgcgtcttcggcgccagcaacatcatcaagctcctccaggatctgccggagagctcgcgcgcggacgcggtgagcagcatggtgtacgaggcggaggcgcggctgcgggaccccgtgtacgggtgcgcgggggcggtgtgccggctgcagaagcaggccaacgagctcaaggtgcagctggcgcgcgcgcaggccgacctgctcaacgcgcaggccaagcacaccaacctgttcgccctcttctgcgtcgagatggccaatcgccgcagcaaccagcagcacccgtcgccgctgacgatgatggacggcggcggcggcggcggattcggcgcggcggcgtactaccagcagacgacgttgtacgactcggacctggactcggcgacgtggccggatcacgaagcccagctctggacctagctcatgcttctatcgatctcgactac

SEQ ID NO: 109722 - DNA, 1522 bp, Zea mays
  Clone ID: MRT4577_31565C.1
aaaatctagacacgtcccgatcgatctccctatatataccaccaccaaattttacttttgatttagcagctagtagcggcagatcatgctctcatcgtacaaatagcagtcagtagtctactcattcaattcgctccggcctctcgatcgatctgctgccatggacgactacggcaacgcgatcgtcgtcacgggcacggcggctccgctcaaatacaactgtcgctccgtgtcgccgccgtcgagcgtgtcgtcgtcgtgctcgccgccaccgcctcctcctcctcctactcctcctgccgccgtccaggtggtggtgggcaacgtggcgccgaccgtcgtcctgagcccgtgcgcggcgtgcaagatcctccggcgccgctgcgccgacggctgcgtgctggctccctacttcccgccgacggagcccgccaagttcaccacagcgcaccgcgtcttcggcgccagcaacatcatcaagctcctccaggacttgccggagagctcgcgcgcggacgcggtgagcagcatggtgtacgaggcggaggcgcggctgcgggacccggtgtacgggtgcgcgggggcggtgtgccggctgcagaggcaggccaacgagctcaaggtgcagctggcgcgcgcgcaggccgacctgctcagcgcgcaggcgcagcacgccgacctgctagccctcttctgcgtcgagatggccaaccgccgcggcaaccggcagcagcagcagcagccgtcgccgccgacgacgacggtggacggcggtggcggaagcgagttcggcggcgcggcgtacgggcagacgttttacgactcggacgacctggactcggccacgtggccggatcacgaagcccagctctggacctagctagctgatgggtgcatggatagtaggtaactctcgagtgctacaggtactgcttgtgctgccttgtgtgcagcagcaccaccacatgcatgcatatacgccgtacgtaggggtggtaatggatcacgatctaaatgcctcttcataaaagttaagacccttaaataatataagttcaaaaatgaataagaatagagcctgatcctaatccgattcaatccttaaaattcgcagcgtaaagtttatagtccattaccacccctgaccgtacgtgctgctacgtgtgtagggagcggcaacgtttctgctacctcgtcggtcggatgctgcaacaacgctgtgtatagcccggccgtcaatacgattatttgctcgtgaatgcatatattatattactccctccgtttctttttatttgggaacaattggatctataccattaaaagatccaaactttagatatatatcatggaccccacatgtcattgactcatgtggacccacatgtaagtgagatagtaatggtatgaatccaaagtggtgatcttttaatggtatggatccaaatttcccttttatttgtcgctggattacactatgcagcgacaaataaaaaagaaacagagagagtatcattcagtt

SEQ ID NO: 109723 - DNA, 580 bp, Zea mays
  Clone ID: MRT4577_31566C.1
agaacctagaagtctccaccctcctgcgcctcgaccctcctcgccgcctcgctcccgctgcagaggtggcagatccgcccgactagacgaagccgtccgccccatgacctccggtgagctcgcctgcgcctacgccgccctcatcctcagcgacaacgaaatcggcgtcaccgacgagaagatcgacaccatcgtgaatgagtacaacatcatcgtcgagccctactggccggagctcttcgctaagcgcctggagaagcgccaggtggaggatctaatccgctccgctgcatctgctggtgccgctgctccagccggtgctgccgccccagctggaggagctgctacctcgctgctggccctgctgcagaggaaaagaatgaatagtcgcaaggacggagtctgtatgacgacatggtgttcacgctgttcgactgaggaggccctcgctacccaggcattagcaaattcccttatgctgtccaagacttatcttacgctatgcctgtatgcttttgctattacaatgcactcaagttttgagctgttgagatgtggctatgacaatgtgatgaagatg

SEQ ID NO: 109724 - DNA, 438 bp, Zea mays
  Clone ID: MRT4577_31567C.1
cggacccagagtgcgtgactagcggctcccattgctcatggctcagagaggaaagcctgactcatccttgcatgggacagcaccgcgggtggtaaagcctggataatgcttgcatggcacatcaccgcggttgggaacatgaccctcctaggctctgagaagaatctgattgtctgcaagcatgacaggcaggcccagctgttagattacaacctgaccttctggagccagctccgattcagggtaccgcactccatgatcggcaccgcgatggattcgctcatcgagatacatgtactgatacatactgaaggcagaagagaccactgttagagaagcacaatggataaatatacttgcaagaggaaggacatgtacatgatgcttgccctataactcaagtgtgtatacgccacgtatgtgtaccgcctgtgctct

SEQ ID NO: 109725 - DNA, 399 bp, Zea mays
  Clone ID: MRT4577_31568C.1
tccggaattcccgggtcgacccactcgtccggggactcgtaccttgcaacccactctttgcgatccgcactatctccagcctatcgcggatggctaccaagatctcatcgctccgtacactaactgaccttctaaccagctcagctcatgcgatcatgattccacagacctcacttactcctaaagccaggattgcacagatcctgacaccacttacagaaatgggctcttaacatgcagacttgctagcactcctcctactactagcacttgcgatgctcgccctacaactacccattgtcaaacacagtcatctatgcttgacacactgaccataccaccaatgcaacacaacatcaaccacagccactgcatccaagactgatccacctacacgca

SEQ ID NO: 109726 - DNA, 436 bp, Zea mays
  unsure (1)..(436): unsure at all n locations
  Clone ID: MRT4577_31569C.1
accaaaggggcgtaaatcccattcccaaaccccaaaacaaagggtaaaatttccacaggggggtcaaacaggccttccttttccgggagagggggggcctttggaacttcagggccttttttaaaggcaaaagatctttgggccccccctctaaaattcttttttggaaagctttttttgcaaacgggggcccgggaaattttctatctccccttggggggggnccgcccaggggccccctgggcgccccggcccccatagccgggccttgcccctttgggccccccggggccctccccctccccggtttttgcccgggaggggtcttacccccccccatgggtggaacccccttggcccccagtttccccctcttttgcccccgtttttcccccctcttttctaaccctcccctccccccccccaggggggcccc

SEQ ID NO: 109727 - DNA, 840 bp, Zea mays
  Clone ID: MRT4577_3156C.1
aatcccccatggatgccgtggagagcgctgttgctcctgccgccccgtcaatggtggaaaatggcagttcatcaatcaccgtagaggaatttgaagatttagcctccctagtgaaggatgacgaggcgtcggttagcatcactgtagttggagcgtccggtgaccttgcgaagaagaagatatttcctgccctttttgctctttactatgaaggctgtcttcccaagcatttctccatctttggctatgcacgaagtaaaatgacagatgctgaactgagagacatggtcagcaaaacactgacttgtcggattgataaaagggagaactgtagtgagaaaatggaagagtttctgaaacgatgcttctaccactcaggtcaatatgattcagaggaagatttcaaggagctaagcaagaagatcaaacaacatgagggtcccagagtatctaaccatcttttctacctgtcaataccgccaaatatattcctggatgttgtcaaatgtgcaagcaaatcagcatcatctgtgagtggctggacaagggtaattgttgaaaaaccctttggccgggactcagagtcttctgctgccctaacaaaaggtctgaagcagtacctgacagaggaccaaatcttcaggattgaccattacttgggaaaggagctggtggagaacttatctgtccttcgcttctcgaatcttgtttttgagcctctgtggtcaggcagtacataaggaatgtgcaactgatattctcagaagactttggcactgaagggcgaggagggtactttgatagctacggtattatccgagacataatgcagaaccatct

SEQ ID NO: 109728 - DNA, 349 bp, Zea mays
  Clone ID: MRT4577_31570C.1
accgggccgacccactcgttcgacggctcgtacattcactcatcgactgtttcatatgtacaagacggcatgaatatcgcagaggaggagatatatgagcctgtgcagtcgttcctcatgttcaaagacctcaatgaggtcatcaagagggccatctcgagccagtatggattgaccgtcggcgtgttcaccaacagcctgtacacgggcaacaccctgactctctcgctcattgccggcaccgtctgtctgaactgcttatacgtcttcgatgctgctattccgtttggcgggtacaagataagcgacatagctaggcagaaaggcattgacagcctgaagaactacc

SEQ ID NO: 109729 - DNA, 1620 bp, Zea mays
  Clone ID: MRT4577_31571C.1
gccatggccgcgcgcgccaaggccgccgccgtcgacgaccacgaccccatgccgccaccgctgccgctcccatggccgcgcccagcgccgctcctcgtcatgctgtccctgctcgccacggcctcctacctggccctcacgcgctttcccgccgcgctcctcccgatcgcccctcgctctcgcccccacgacgcgcccgcgcacgcgcccggggacagctgcgcggggttctacgcgggcgcggggccggcgcgcgaggtgtgggcgtccgtcgaggagttcggggccgtgggcgacggggccacgctcaacaccgcggcgttccggcgcgccgtcgcggagctgggcgcgagggccgtcggtgggggaggggccaggctcgacgtgccccccgggaggtggctcacgggcagcttcaacctcaccagccgcttcaccctcttcctgcaccgcggcgcggtcatcctcggctcccaggatccagaagagtggcctctcattacccctttgccgtcttacgggcgcgggagagagcggttaggaccacgccacatcagcctcattcacggagagggcttaaacgatgttgttattaccggtagcaacgggaccatagatgggcaaggtcatatgtggtgggagctatggcggaaccgaaccttgaaccacacgagaggccatctcatcgagcttgtgaactcaaccaacgtcctgatatccagtgtcacgctgagcaactcccctttctggacagtacacccggtctactgcagcaacgtggtgatgaaggatttgaccatactggctcccctggatgctccaaacacagatggcattgatccagactcgagctctgaagtttgcatcgaagactgctacatcgaaagcggagacgacctcgtggccgtcaagagtggctgggaccagtacgggatctcatttggcaagccgagcacgaacatcgtcatccagagggtttcgggcacgactccgacgtgctcgggcgtaggcttcggcagcgagatgtcaggaggcatatctaacgtgctcgtccgtgacctccacgtgtggaattcggcgcaggccgtgaggctcaagaccgacgtagggaggggtggctacatcaccaacatcaccatagccagtgtggccatggagaaggtcaaggtgccgataaggttcagccgaggcgcagatgaccatcctgacgacaggtatgacccggccgcgctgccgaggatcagcaacgtgctggtcagcgacgtcgtcggtgtacacctgcagcgagcaccgatgctggaggcagtgcctggcgcagtttatgaggggatctgcttcaggaacttcagcttcagagggataaggcggcagcaggacagcaggtggcattgcgagtctgtgtatggagaggcgcatgacgttttccctgcaccgtgtgaagagttcaggagagatggatcctcctcctggtgtggacttctttgaccaactactctatctagtagtagtacatactacagcgcccacaagttttgggagtggatgatataggttttttagattatacagacaaactcaattttttaaactttaattagtcttctgttttcgaatggggtt

SEQ ID NO: 109730 - DNA, 229 bp, Zea mays
  Clone ID: MRT4577_31572C.1
ggtagttcatagctgtttctgtttcggagcatgaggaacaacagatttcggctccagccaaaccatggttggttaccaggatatagtcgcttataagctagcagcacacgtcagttgaccgcgcaacttgtacctaggctaacaatacggcaggtttgcagcgaagaccaagaccgatccttttcagaccctccaactgtgcccgcagcttgggttgcagcagatgaag

SEQ ID NO: 109731 - DNA, 1574 bp, Zea mays
  Clone ID: MRT4577_31573C.1
ccggccgggaccacactactactcggtgggtctcattctcagtgtagagaggggaagaggaacaggagcaggaacagagagagagagagagcaatggggaacaggcacctctgctgcctgtgcttgctccttctcctgggactggcgtccggccaggtcctgttccaggcgttcaactgggagtcgtggaagcagagcggcggatggtataacctcctgatggggaaggtcgacgacatcgcctccgccggcgtcacgcacgtctggctcccgccgccgtcgcactccgtctccacccaaggttacatgcctggccgtctgtacgacctggacgcgtccaagtacgggacggcagcggagctcaagtccctgatcgccgcgttccacggcaagggcgtgcaggtggtggcggacatcgtcatcaaccaccggtgcgccgactacaaggacgcccgcggcatctactgcatcttcgagggcggcacgcccgacggccgcctggactggggcccccacatgatctgccgcgacgacaccatatactcggacggcacggccaacctcgacaccggcgccgacttcgccgcggcgcccgacatcgaccacctcaacgaccgcgtccagcgggagctcaccgactggctgctctggctcaagtcgtccgacctgggcttcgacgcctggcgcctcgacttcgccaagggctactcccccgaggtcgccaaggtctacgtcgacgccacggccccgaccttcgccgtcgccgaggtatggaacagcatggcgtacgacggggacaacaagcccgagtacgaccaggacccgcaccggcaggcgctggtggactgggtcgacagggtgggcggggcggcgtcgccggccaccgtcttcgacttcaccaccaagggcatcctcaacgccgccgtcgaaggcgagctgtggcggctcatcgacccgcaggggaaggcgccgggagtcatcggctggtggcctgccaaggccgtcacctttgtcgacaaccacgacaccggctccacgcaggccatgtggccgttcccctccgacaaggtcatgcagggctacgcctacatcctcacgcaccccggcaacccgtgcattttctacgaccacttcttcgactgggggtttaaggacgaaatcgccgccctggtggcggtgcgcaagcgcaatggcatcacgccgacgagcgagctcaccatccttgagcacgacggcgactcctatgtggcggagattgacggcaaggtcatcgtaaagatcgggtccaggtacgacgtcggccatctcatcccggcgggttttgaggttgccgcccacggcaacgactacgccgtctgggagaaagccggcgccgaacaagtgactcgagcataatagagtgctcgagataccgatttgattctcagtacaatgtacacgggactgcattgataaaataagtggtttctcctctaataagtaagggagcgtaaaagggcaattggagccatgcatatgtaaccttaaaatattgttgagtaaaatataaaggtgatccctaaattctccttttc

SEQ ID NO: 109732 - DNA, 163 bp, Zea mays
  Clone ID: MRT4577_31574C.1
ctttctatataatccaatcttacatactcgtacgtgctacttcgtagctgttctatagggggacctatattcaattcacttaccttctttttacaacttaattacttgtaaaaccctttctttactcaacttaatctcctttcattacattctcctttctcca

SEQ ID NO: 109733 - DNA, 830 bp, Zea mays
  unsure (1)..(830): unsure at all n locations
  Clone ID: MRT4577_31575C.1
ccggccggggaaatccccatcccatccttcttctcctccatcttttttctccccccctcaatcacgatacatactccgggcgcgatacttctcgtttaatactccctgttcctcgacaatctcttaggatccatccgtccacagcaactcaatcaattccacccctcatcactcacattaccccgcctccatcatgtcttacgccgatattgctgccaagggccccaagcagagccccgaggatgctgctgcccctcaacctcctcaaatcctgactgacgagtctgcttccaccgcctctctggtcgacgttgatatgcctagcgtgcacaccgtccccaacgacttccttgagcaggagatccagaccgagactcaagcagcccgcatcgagcgagaggaagaggccaagcaagagaagcgaaagcgtgactcagccgcctcaaaggccaagcagaccgacaactggctgatccagcagttctccaagctgtccgacggcgaagctaccggtctgaccgtcgccaacctggccaccgtcgtcagtctcggtgccttcctcggctacaagggctggggcctgtacgagaagggcaggctcgactggaaggccgtctcctacggtgtcggcatcctcgccagtgcagcagctgcccagggtgctgtcggacgatacctgtacaagggaaagaagggtggttcttagaaagatgatgatgaaaagtgtgaaagtcaacaaaggaacacaggttgcaaaagcccttgtgaaaactactacagagctcagatcccgaaacgncaataactctgattatgacgagattacgctg

SEQ ID NO: 109734 - DNA, 1146 bp, Zea mays
  Clone ID: MRT4577_31576C.1
ttgggtacctcgaggccccgggagaaaaaaaaaactgcgtcactgcgccgaatcactagaaaccccaacaaacggaatttcacacatccagcgagcaataccgcaccgcaggtaagatcaaagaggaggcgatggctggcggcgggcaggcggcgtgctcccgcgtacgatgtcagagggcacccatttgctggtccccatccttcagaagcccttcattttcgacatccgcactcgccctcacagcttctcctccacctccggcaccaaggacctccagatggtcagcctcacgctccgcgttctgtcgcgacccgacgtcgaacacctcccggacatcttcacctccctcggcctcgagtacgacgagaaggtcctcccatccatcggcaacgaggtgctcaaggccgtcgtcgcgcagttcaacgccgaccagctcctcaccgagcgtccccacgtctccgcgctcgtccgcgaatcgctcaccaagcgcgcccgcgagttcaacatcgtcctcgacgacgtcgccatcacccacctagcctacgggcaggagttcgcgcaggccgtcgagaagaagcaggttgcgcagcaggaggccgagcgctccaggttcctcgtcgcgcgcgctgagcaggagaggcgcgctgctatcgtccgcgccgagggggagagcgagtccgcgcgccttatctccgaggccacgaccactgcgggcaacggcctgatcgagctcaggaggatcgaggcggccaaggagatcgcaagcgttctgtcgcgcacgcccaacgtctcctacatccccgccggcgacaatggccagatgctgctcgggcttaacgccgcccggtgaatggatcgtctttttccgcgcttcagaatgtcaggacgagatgaaactgttcttggtggggaggagggaaagtttgtttctgtagagcttctagaagtgttgctaagagtctgttttttattaatgaaatggctgggaagtctgtttgtgctcaatagagtgtttcttctgtgaaataaaactggtctatgagatggtgtggcgagctctttgctttgctttgctctctgcaattcagttgtatcccatacatgctgtctttatctctgaaataaaacttttcgagtgaacgg

SEQ ID NO: 109735 - DNA, 1336 bp, Zea mays
  Clone ID: MRT4577_31577C.1
gaaccttatcttcttccctgccagaaggccaaggggaggagatgcggcgtcccgtgcacgccttaaaaacgagatccctggggtcaccactggtcaactgcgtcactgcgccgaatcactagaaaccccaccaaacggaatttcacatccagcgagcaataccgcaccgcaggtaagatcaaagaggaggcgatggctggcggcgggcaggcggcgatttcgttcatgacgcggatggcgaaggtggcggcggggttgggcgtggcggcgtccgcagcctccacgtccttctacacggtggacggcggagagcgcgccgtcatcttcgatcgcgtccgcggcgtgctcccgcgtacgatgtcagagggcacccatttgctggtccccatccttcagaagcccttcattttcgacatccgcactcgccctcacagcttctcctccacctccggcaccaaggacctccagatggtcagcctcacgctccgcgtcctgtcgcgacccgacgtcgaacacctcccggacatcttcacctccctcggcctcgagtacgacgagaaggtcctcccatccatcggcaacgaggtgctcaaggccgtcgtcgcgcagttcaacgccgaccagctcctcaccgagcgtccccacgtctccgcgctcgtccgcgaatcgctcaccaagcgcgcccgcgagttcaacatcgtcctcgacgacgtcgccatcacccacctagcctacgggcaggagttcgcgcaggccgtcgagaagaagcaggttgcgcagcaggaggccgagcgctccaggttcctcgtcgcgcgcgctgagcaggagaggcgcgctgctatcgtccgcgccgagggggagagcgagtccgcgcgccttatctccgaggccacgaccactgcgggcaacggcctgatcgagctcaggaggatcgaggcggccaaggagatcgcaagcgttctgtcgcgcacgcccaacgtctcctacatccccgccggcgacaatggccagatgctgctcgggcttaacgccgcccggtgaatggatcgtctttttccgcgcttcagaatgtcaggacgagatgaaactgttcttggtggggaggagggaaagtttgtttctgtagagcttctagaagtgttgctaagagtctgttttttattaatgaaatggctgggaagtctgtttgtgctcaatagagtgtttcttctgtgaaataaaactggtctatgagatggtgtggcgagctctttgctttgctttgctctctgcaattcagttgtatcccatacatgctgtctttatctctgaaataaaacttttcgagtgaactgac

SEQ ID NO: 109736 - DNA, 606 bp, Zea mays
  Clone ID: MRT4577_31578C.1
gccggccgggctgggatgaaaatgaagtgtgctacctccaaaacccaaagaatgcttgctcgacaaaaaaggatcgacacttcttctgggtgatgccatatctaacagagtacgcaggctcgctgatcgataccagaggcaaactgcaatgttgcactattgagcgacagacgacgatcatcgtatgaaataatactcccctgtgctctccttgtgcctgatgggcctagcacgatgtgctatggtctgcgtcatgaacaccacctcgacacaaacaggaaagagggcgtacaactccaactaacctgatggaaggagtggatacaactctgcttcaataaacgacggtggcagcccctagacaggcgacggagcctgtatcataaatcaaaaaaatataagggctcatcgcgatgaaaactgtgcgagtattctgtcatgtcatgtcgagacgtatatgatgtcttggtctccataattactgaaatgtgaggaccataaatatgcaggacctgcacctcaactgaagtctacgtacttgctattgccacatatatgaacttcattattatgattattatatgcgtgacagagtagaaaacaaaa

SEQ ID NO: 109737 - DNA, 367 bp, Zea mays
  Clone ID: MRT4577_31579C.1
cgggacaaaaaaaacttttttttttttttttacccaaaaatatccttcccctaaaacaccaaaaaaattttttagtcttaagggacctttttaaaggcccccaattttggacattcataaaaggcaaaactccccaaaaagccccaattatgacaaccctttttgaaaaaaaaaatcccggatgaatatatgccccctgtttctggaacaaaagcccagggttttcgggggaaaaaagctcctttagcttttaaaaccctttggggatctccaaaaaaaaagggcttaaactgatatccccaaaccaacaaatctaaaccaaattctttaaaccaaggggttgaattttacgggaaaacggaccaag

SEQ ID NO: 109738 - DNA, 250 bp, Zea mays
  Clone ID: MRT4577_3157C.1
ggacttcaatgccggtcccacccaacccgtccggaaacgggtatgggaagccctgggctttttttttggaacacgccgaacaagttgaacggccggggattctttttccggcggagccggcttttcctgcgcaggggcaaccggcctttaatatggttggttgccccggggctggagcccaagcgccgccgccggaagggcctccgttgggctgccgtcaacggggacggggccctccgggggtttgggc

SEQ ID NO: 109739 - DNA, 334 bp, Zea mays
  unsure (1)..(334): unsure at all n locations
  Clone ID: MRT4577_31580C.1
cggaanacccggccgacccacgcgtacagaaaggcttcttccataacttccncancatttttattaacgtcaaccccatctacttcaaagtcacgcttttttctactttaggctagtcacacttnacttacncctcactccccaatccttatccaaattaaagaacttcttcttctattaattacattatattgtaatttgtcttctaatacgtcgttaccattattttaatatttcataataaccctcttttattttttataataatatatatcttttaactaaaaatatatatttacttgtccttccctcctataaattattccaatttttt

SEQ ID NO: 109740 - DNA, 216 bp, Zea mays
  Clone ID: MRT4577_31581C.1
cccacgcgtccgcggacgcgtgggcgagtacacggtggcggtgcggcggatggcgtgcgcgctgctggacctgatggcagaggcgctgaacatccccggcggcgcctgccactcagcacgagggactcgacccagccgaggcggccgctaccggcaatgcgctagcttccgtacccaaacgtggggccatactactgcttctcgccctgccgtcga

SEQ ID NO: 109741 - DNA, 782 bp, Zea mays
  Clone ID: MRT4577_31582C.1
ggcacgagatgaagcgccgtctcagtgttgccatatctttaatcggtgatcctaaggttgtttacatggacgagccgagctccggattccggccgggatcaactccattcctggcttcttccctaagctagctaacgacagtgttctgtatagctttttcagcgcattcgatggaagaggctgaagctctgtgcgacaggatagggatcatggtaaacgggagcctgcagtgcattggaaactccaaagagctgaaagccaggtacggaggcacgtacatgctcaccgtaacagctgcggcgggcgaggaggcggcggtggagcagcttgtccggtcgctctgccccgcggcgaacggagtgtaccgcatctccgggacgcagaagttcgagatgccgaagcaggggctgaggatcagcgaggtgttccaggccttggagcgtgccaagagctggctgaacatcgctgcctggggcctgtccgatgcaacgctggaagataccttcatcaaagtcgcaagcgggagtgacgcgtcctccgtgtaggctgtagatagatagatggcggcgtttggacttctgtattcgatctaataaatccatgccggggcgttgttactggtagacacaattgcgcacttcagatgcatgaaaagtccgggctatttgaacttggcgttgaactaagagatgagatgatagttgtaggttcgtataatcaaataaccatgtcatgtgagagtaaagttaaccctgaaaaaaaaaaaaaaaaaatttgcggcc

SEQ ID NO: 109742 - DNA, 390 bp, Zea mays
  unsure (1)..(390): unsure at all n locations
  Clone ID: MRT4577_31583C.1
ggcaaccagcatggacatgcacagtcaatgcactacactattttgccggagagatttttttaagcattcgactaacgaacgcagtggttcggcagggccacgaaaaaggcaataatgtttacagctgcatacccatagaaacaaancagacaggcacaaggcatataaacctccattccgttctcacgaccagctcctgctggcattcatggccgcccggacaaaaccttcgcatgtcgaatgaccgccctccagtacatccgtcaatgcccacatcacattgaacgcgctccgcagatcacctgacgaggtcatgtcttcaagccatgagagcaggtccttggacagccccaccatctccttcatgttgcccagcggacgcgtgggcgg

SEQ ID NO: 109743 - DNA, 214 bp, Zea mays
  Clone ID: MRT4577_31584C.1
ccccgcgtccgcccacgccgtccgaaaaaaaaaaaaaaaaaaaaaaaaaaaagggcggaacgaaaaaaaggtaaaaagtatctaaaggcgtccgcgtttcaataacactatgcttgcccacggcggtacctttaaatatagtgggcggccgcgtttaatggatatcaaacttactttcgcaacgctttcgactggataaaatcttgtcttctgc

SEQ ID NO: 109744 - DNA, 342 bp, Zea mays
  unsure (1)..(342): unsure at all n locations
  Clone ID: MRT4577_31585C.1
gtcgccgccgccgcaaccgccgtcacagtcacaccaagaacaacaacggttaacaacaagaacaacaataacaaaacaaaacaataaccacaaccaccgcaaggagaagggttaacctgcaaaccccgggccgtgaaaccaaaagggtgaagaggcagggtaaggaggaaggaggacgcacacgagcaggccgtaccaagagaatctgctcaacatggcggaggcgcggcgggagatcgtcancgccctcaagattcaccgggccagcagcaggaggcagcagcaacccaagtaccagcgtcatcaggagccgccgctgcgtcaaacaccgtttgcgcaact

SEQ ID NO: 109745 - DNA, 376 bp, Zea mays
  unsure (1)..(376): unsure at all n locations
  Clone ID: MRT4577_31586C.1
agcctaattactacttttagccaagccactcggttcacaccggtcttcctagactatggggtcgtgtttgtcttacccaccgacctagtttatggntccccgaggcttcaagcatatagcaaacacaacaatcaagtcagccgtgaagattcgcttgaccagctggaggaagctcgagacatagcactccttcattcggcaaaatatcaatagtccctttggcgctaccacgaaaggcgtgtccgaccccgagggttccaagaaggcgacctattgcctcggatacgacaatacaactgagggcatcacaagctcactcctcgttgggaaggacccttcatcattaccaaggtgctaaagccaggaacatacaagc

SEQ ID NO: 109746 - DNA, 565 bp, Zea mays
  Clone ID: MRT4577_31587C.1
ccggccgggattgattaattctagcagcaaattaaagagggatcggattggaactcgatcggaaggaaggtcctgcaggccggctggccggtcgtcgatcgaggaaccaagctgctgctgctgctgcttctactactggcggcgtcgactgcgacggcacatttctcgatcggcgacgtggacgagtacttgaacaggcgcacgcaggagtcccgccacaggaaccacggcggcgcgcagatcaatgacctcatctccagtgctgcgcgcttccacgccaacgtggatgcacgcgcgtatggtcgccgctccaacctgcagctgcaggaggaggaagcagcagctaccgcggggcgtgtaaccaaagcagaagaacaggaggcttctactcaaggtggagattaaccgcccaattattgcaattgcaattctcatcacccatttatattttctgccatcatttattcttcttttacacgcgtacgtgtgcgtaccccgatcccatcctttttggattattaagcattgtcgatggattaccaaaaaaaaaaaaaaaaaagcggcc

SEQ ID NO: 109747 - DNA, 770 bp, Zea mays
  Clone ID: MRT4577_31588C.1
gtctccgacggcccctggcgggagctcggggccggccggggtattaattaattctagcagcaaattaaagagggatcggattggaactcgatcggaaggaaggtcctgcaggccggctggccggtcgtcgatcgaggaaccaagctgctgctgctgctaccggacgacaccaaccatgatacggaggacgacggtgtgcctaggcctgctgcttctactactggcggcgtcgactgcgacggcacatttctcgatcggcgacgtggacgagtacttgaacaggcgcacgcaggagtcccgccacaggaaccacggcggcgcgcagatcaatgacctcatctccagtgctgcgcgcttccacgccaacgtggatgcacgcgcgtatggtcgccgctccaacctgcagctgcaggaggaggaagcagcagctaccgcggggcgtgtaaccaaagcagaagaacaggaggcttctactcaaggtggagattaaccgcccaattattgcaattgcaattctcatcacccatttatattttctgccatcatttattcttcttttacacgcgtacgtgtgcgtaccccgatcccatcctttttggattattaagcattgtcgatggattacttatattactctctctttctctatgtgtatatatatatgtaagcaagcatatttggatgttttataatatagaaatattttcttaaaaaaaaaaaaaaaaaaaaaaagttgcgggcccttgctttttttttttgtgcagcaaact

SEQ ID NO: 109748 - DNA, 312 bp, Zea mays
  Clone ID: MRT4577_31589C.1
gcattcacaaacacaccaatttttttttcacaagcaacaacctaacaacaggggcggccaatatattagtccgttcgggctctatatgcctcttttagtgagcgcaacaaatgctttcattattccacagtgctcacttgcttctagtgcctatattacacagttcctttcaccagtttacttgaatgggcttcgaacatcctgccttgcaagtttacaggctacaactagcgcttgcggagagcgttttacaattaccaattgcccaattgcaatcacaatactttggtacatttaaacctacaaaccatc

SEQ ID NO: 109749 - DNA, 415 bp, Zea mays
  Clone ID: MRT4577_3158C.1
ccgcggccggacgcgggtcgatcgagcgtgcgagagctcggtggacatctacttccggcggcaggtggagctgagcaccatgtaccggcatatggagaagcacaactacgagagcgcggcggaggccatccaggccgtgcgcgacaacaagctgcacgctttcatctgggactcggcggtgctggagttcgaggcctcgcagaaatgcgacctggtgaccacgggcgagctcttcttccgctcgggctttggcatcggcatgcgcaaggacagcccctggaagcagaacgtctccctgtccatcctcaagtcccacgagaacggcttcatggaagacctggacaagacgtgggttcggtaccaggagtgcgattcgcgcagcaacgcccctgctaccctcaccttcgagaatatg

SEQ ID NO: 109750 - DNA, 333 bp, Zea mays
  Clone ID: MRT4577_31590C.1
gtcggattctagggtcgactcacccatccgctctcctcagccgccgtcatcgccccttccttcgccgcacgagtgccaacccgcgacgtggtcactaggaggtccttcaacgtgcgcgcctctctccgcaaggacaacggcaacgtcgccatagcaatcgctgctacccgcgctggtgccggacgtgccatggcccaccaggtgcagatggccgcatgctacggccggctcgtcttcgagcccagccacttcaacgtcaaggccggcgacaccatcacattcaagaacaacgccagcttctcgcacaacgtcgtcttcgactaagacgatgtg

SEQ ID NO: 109751 - DNA, 124 bp, Zea mays
  Clone ID: MRT4577_31591C.1
ttctgaagcccggtgtcgactactccagtgggagattttattacctgcatgaactagtttaccgagcctcgtaagctaatcatttatatgaaaaaaacaagagcaaacatgcttgcgtttgggc

SEQ ID NO: 109752 - DNA, 273 bp, Zea mays
  Clone ID: MRT4577_31592C.1
accacgcgtccggatcgcacttgacgatcaaatcgaatcgcacctattcctctctttggcggtagccgcgtagcgcccgctcagtcgccgccgaccacggcggagaaattgcggcttcacctcgcctgtgtgtcctgattacgcgaggactcgagcggctaagcttagcagcgatctcggtctcagcgaggtcggtgggtgccggaagagaaatgggtggcttccacttacatcacacctgtgtcaaggcacgcaaagtgtttgtgcgagatg

SEQ ID NO: 109753 - DNA, 244 bp, Zea mays
  Clone ID: MRT4577_31593C.1
acccacgcgtgccacaaagtctgctagccagccagccatcagccagcttgctcgccgtgcccgtccttctttctcgactgcggtccggtccgttccgtaccgcccgccgacgccggcggattcagggagtggagatgaagaaaatcgtctgcgccgtactagttgccgcctcggcggccaccgtggcgcttgccgcggaggctccagctccggcccccaccagcgggtccttcgccgtcgcgcc

SEQ ID NO: 109754 - DNA, 375 bp, Zea mays
  Clone ID: MRT4577_31594C.1
gtattggaagatgtttaaaattttcaaatcaaaataaaaaaaataaaaaaaatggcactttgacacaccccaaccaaccagcaaaaaaccatggaaaacacccaaccccccctgcacgcatccttgaccacaaatcgaaaccacacactgaaccccgagaccggtcgctgcgaaacaactctgggcagcacccaagaacctaccctgatgggcaaagccggtgggccaaaagccccagggagggcgggggaaaagcggagctcccccatgcgcccgccaaaccgaaagggggaccggagaaccaaaaaagccccaaaaagcgcggggaaggaaaagaaaaaaaaccacaaacgatacccctgcacagggcccccc

SEQ ID NO: 109755 - DNA, 250 bp, Zea mays
  Clone ID: MRT4577_31595C.1
gggggaaccacgaaattgaaccaaaataacaaaaagggggcaaaaaaaaaacccacgacggtgtacaacagaaccaacccccaccttacttaacaccagcaaccagaactttccacttaaccgggatgcacattcaaaaaagcaaaaaaaagggagccccaaattaccccaaagaagggaaacggactttactccacagggccagggtgcagggtggcacccacccaaaccctggcgggggaccccaaaa

SEQ ID NO: 109756 - DNA, 288 bp, Zea mays
  Clone ID: MRT4577_31596C.1
atgcggtttttgcggtgaggagtgcaatggtgcggatgttgagaccctgcaggtactatgaaagctccaaaaaaggttttccccccatgacattgttgttttttcagtagttttgggtttaggactatgtagtggtgctaaaacctaaaaggtagaatgtggaatatgcagtgcctaaaagctacagctcaaatgaaagcaagtcatagtatctagggtatatgttcatggacatttccagcatgcttgagaaatactgcaaacttgtgtaggtcgttttgaactgat

SEQ ID NO: 109757 - DNA, 670 bp, Zea mays
  unsure (1)..(670): unsure at all n locations
  Clone ID: MRT4577_31597C.1
ctgaaggnaaananacgatcgtatctgcggnaacagcagcgaaggatcggagcctatccaatggccgagggcaacagcagctccggcggcgacctgttctccagcggcaagctggtggcgggggccgccgtgtcggtgttccagcagaagagcgtggagaacgtcgacaagcaggaggtcgccggcgcggcggccgagctcctgcacgcggcgtccgcgtacggtaagctcgacgacaagccggccgggcagtacgtcgagaaggccgaggggtacttgaaggagttcagcgcgggcgcgggacacgccaccgagcaggagcagcctgcgccggccgcggaggaaggcagcaagtcgtcggagggcttcggcctcggcgacgtcatgaagggcgccgagcagctggtgggagggaagcagcagggcggcggggaggagagcgccggcggcggtgggttgtttaagatggcccagggcttcctcaagtagatattgtctggccaacgtatatacgagtacgtaattagcttcaaaataatgttcccctcgcctttatttgctgttcaagtccctgtaataaccgagaacgttaattgtagcagtgtgttttttatatgattaaataagtactatgttgtataaaaaaaaaaaaaaaaaaaaacccaaaccc

SEQ ID NO: 109758 - DNA, 352 bp, Zea mays
  Clone ID: MRT4577_31598C.1
agcgtccgacaagatgcgctccgtgaccctgggcgggacgatccagagggcggtgcggaggatggctggcggcgccggccggaggagaccccacgccttggcggactcggggaccgccgactcgtcggcgtcagcatcggccagctgctccggggatgatatcagcagcactggtagtgccaagagggaagcggtacaaaggtgcaccatgcatcgttgaaaggatcccgctttgtttcgagctgtgatgggctctgttcctcttaaatggaagctggctgatgttggccgtggtgggcatgtggttatacgaaagttgaaaattgaagtcctctgatgaaatccattctct

SEQ ID NO: 109759 - DNA, 663 bp, Zea mays
  Clone ID: MRT4577_31599C.1
cacaaaagtagctcccgctaatccgtccccgtacctctttcgcctataaagagatcgatgcgtgccactggctcactcacggcagctctgaagcgagaaagagatcgatcgtattcgtatccgcggaacaagcagcgaaggatcggagcctatccaatggccgagggcaacagcagctccggcggcgacctgttctccagcggcaagctggtggcgggggccgccgtgtcggtgttccagcagaagagcgtggagaacgtcgacaagcaggaggtcgccggcgcggcggccgagctcctgcacgcggcgtccgcgtacggtaagctcgacgacaagccggccgggcagtacgtcgagaaggccgaggggtacttgaaggagttcagcgcgggcgcgggacacgccaccgagcaggagcagcctgcggcggcagcaggcgacgacgcggcgcccaagccaccggcgccggaggcgcccaaggagccggcggcggtgcctgcgccggccgcggaggaaggcagcaagtcgtcggagggcttcggcctcggcgacgtcatgaagggcgccgagcagctggtgggagggaagcagcagggaggcgaggagaagggcaaagaaaagaaagataagaaggacaagggtgagaagaatgacaaggagaag

SEQ ID NO: 109760 - DNA, 1003 bp, Zea mays
  unsure (1)..(1003): unsure at all n locations
  Clone ID: MRT4577_3159C.1
cggccgctcgaggcggcgggcggggatctcattgctcctccgttcgctccctcttcctctttgtcgtcctcttcaccagcggtggtggtggtggcaggtgactgtgactagcaggagcgcggaggaggggtccttcggtcgccatggctcagatcttgctccatgggaacctccacgtcaccatcttcgaggcctcctcgctctcccaccccggccgcgccagcggcggcgcccccaagttcatccgcaagtttgtagagggcattgaggaaactgtcggtgttggcaaaggaagctccaagctatatgccaccattgatctcgagaaagctcgtgttgggcgtaccaggatgttgggcaacgagcccgtcaatcctcgctggtacgagtcgttccacatctactgtgcgcaccttgccgccgatgtgatcttcacgctgaaggccgacaacgcgatcggggcgacgctcattgggagggcgtacctgcctgtcggagagctcctggaaggggaggagatcgataggtggcttgaaatctgtgatgacaaccgggagcctgttggtgagagcaagatccatgtgaagcttcagtactttggcgttgagaaggaccgcaactgggcgaggggtgtccggagcgtcaagtttcctggtgttccttacaccttcttctcgcagaggcaaggatgcaatgctagattgtagcaagatgctcatgtcccagacaactttatccccaagtttgctcttggggacggaaagaactatgggcatccgggcccgggtgaggatatcccaagtaggaatacctncagnnaatttttannaaacccccccccccccccaggaagngccatggctttttccctgtctggcctcagcttggggcccccctgtttgtgtttgagatactgaaagttcagaaaccactgttttttttaaaaaaaaaaaaaaaaaaaccaaaaaaaaaaaaaaaaaaaccaccccccccccgcgcgcgc

SEQ ID NO: 109761 - DNA, 1391 bp, Zea mays
  unsure (1)..(1391): unsure at all n locations
  Clone ID: MRT4577_315C.1
atgaagccagttttatccttggttcaatcggtntcttactgaattcggcacgaggggcccaattctcacgcgctcgccgcctaggagcattcacgttggcggcgggcggcggctcggttcctctcctccaccgcacctccaagaatccacctccacgactgagctgacggctcggtagcgccatggcagttcaccggctccaaccttccccatccggcctacagtgctccaccgcccggtcgccagtgctcctccatgggccacggctgacgggtgcacgcaccgggcgacgagcacccaccaccggttatgtgcaccctctctccttcggtccttcctccctttcttccgtgctaagccaccgagcacccaagcggtttggcctgatgccacatctctggtaggagaggtggatttggtggacctagattcgatgtgcagagagcgacttggaggtggctgacatcttcaagcactgcatcatgcagttacaactactgttggccatacagggaaatgctgggcctattataccaattgttcaaagcatggaccttgtataattacatgtttttatcatagatagattaatttctgaaatgcccatagattggtatatttgtggaaatttattggccaactgtaagcccgtcgtgatgcatagaacatttgtggtataagatttttctgttgatgtttgcaggttatttttccagcacttgacattcgagtgaaaaatgtcgcagggacatattctcttgaacataaaggagaaaatgatctcttcgcacatcagacaaggcttctactctttcagaagaaagtcatttttaggagaatcttgaacaaaatgaccagatgtttaggcctagttggaaggacatttttcgaatgaatcagagtgagctcgaggctgagattcgaaaaggtctctcgagattctactcttgatccaaggaggaaggcctatctgatccaaaatctcatgaccaggtaactcaagaggtccacttattgactcttatgaccatgtaattggtgttaatacaactacattaacacgtaaaggttggtagatctggaaggtcttgatggtctaatacctgtctatgagtacgaaagaaaaggcgagagaagtcggtctctgcagcatcgcgcgtgaaaaaaaatcagccaattccatgagcattgatgttgtcatgacttcaaggagagaccatgctaagaataatgcattatgacacttgtcaggcttacatatcgattgtttgatatggatagatgtataggnttatgaccaatccagttcaaagcaatttgagtacaaaagaaataaggagcaggaaagctctacatcttgcattttgctgtttttttgtcgaagtttcaat

SEQ ID NO: 109762 - DNA, 318 bp, Zea mays
  Clone ID: MRT4577_31600C.1
gccataaatatacattgcgggaaatgcggagattccaaaatttggggggtcaacccaaagaccgacaaaaaccggggataaaaaaaggaagggcaaccggcagcaaatgggggaccccatttatccgggtttaatctaaaaaaaaaaaatgcctggtacagggattaagggaacaacaaatgcctttgcgcaaggtctgatcgccaaataggatagcactacacttgggaaccctttcagtaactgtaccgtcctaggaatttcgggcgatacaacttttaaagagatacgccctactctcaggaaagggcaactttt

SEQ ID NO: 109763 - DNA, 247 bp, Zea mays
  Clone ID: MRT4577_31601C.1
tagaacagcgtggagaacgtcgacaagcaggaggtcgtcggcgcggcggccgagctcctgcacgcggcgtccgcgtacggtaagctcgacgacaagccggtcgggcagtacgtcgagaaggccgaggggtacccaagccaccggcgccggaggcgcccaaggagccggcggcggtgcctgcgccggccgaggaggaaggcagcaagtcgtcggagggcttcggcctcggtgacgttaagaagggcgc

SEQ ID NO: 109764 - DNA, 366 bp, Zea mays
  Clone ID: MRT4577_31602C.1
ccggccgggaagatccgcgaccgtccatccataaagccctagctgatagttcgtgaatccatggaattcctactactatcgtaaccgacgcccatgtactacaaaactgaatagtgatatgacacccgctggcaatcattaattatgaggccacattctcccgcctaatataagtacgaagactcgttatacattgtgaagataaccgcgtacggatactgctaatgaggaataccagtcgcacgtagaacagccgcgaacttctagtgagactctctgaaacatcacaacaagcaacatacacagcatgcattgtagagccttttctgtcagcataagaaaaaaacatgaaaatagcctctctac

SEQ ID NO: 109765 - DNA, 1627 bp, Zea mays
  Clone ID: MRT4577_31603C.1
tgacgaattcaggacagacaacaatagcggtcttggcatcgaagaatatcgtatcctcagtgcgtagaatccccgttgcacgcccgtcttaagcgagaaagagatcgatcgtattcgtatccgcggaacaagcagcgaaggatcggagcctatccaatggccgagggcaagagcagctccggcggcgacctgttctccagcggcaagctggtggcgggggccgccgtgtcggtgttccagcagaagagcgtggagaacgtcgacaagcaggaggtcgccggcgcggcggccgagctcctgcacgcggcgtccgcgtacggtaagctcgacgacaagccggccgggcagtacgtcgagaaggccgaggggtacctgaaggagttcagcgcgggacacgccaccgagcaggagcagcctgcggcggcagcaggcgacgacgcggcgcccaagtcaccggcgccggaggcgcccaaggagccggcggcggtgcctgcgccggccgcggaggaaggcagcaagtcgtcggaggggttcggcctcggcgacgtcatgaagggcgccgagcagctggtgggagggaataagcagggcggcggggaggagagcgccggcggcggtgggctgtttaagatggcccagggcttcctcaagtagatattgtctggccaacgtatatacgagtacgtaattagcttcaaaataatgttcccctcgcctttatttgctgttcaagtccctgtaataaccgagaacgttaattgtagcagtgtgttttttatatgattaaataagggtactatgttgtataaagctaaaagaatagtcgtgctaactcagatcatttggttaacgtttgttcccttcatccacaatagcttactgcatggcataatttctgattctttggctgtagctgatgttgcgatggtgcaagaggaggtgaacagataatgaagatttcaagtaaatggcgagttgaatccattgaacagataataagaataggtttaagtgtcattaatagtgcaagctactacactaggattttcaacatgatgaacagatcggccgatggatgctatgtggctgtatccagccaagggaacttctatttgatgtgggagcttgggcagccgttttggcaaccccacatcagggtggtggcatggagattctgaacatggggtggagagcggacagtggactttttgctgttgcgcggtggtgggctcttcctcagaataggaacagtcatataactgaagactttgaggaggtgcaggtgcagagctgatggtttgggatccttgacgtggggtaccgctcataggaggaggcttgggctgcttgtggcagcaacgtgttgcacaagaccataaataaagggaagagctggatgcacgacaaggctgtcgccaccaacctctactccgtcaagcaacgacgacgtgttgcttcggggtcttggctgaacgatcagacatcctatgtatatctgtgtacaacaaacgacatctgctactactactaccataaaagattgccgactgtgcttgcgttctctcatctgtaacacaaatgagtgtaaagagacatgtgctatttccttggaacttgaaaactttgt

SEQ ID NO: 109766 - DNA, 974 bp, Zea mays
  Clone ID: MRT4577_31604C.1
gccggccgggtcgggacggcagctctgaagcgaaagagatcgatcgtatctgcggaacaagcagcgaaggatcggagcctatccaatggccgagggcaacagcagctccggcggcgacctgttctccagcggcaagctggtggcgggggccgccgtgtcggtgttccagcagaagagcgtggagaacgtcgacaagcaggaggtcgccggggcggcgaaggagctcctgcacgcggcgtccgtgtacggtaagctcgacgacaagccggccgggcagtacgtcgagaaggccgaggggtacctcaaggagttcagcgcgggacacgccaccgagcaggagcagcctgcggcggcaccaggcgacgacgcggcgcccaagccaccggcgccggaggcgcccaaggagccggcggcggtgcctgcgccggccgcggaggaaggcagcaagtcgtcggagggcttcggcctcggcgacgtcatgaagggcgccgagcagctggtgggagggaagcagcagggcggcggggaggagagcgccggcggcggtgggctgtttaagatggcccagggcttcctcaagtagatatattgtctggccaacgtatatacgtgtactcttgtagtgtctgttacgtaattagcttcaaaataatgttcccctcgcctttatttgctgtgcgcgcgcttgcttcaagtccctgtaataaccgagaacgttaattgtagcagtgtgttttttatatgattaaataagtactattgaataaagctagtgcagctgtgcaggttactctatattcttactctatatcactatttatagtctactcatcaataaatagattgcttgataatatacatcaagaaggacatcaccatagagttcataacaaatgcatagattgatgatttctgtgatacgaggtcacacagagtacaaataaaataaagtggttagtttgtaatcccaaaaa

SEQ ID NO: 109767 - DNA, 196 bp, Zea mays
  Clone ID: MRT4577_31605C.1
attcccggtcgacgcactcttccgctgctattatgtcactaatacctaagacctatccgttctgtggctcaaaacttggacttggcatgattccaaaatctcatatccttcctatttcacctcccttgcccttttactcatcttacttgcctttctctctttaccttctccctctattccttcatttgaatcccat

SEQ ID NO: 109768 - DNA, 1306 bp, Zea mays
  Clone ID: MRT4577_31606C.1
cccggcaacccaaaatagctcccactaattcgttcccgtacctctttcgcctataaagagacgatccgtgccactggctcactcacggcagctctgaagggaaagagatcgatcgtatctgcggaacaagcagcgaaggatcggagcctatccaatggccgagggcaacagcagctccggcggcgacctgttctccagcggcaagctggtggcgggggccgccgtgtcggtgttccagcagaagagcgtggagaacgtcgacaagcaggaggtcgccggcgcggcggccgagctcctgcacgcggcgtccgcgtacggtaagctcgacgacaagccggccgggcagtacgtcgagaaggccgaggggtacttgaaggagttcagcgcgggcgcgggacacgccaccgagcaggagcagcctgcggcggcagcaggcgacgacgcggcgcccaagccaccggcgccggaggcgcccaaggagccggcggcggtgcctgcgccggccgcggaggaaggcagcaagtcgtcggagggcttcggcctcggcgacgtcatgaagggcgccgagcagctggtgggagggaagcagcagggcggcggggaggagagcgccggcggcggtgggttgtttaagatggcccagggcttcctcaagtagatattgtctggccaacgtatatacgagtacgtaattagcttcaaaataatgttcccctcgcctttatttgctgttcaagtccctgtaataaccgagaacgttaattgtagcagtgtgttttttatatgattaaataagtactatgttgtataaggctagtgcagctgtgcaggttactctatattcttactctatatcactatttatggtctactcatcaataaatagattggttgataatattcaaggacgatgaaccggacagctacgccgacaagaggagctagtttgtgccctctccaaagagtgctcatcaatacgattccagaacgatatgtattggctagtgtttgctgttaacatcatagcggcctgtatgttcaaataatggagcgagtatttctgatgagtttgagttgtcgggggctgtggaactttcaaacatggcgatacgttataatgtcgttttgctagatgctatgctttcatcgtggcttggaaatcggggtcttgtcaagtttcagctcacagacggatctgtaaatggtactgaaccctacatcttatgttttctgtggatgctctgcgcatgtgacaaaaaagcagtaaaaatgaagtgtgaaagtttaatttcagtacaaacgaaaa

SEQ ID NO: 109769 - DNA, 483 bp, Zea mays
  unsure (1)..(483): unsure at all n locations
  Clone ID: MRT4577_31607C.1
gccggccggttactgnatcatcgacgtatcacgtacctaggtcttcttatactatcctagacggcgaacctgtcagaagacagggaagatgccgatactgacgaggataatccggaaaaagcggggatcggaggtctaatcccccacctctgccgctacagaaggcttaggccaacatgaggaactgcatccgctacatctcctccatgctacataggaagcccatggcatgccccacgatgaccaaccttgggtatgcgtccgacctgtcaagcagtaactaactcccctgcgaaggcaacaacgataggttgcacaacatctctgagactcgcagtcctcatcgacgacaacgagacctagtgaagtgatctcgatcccaacgcgaccactacgattaccaaccagacggtggagactgctgcacccctctacattgtcaagcacgaagaacaattgctacgctcctcagctcacttatga

SEQ ID NO: 109770 - DNA, 1605 bp, Zea mays
  unsure (1)..(1605): unsure at all n locations
  Clone ID: MRT4577_31608C.1
gcagctctgaagcgaaagagatcgatcgtatctgcggaacaagcagcgaaggatcggagcctatccaatggccgagggcaacagcagctccggcggcgacctgttctccagcggcaagctggtggcgggggccgccgtgtcggtgttccagcagaagagcgtggagaacgtcgacaagcaggaggtcgccggcgcggcggccgagctcctgcacgcggcgtccgcgtacggtaagctcgacgacaagccggccgggcagtacgtcgagaaggccgaggggtacctgaaggagttcagcgcgggacacgccaccgagcaggagcagcctgcggcggcagcaggcgacgacgcggcgcccaagccaccggcgccggaggcgcccaaggagccggcggcggtgcctgcgccggccgcggaggaaggcagcaagtcgtcggagggcttcggcctcggcgacgtcatgaagggcgccgagcagctggtgggagggaagcagcagggcggcggggaggagagcgccggcggcggtgggctgtttaagatggcccagggcttcctcaagtagatatattgtctggccaacgtacgtgtactcttgtagtatctgttacgtaattagcttcaaaataatgttcccctcgcctttatttgctgttcaagtccctgtaataaccgagaacgttaattgtagcagtgtgttttttatatgattaaataagtactatgttgtataaaaaaaaaaaaaaaaaaaaaaaaaaaaaaaaaaaaaaaaaaaaaaaaaaaaaaaaaaaaaaaaaaaaaaaaaaaaaaaaaaaaaaaaaaaaaaaaaaaaaacctggaggccggccggggcttcactcgcgtccgcccccgccgccgcctttcgtcccagcccctaaaccattctccattcctctcctcagtttagcacaatggcactggctaataagcttggtggtctgctcaagaaagccacaagttcaaatccgtctgtctaccaagcaatcagatgcatgtcatccaagctctttgttggagggatttcttatcaaactgatgatcacagtctcagggacgagtttgccaaatatgggcaagtcattgaaggtatcatgcccattgctgcacttgccttggctctactttctgctgaccagttatgcttcaatctgtccagctaggattatcattgaccgtgagtctgggaggtctagaggttttggctttgtaacttacacgtcttctgaggaggcttcagctgccattactgccttggatggaaagactctcgatggacggagcatacgggttaatcatgctaacgagaagaccggtggctttcgtggcggcggtggctatggtggcggcggctatggtggtggtggaggctatggtggtgctggtggaggcggtggatacggtggcggccactatggtggtggtggtggcagcggtggatacggtggcggcgactatggtggcaactacagcaacaggggtgggtggtggtgatttatggagttgctgggtggaggtggaggcaactttactgctgngagtagcgacagctttgccaacagtaactttggttctgacagtagtttt

SEQ ID NO: 109771 - DNA, 934 bp, Zea mays
  unsure (1)..(934): unsure at all n locations
  Clone ID: MRT4577_31609C.1
aattcggcacgaggcgcccccatcgaaacacagccaaaaagccaccccgtccaaaacacacacacatagctcccaatcccaacccccggccaccctccatctcctgctcctcgcatcgccggtgacctcgccgcctcgctctgtctcaaaaccctagccccggttctctccgccgcctcgccccgttcgctcggatcgcgccgcgggagccgctgcctctcctctctctccgccctcaaccggaaaccctagctcactcccccgctcgctccttcggatcccgcgaggctccgatggcggagaggaagctggatcgaccctcggcactcggcaaaggtgggctgtcgcttgggatcgaggaggacagggccgccgccgccatggggttcgtcgaccactccaaagatcagcaccacctggataacagcattcccctttctcctcagtggctctacgccaaacctgctgatggaaagatctcgctgcctcatgggtcctcccttgaacctgctgaaaaggaagcgaggatgttggaaggaactgctgataggaaagaacgaaggaggaatgtatttgatgctgacagtggtcttcgttggcttgaagaggagagggagacaagccttcttgggaggagggagcgcaagaaggatgtagaccgggatgtggataaccgcaagatcgatcgccgatctgacaatgtttctgcaagggacaacactgatccgcgcacagctccttcatctgaaaggtggaatgatggttccacccgtagcctgggggatgagggtcgacgtgatgcanaatggtcatcaagatggggccccgatngacaggagaaggactccanggtcagacagaagggtgatgcagagaaggatgaactcatgctgataacagacngtccaggaaagctgctgtctgagtccgattc

SEQ ID NO: 109772 - DNA, 300 bp, Zea mays
  Clone ID: MRT4577_3160C.1
gcgtccgatcacacgtccgccgacgcgtcagcggacgcgtgggcgggtttgccgtgttcctcgtccatctgaccaccgatcgctatcaccgggaccggtatcaaccccgcgcggagccttggcgccgccgtaatttacaaccagcaccatgcctgggctgacaagtggatcttctgggtcggccccttcatcagcgcagcgctggctgccatctagcaccacctgatcttcatggcgatcgcgttcaggagtaggtcttaaaggatcagatgctgctgcttcgacatgctgccggtcttg

SEQ ID NO: 109773 - DNA, 124 bp, Zea mays
  Clone ID: MRT4577_31610C.1
aaacgaacggagaggcggtgcgttttaactgggagcggtagacaggtcatcatgcatacgatacaagctgccctctatgcacatacagtgaattacacatatagtcgatgaaacaacagggtct

SEQ ID NO: 109774 - DNA, 492 bp, Zea mays
  Clone ID: MRT4577_31611C.1
gcggggtatcacaaagcatacttttatttatataaaatcggattttagtgataagataacttctgcctatatgacaaaaaaaaaaaaaaaaaaaaaaaaaaaaaaaaaaaaaaaaaaaaaaaaaaaaaaaaaaaaaaaaaaaaaaaaaaaaaaaaaaagaaccagcccggagcggccaaaaaaaaaggaaaaaaaatcctccctccgggggggcgctattaaaagggccaaatcccacaaccagggggggggtaataagggaacccgctcttgccccaaagaaggggtaaaccgggcacaaacccgccccccgggggaaaccggaatcccgttccaaatcccccggagtgccaaaggggggagctaaagggcaaaagcggggggggcctaaggggcggcttaccaaacataaaacgggtgggcccaccggccctattgaaaagggaaaacccgggggggaggcgggtttaaaaaaagggcccactccccggg

SEQ ID NO: 109775 - DNA, 236 bp, Zea mays
  Clone ID: MRT4577_31612C.1
cactcttcctgtccatttaacttatggttttgattattgcaatctttaaattcaactgtgcttcttaaaaggcgtatctgtgccaaaattttaatcacttcaatcaccctagcttatacaataactctttctaatcatttccatagttgtattcaatgtttttttttgtcttcatcttcattcaatcaaccattctttatttgtattattttatttcctctaacttatttatctca

SEQ ID NO: 109776 - DNA, 467 bp, Zea mays
  Clone ID: MRT4577_31613C.1
cgagctggtagatgacggagcccgccacgatagtccataagcggccggcgaaggagtcggcgactaggccgccaattataggggtgaggttgggagaagccatggaagttgttgagcgtgttggaggcgtcgacgagcgtcaactgcagctgctgcgtcaggtaggtgatcaggttggcgttgaacccgatcgttgcgaaccggtcgcagaaatcgtttgatgcaccaccacggacatcttagctcttgtttagcttttacactggctacaatatatgatagacgcgttgggtagtagagactagagaaacacttcatctaggatgaacggcacggtcttgaagccgccctgcttcctcttgtcgcccagatccccttcgccatgccatcgcctgctggcgtctttctccaacatgcctgcaaggtgtgcagcagcacgggaaccagagatccctccctaggagttg

SEQ ID NO: 109777 - DNA, 370 bp, Zea mays
  unsure (1)..(370): unsure at all n locations
  Clone ID: MRT4577_31614C.1
gttcaaactaactgcatcgacttcaccctgcctgctgaggccttttttgctgcggaanttgaggaactcagggcttatcagtttaagcccncttatcattttactttttatccctactagcgtgaccatgcatgtgttgggggtgggtacagggggcccaataagcataagggcacctcttaaatccgaatccgtgctcgtgttgggctaccaaagatgctttctttggattgtgggttaataaaaaactttgaaggattagtctaagtatgtgaacctttttcagtgaaagctggtttatcatcgacaggtggtaagggctgatgcaatggttgttgggttaacaacattattattattggtggtggtg

SEQ ID NO: 109778 - DNA, 287 bp, Zea mays
  Clone ID: MRT4577_31615C.1
agtacctatggctacacaacagagaagaagccagcagaaagagtccaagtgctgcacttatagcaaacaagattaggcgcgatcaactcagtgaattagaagctgatgagcagtctcatagcttgctgagaagatgcaagaactctccttaagcaaatccatggcaactagttcatcctatgatgcttgagggatggaaatgacacagagaataaataattgatttgcttccttgggagcgaagagcacatcaggcgccaaaaaaaagaaacaaaaggagggcgcct

SEQ ID NO: 109779 - DNA, 800 bp, Zea mays
  unsure (1)..(800): unsure at all n locations
  Clone ID: MRT4577_31616C.1
acccctgcccctcctcactccgccgccgctgaccctacgccgacccccacccccgccgcgctgttgccgagcgtgtccgatccgagctccagttccggtgcagccatcgccgaatttcccagtcgctagctcgaacccaaccccacgcctgctcgatttcgcttccttgacatcgcccgcgcacccaccgcgggcagtcgctgatgaccaccgcgccgttcgtctccccatcgctcccccgactacactccgcgcgggcctctccgttccccaaaccctccgttgggtccgggggtggggtcgcgttccccgcccggacgtacgggtcatcgcttcgcctgaggtctgccgtcatgtctgccagcggcgtcggggggaacggctctccgatggcgcctgaggagtccacagtgtcttctaggttgggggaggtcaagcgggtaaccaaggaaacaaatgtgcatgtcaagatcaacctggacggcactggtgttgcaaactccagcacagggataccgttcttggatcacatgcttgatcaactggcatctcatggactgtttgatgtatacgtgaaggcgacgggtgacacacacattgatgatcatcactcaaatgangatattgctttagcaattggaacggcattacttcaagcacttggtgaccgaaaagaatttacccggtttgggcatttacagcaccacttgatgangcagcagttgaagttatactggatctatctggtcgaccctcattgagctgcggcttagcatcctaccgaaagagtggacatatga

SEQ ID NO: 109780 - DNA, 356 bp, Zea mays
  Clone ID: MRT4577_31617C.1
attcatcattttttactgtgtttatttagggttttttattatccatcatgcatttttctttcaccatcttgcgaaacaccatggcggcattttgcaacggtcgaaacccatcgaagggcaccaaaatcagctgcctttcagtacacaatagaggggcaccgcgccaagaacgacttttttccaccaaaatagcggtgcggcctgcccaaggactcccagtcgctcccactaatatttcttgacatggacgcctaccccagggggccccacacccactaacagggggacaacattccgttcttcaccaagggcccccccgaggggttctatggcgccatccgggcggaccctggggc

SEQ ID NO: 109781 - DNA, 427 bp, Zea mays
  Clone ID: MRT4577_31618C.1
gtgtttgggctgtcctagacgcctattgctgcattcgtgctctagtccagaagcatagctatttgagcgagagaagctcctgctgatgaagtgagaggttgtggtacgtgaggtgtgcgttcgtggacatcgacggcgcctaggacgatggtactgagtgtatgatgcatggtgctcgtacggaagggaaaaggcggagcgtcgctcgacaagaacaagaaggggttcatcgatgagcagaccacttcactggaggccatgttcgcaacacaagccatgctggagccccgccagaaactgcagctggcgcaggagcttggactgcagccgcgccatgaggtcatgtggtttcagaacaagcgcgcgcgcttgaagtccaagctgctggagcgcaagcactcggcgctgcgcgacgactaccatgcgc

SEQ ID NO: 109782 - DNA, 381 bp, Zea mays
  Clone ID: MRT4577_31619C.1
cacttgcaaatattagcatatttgaagagttgccattttgatcatcaaaaaaaaaaaaaggaaaaaaaaaaaaaaaaaaaaaaaaaaaaaaaaaaaaaaaaaaaaaaaaaaaaaaaaaaaaaaaaaaaaaaaaaaaagagggcaagcaaaaaaataaaaaaataaaaaatggggggggcctttttaaaggttcaatgttttttacccctgccttgtgtgaaataacttttttttttgggcaacttaatttaatttcaggggccgggtttttacaaagttgggctgggaaaaaactggtcttccctaatttaaattgtcttagtaaaaaacaccctttttgccggtggggttttaaacataaaggcccccttaaatcccctt

SEQ ID NO: 109783 - DNA, 656 bp, Zea mays
  unsure (1)..(656): unsure at all n locations
  Clone ID: MRT4577_3161C.1
gcatggttgtttcntcaccgagtttccctccgnccagggaaagccccctgccgcgggccggcgttgctgcttcaccactgtcgcccacttaacacacccacgcgacctagcacggacagatgggcccaggtcaccagcgcctcatctgatccgcgcgcggagctgcgttcaccggtgtgacgctggcgcgtggggccatctcgtcggttccatctcctaccctatattgaactcgtcctgtctattacgaaggagccggagcgaacatcgcaccaagatacagtctgatacctgtgatgcttgcctaggatccctcacggggtataaaactaagccattctcacgcccgaccctccctcaaacctaaacgtcgagactgcgtcgtcggtgatgggtgcgagcgagagagattggcgccgcttggcgccgaaggctgggtgacccgctgtccgccgccgatctctgcccgtgcgcccgctgcccgggggacttcatcatggggtcaggaagagtcaccagagccagtggtacatgcacgtggggtgttgtatgtgcgacatcgaccggcaacagagaattgctcgttgtcgcttgatgttgccgtaaatccgcctcacaacgtggaacttctcctggtaagccggtctggggcgtgt

SEQ ID NO: 109784 - DNA, 849 bp, Zea mays
  unsure (1)..(849): unsure at all n locations
  Clone ID: MRT4577_31620C.1
gggatnnnnngggnnnnnngaattcggcccgaggaagcctgcatacggggccaaggtgnnnnnnnnnnnnnnnnnnnnnnngcggctggacatcccggacgaggtgtgggacgccgagaggtttgtgggcggcggtgtcatcctagacacgagcacgtcggtgacgtcgctggtgccggaggcgtacgcgccggtgacggcggcgctggacaggcacctgtcgcacctgccgcgggtgtacgagctggagggcttcgagtactgctacaagtggaccttcaccggcgacggcgtggacccggcgcacaacgtgacgatacccagcttcacggtggaaatggcaggcggcgcgaggctggagccggaagccaagagcgtggtgatgccggaggtggagcccggggtggcgtgcctggcctttaggaagctgccgcggggagggcccgggatcttgggcaacgtgctcatgcaggagtacatctgggagatcgaccacggaaaggggaagatgaggttcaggaaggacaagtgcaacacccatcatctccacaacagcaaaggcggagaggtctataataataataatggcaattcctcctctactgtcgtgcatcgcgtcaattaattcgttctctcttctctatctctacaaaattaaaggaccagaccatgcatgcacttcgctgtatgtaacaaaagaagcaggtagctcagctgccttgcctgtgttatgtttatttcacttcttcatttgctgattatcttggagtatatacccactctgtaagaggattacattcataatgagagaaaagcgggggttacatgtttaagaaaaagaagaacaat

SEQ ID NO: 109785 - DNA, 362 bp, Zea mays
  Clone ID: MRT4577_31621C.1
tcgatttacttttttttaaaccttttgccagaacttcgttggtctttccatatctgatggttacattgctactggctctgaaacaaatgaggtatgcattccttagctaagcttccacaaacttgtctggacatcggactcgtagttagattggccaggactttacctacctttaagcaaaaatcatagggtacgcgtgtaaatattacatttgttgcaaggaagctgatgtttatttgtgatgcatatagtgtagttcaggatgctcatgattgtattcatttggtatgccatgtgtatatatgtcatatacaacgagactggagtgactttcatacttctctaacaacaacaacaaaatc

SEQ ID NO: 109786 - DNA, 442 bp, Zea mays
  Clone ID: MRT4577_31622C.1
cgcacgtgggcatgtacctggtgtcggtgcgcatcggcacgccggcgctgccgtacaacctggttttggacaccgccaccgacctgacgtggatcaactgtcgtctgcggcgccgcaagggcaagcactatgggcgacagtcgatggggcagacgatgtcggtgggcggggaaggcgcgacggcggcgaagaaggaggcgagcaagaactggtaccggccggccaagtcgtcgtcgtggcgcaggatccggtgctcgcagaaggagtgcgcggtgctgccctacaacacgtgccagagccccagcaaggcagagtcgtgcagctacttccagaagacgcaggacggcacggtgacgatcggcatctatggcaaggagaaggcgacggtgacggtgtcggacgggcggatggccaagctccccggtctcatcctgggctgctc

SEQ ID NO: 109787 - DNA, 1977 bp, Zea mays
  Clone ID: MRT4577_31623C.1
cccacagcgttcgcggacgcgtgggcggacgcgtgggcgaagccggagaatgaagagctagcctatcaaccatgcatggaagtagcaatggcacctgaatcagctacaaaccatgatccaatcctagcggctagcgatctctagtttatattacaattaggagcaagcgatccaattatcgatagagcgcgagatcgatcgatcatgccgggccgctcggtggtctccatcctcctcctcctcctccatggcctcctctgcctgcagctggctgccttggccgagatggacgacgacgacgtcatggaggacggcagctgcatgcatttcagtgtgtccccgccgcctgctccgccggaggacgcggatgagcggcgcgactatttccgcgccatgcaggccaaggatctgttccggcacgagcagatgatcacgatgatgggcagcgaccggaacggcagcagcaggaggcggcgggcgaaggagtcgtccaagctgccggaggtcatgtccgccacgtccatgttcgagctgccgatgcggagcgcgctgaacatcgcgcacgtgggcatgtacctggtgtcggtgcgcatcggcacgccggcgctgccgtacaacctggttttggacaccgccaccgacctgacgtggatcaactgtcgtctgcggcgccgcaagggcaagcactatgggcgacagtcgatggggcagacgatgtcggtgggcgcggggacgatggcgcggcggccaaggaggcgaggagatagaactggtcgaggccggccaagtcgtcgtcgtggcgcaggatccggtgctcgcagaaggagtgcgcgctgctgccctacaacacgtgccagagccccagcaaggcggagtcgtgcagctactaccagcagatgcaggacggcacgttgacgatgggcatctacggcaaggagaaggcgacggtgacggtgtcggacgggcggatggccaagctccctggcctcatcctgggctgctccgtcctggaggccggcggcagcgtggacgcccacgacggcgtgctctcgctggggaacggcgagatgtccttcgccgtccacgccgccaagcgcttcggccagcgcttctccttctgcctcctcagcgccaacagctcccgcgacgcctcgagctacctcaccttcggtcccaacccggcggtgatggggccgggcaccatggagacggacatcgtgtacaacgtggacgtgaagccggcgtacgggcccttggtgacgggcatcttcgtgggcggggagcgcctggacatcccgcaggagatctgggatgccgagaaggtggtcggcggcggcgtcatcctggacacgagcacgtcggtgacgtcgctggtgccggaggcgtacgcggcggtgacgagcgcactggacaggcacctgtcccacctgccgcgggtgtacgagctggacggcttcgagtactgctacaggtggaccttcgccggcgacggcgtggacctggcgcacaacgtgacggtgcccaggttgacggtggagatggccggtggcgcgaggctagagccggaagccaagagcgtggtgatgccggaggtagtgcccggggtggcgtgcctggcctttaggaagctgccgcggggagggcccgggatcttgggcaacgtgctcatgcaggagtacatctgggagatcgaccacggaaaggggaagatgaggttcaggaaggacaagtgcaacacccatcatctccacaacagcaaaggcggagaggtctataataataataatggcaattcctcctctactgtcgtgcatcgcgtcaattaattcgttctctcttctctatctctacaaaattaaaggaccagaccatgcatgcacttcgctgtatgtaacaaaagaagcaggtagctcagctgccttgcctgtgttatgtttatttcacttctacaaaaaaaaaaaaaaaaaacccgcggcc

SEQ ID NO: 109788 - DNA, 322 bp, Zea mays
  unsure (1)..(322): unsure at all n locations
  Clone ID: MRT4577_31625C.1
cccttgcatacgtgcgcgaccgcaaagccnacggagggggctaactgaagggcagtgggcgaaccagcaacacacgcaacggaagaagcgccgacggcaacccggcctacgcccgcaacaaggacggacaggcgcacaagaacagtggcgggacgagcgagatacaggagcacaccgcccgcacgggcgaggaccacggcacccacgctcgggaggccagcatacagaacaaggccagcgcgcgcgtatgcgacgatcccgacgcgggagcagccaggtacgtccactgcgaccttaccagcgaggacgacgccccaggacg

SEQ ID NO: 109789 - DNA, 272 bp, Zea mays
  Clone ID: MRT4577_31626C.1
gctgggagtaattcctttagcaattaagtatttggtagctgaataaggggtcagaacttctgaaaccagagatctgtaatcatctctattggcctggggtgactgtgctataaatgagtttcttcacatgaaaaacacagccagcccaagatgacttatctgggtttaggattcaatagtattcactaactgcttattacatgagcaatttcatcaaatctccaaactcttaaaggatgctttcggaaaacacgctgtatacctagatgatg

SEQ ID NO: 109790 - DNA, 292 bp, Zea mays
  Clone ID: MRT4577_31627C.1
gggaagagaaaaaacaccgacaccccaccccaaaaaaaaaccggggaaagactcttccattttccccccaatttggaatcccgccacaattgcccccaccccccaatgttttttggacggggtttccttttttgggggttacaaaggaacacagcccttcagacccttgggggaacattggtaatgttttctttttgctgaaacataaaaacccggcgcttttgagggatttaccgtttttgttcgcacggatggcccctccccgtttaaatatccggggcccgctctctgg

SEQ ID NO: 109791 - DNA, 236 bp, Zea mays
  Clone ID: MRT4577_31628C.1
gtttttgtttggattggaacgggactacaatacgcaataacttaaatcgatggcagcaacggttttgttgacaaaccaggggtcctcactcggttacaccgacgggaggacaccataccgagtcttcagagcgactgaccctcacagaatcagaacagcgatagtgacaatgaccggtttagtcaagctaattctcgaggcaggcgggccaactgtgtcagtgagagcgtcctttt

SEQ ID NO: 109792 - DNA, 2868 bp, Zea mays
  Clone ID: MRT4577_31629C.1
atgcagctaccagggcgtgaagcagtggccactgctagtccgaaaaggcagggatgggacaatggtgtggcaacacttggcgcaacagacatggcaggacaggagaagaagatgagtgaggagaagaagatgactgaagagaagaaaataaccgaggagaagaagctgtatgaagagaagaaagttgcagatcctttcatcgttgggttttatgagtctatggcaaaaacgaacatagagaaaattactaaggagatcatggagggtttgtccaaagattctgatgacaatgatagttatgacgtgaaaagtggggatgaagattctgaggatcggccctggcggccaagccatactatttttggaaaatcgactatcaaacaaagtcatattgatgccatgaaggggaggtattttcgcgacatgtctattgtcagagttggaggagatagcactgcccctgctcctgaggaaaacgaagttgttatttaccgaagcttcttgaaggcaggcctttggttcccactaagcaaatttgtggttgaggctgtaagaagccaggggctggagccgagcgcaaagtgcttctgcagtatgcatgagcttttatacgagacaaaggctattgccaaagaacaataccacaacaacttcggctgctacgggttcattgcccgctctaatgcaagttacccagtgccaacataccggaaaagatggcccagggcctggatggaggagtggttttatgttaaaaatgatctgattaaaagagaagacatcaaggaaattatccagcgccccatctggtctcgcttcggcctccgaaggccgaaggtggaaattgacagcgatattgaagcctgccagaaggcttttagtactgtttgcgccttcattggcacgagggatttaattcaagagcacatatcctttagggtgtggccacttgtggagagctgggatatgccaaaggagactactgccgaatccagtgaaggtggcctggttcgattgaaatataccttcaggtttagagagaagtttgacgaaccaaatgatgattgtttgaaatgtattgaaactaccagcgatgagctgcttgggacatactccaaggccgaagatgatgccttgtccgcagccttcgggggccgagggaagaaaagattgaacagggtatttgatgcgattgacttcgtataccctgattatcactacccgctacgaaggcagggaaagaagagaaagactgccgcttcggccaccacaactatgccaaggggcaaaaaaagcgctgaagagccgattgtagtgccaaaggtgcctacagtcgggccagtcgaagctaagaatgatagggccaaagagccaaaggccttgacccctgctcctattaagaaggttaccgaagttgccaagggccaggccaaagctgaagctgagcctacaatgcccattgagacgaaggctattgcgcctgaggacaaggatgatcagcaaactttagataccgggatgacagcagggcaaggtatgacagaaaaagcaaaatctcctgcccccgaagctccagttgattacatttatcgacatgctccagggaaaaaattatccgaagaagaaatcctggaaggcagacactatgcccaaaaattgaaatatccgaagggagccttagtgtttaacggcactaacgaagatgatttcctgtactgtctcccggacaacaaagaaatatctgtttgccggaagatagctaaaagtatgggatttccgaagcttgaagaaggcctttcagttatgtcgaaggatgatcttgctgatagcctcgcatacaacagtataaagggcttaattcttagtaatgctttgagggcacaaaaaagcaccgaagacgaaggctgtataatggctcttgacaaccttcgctcagaggtgattgaactgagaaatgaaggtctagaaaaagacaaaattttaatttcattggtgagtaaaataaaagaagacgaagctaagtacaatgctcaggctgaagcccaaaaagctgaggttgaagaccttcggagacaactggtcgaagctaaggagaactgcgctctcgcacaggctaaccaagagattagtgaatattggaagaataaactagagaaaaatgttgaagaacttcgtgaatccaaggaaaagtgttttgaaaaatccttggattgcgtgaagaacttaaaaactagcttctccgaagtaggcgcctattcttctgaagaaaattttatccgaggcgaccccgagggcgttattgaatggataagtggagaagccaaagccttcgaggaaatcttgactgatcgcggggatatttgtgctttttctggtgctcagggaatctcagctattctggagaaggccggatgtgattacgtcaaggctatagcccaggtcgaagctgctttctccttagacgatacaaaggatcattcagccgaagcaactttagtgggcgtgaagttttattctgatctctgggtgaacggtggccgagagctggccagaaaaattataaaaaagaatgaaaaagacacccatgacgcccgagaagaagcaacgcaagctgaagaggctgctgaacgcgaaaggcgcatatgtattgattttgaatttttagcttcaatacttgctctgtggcttcgaattaacagtttacctacaacagctgaactatccccgccaccggagccgtacaatcccctggctgatccagagatgaaggaagcactggacattataaacatggcgaactccattatcgacgaagtcgtcgataaactattgaacgaagtcgcagaaaaagtccttagagaagaatag

SEQ ID NO: 109793 - DNA, 465 bp, Zea mays
  unsure (1)..(465): unsure at all n locations
  Clone ID: MRT4577_3162C.1
cggnagcgtggctggtaacctaggggggcagacggtcgaacacatcaggccggtgctgactgagccagagcccatgcgcgcgaaggaaatcagtacgataagcatgacgtacactggcaagaagctgaggatcatggccagggctctcacagactcgccagtgacgtcgacgcaatgaacgcagccatattcatgatgcaccagacgatgccagcatgatcaacctaaagatggacacaactgggtcagtgcttagtaactacatgcaaggccacaatgcatggcatgcaaagtgcctccacaggtattgatgggtggggacgaaagatgaacatgatgtttcctggtgcacaactgaacataaacaaaaacggacactaaggaaaaaataaggtttaccgccttccacacggtaaaagaggagctctagtacaactgaacaagaaacacggatcacaagctctt

SEQ ID NO: 109794 - DNA, 338 bp, Zea mays
  Clone ID: MRT4577_31630C.1
gccacgcgttcggagcactctgcaaggtttgacgcttgccctgacttgtggagagaaacgggggcacggaccactgctttagaagctgctttcatggagtcggagctggtggaggagctgctgcaaaacctgttggtgcgcgcgactgatcctgaggatcttgccaggtacacaggtgacgggtcaggtgactctagaggaaagcctatcacaaagcatagcacagcgaactggagagcatgtgcattgattacaggtaagacaacagtctgagctatgtgctaagcattgacacactcatatgagttctagaacgataaccagactagtcatgtcac

SEQ ID NO: 109795 - DNA, 330 bp, Zea mays
  Clone ID: MRT4577_31631C.1
ctttttctttttttttttttctccttttttctccttacctatatgggggatattttttcttctcggctgctctaaaggaaatttttaattttgactttaaaggggcaaaatccattttacctaatcaaaccgtgaaaaagcccccccctatcataagaaaaaaaaatgctccatctgggggaggcctcagggcgggcatgggcttcggccccgagcccagcccatctgaccagggagtagaggaactcctgggggtaaaccttcccgtcctgggaaaaaaccatttcttgtggagacccagaaccagacccccgccccctcttgactttg

SEQ ID NO: 109796 - DNA, 718 bp, Zea mays
  Clone ID: MRT4577_31632C.1
aatgctatcgtttccccgtctccaccagccccgccaccccaaaccctaggtcgccgccgcaatccctctgcaaatcgatcttccgccgctgttgcgcctagttcggcgcgcggagatgccgcggcagcgacgcacagagacacttccccgcggccgcgggggcaagaagctgaaggcggccggagatttatttattcctacgaagcctccgtcggtgtacatggtggtaggccatgatgtcactcgccctgcctactccgtaattaaggtgaacaccttccctgacggtggcagcggcggcgacactccgatacctattccaggacatctcgcccgccttgaggccaaacactgcatgtctttcgtccccgtgcggtcgaggcacggctcgtggatcgtcggcgtcggtggcaattcaccaattgattatggccccgagaccatcgtcttcgacaccagtacacaccaggtgatcccgggaccgaagcttgtgtcgactaagctccgcccgatcctgctaccggtcggcgacaagatatatgccttgacacgtcaacctgccattaaggggggtgttaatttcgtgccctggttcgaggtgctcgatctctcccaaggtcgagtggtcagtgtacgtctccggaactgcaaatgggagcaacttacccgggccgccctgctttccctgagaaactctccccaaggcagtacatctttc

SEQ ID NO: 109797 - DNA, 1453 bp, Zea mays
  Clone ID: MRT4577_31633C.1
gcacgagcaaagccgaagcaaacaaatctctcgtgcttagccctagctagctactggtccttttcttctcctctcccgtcttcgttactcggatcacgaaatctatagctactaattactggcgatggaggatctctcggatcttggaggccacggccacccgggtgctgctgcctggcggcccgcggcgccatcattggcgtcctcttccaaggtctcggtgcaagtctacaccgtcccaagctcagctgctaccggccgtgaagcccgaggtcaaggtgttgcaccaatgatgcatgcgtctagcgtcgctggccatggcggccgcgctgctgatctagaccccgtcaaggccaagatcgtctcccaccctagctaccaccgcctgctcgccgccttcttggactgccacaaggtcggctgcccgccggaagcggccgaggagatcgcggcggtggcgcgggagcgcgaggcgtggcagcgtgcagccgcgggcgacgtcgcgcacacaaggccggacccggagctcgaccagttcatggagtcctactgcgagctgcttgtgacgtggaaggaggagctgacccggccgctccgggaggcggaggagttcctgacgacagtggaggcgcagctcaactccattaccaacaccgggccaaccatgggagctttcatctcttcagctgcagctgcagataaaactggagtcgtcgatatgtccgacgatgaacaagaagaaggcagcggcatggaggcagaagtagccctgggcatcgatccttgctccgatgacaaggagctcaagaagcagctcctcaggaaatacagcgggtgtttgggcaacctgagaaaggagctgtgcaagaagaggaagaaagacaagctccccaaggaggcccggcagaagctgctcagttggtgggagctgcactaccgatggccctacccctcggagatggagaagatcgcactggcggagtcgacggggctggagcagaagcagatcaacaactggttcatcaaccagcggaagcggcactggaagccgtcggaggagatgcagttcgcggtgatggatgggttccacccggccccgcccaacgccgccgcgttctacgtcgacgcacgcctcgtgggagcaacgccggcgatgttctacgcccggccggatcatggggctcatcatggcctctggcacaattgattcagcccacgcacgctaccatgaagtattgaagtgtgcgcctgaaaacctgcatgcatgccgtagcttaattagcctataaatatgaatgatctgcacaatgaactggagatcgagaaagaaccctactgcattactgtacccccgttgttgcaccaagaaactttacatgtcatgaacagcaaagactgtgcctccttaatgctacaggtttgcggcattttgcataaaaaaaaaaaaaaaaaa

SEQ ID NO: 109798 - DNA, 328 bp, Zea mays
  Clone ID: MRT4577_31634C.1
atcattaacattatgtaatgtgaagacaggtttactctatcataatgaataacttccaacattgtgaggctttggtttaataataattacatttgttggttttgagattatcctaagaagaaatataatacataccaccgaattatatattcgacggagacttgatagttcgttataaagaaaaaggttacaaaaagttattatatatataatatatgcatgttagacaatcttttcacattcagacgatcttctttgccaagccgatggacttgacaatagctttcttacagacggccatgttcttattgcctcatccatatatctt

SEQ ID NO: 109799 - DNA, 287 bp, Zea mays
  Clone ID: MRT4577_31635C.1
ctggatgatgcttcagccgagacaccaaccaggggaactgggaagctgtcttcccatgccgcagaagaagcggagacatggtgcccgtggctggtcggtagtacacagcagtttctgtactatctccctcggggagaggtgttctctatgcatcctggttgccagttcctaaactacggtaacggaagcatatcctacacagcgttggacgcacagacagttacctcaaacaagcagcggagcggccatggacggagtcgatcgaaacctccagcagcggcctggaa

SEQ ID NO: 109800 - DNA, 231 bp, Zea mays
  unsure (1)..(231): unsure at all n locations
  Clone ID: MRT4577_31636C.1
aaaactaacaatcacaggtattttcatcacctcacaaagactttttctccatccatccgggtacagcagctcagctcgcagttaataattaaaaaaaacaaattttaactggaagataacccaaaacagtaacaggaatgtagggccaaacaaacagcataatcaccaccccccttgttaacaataatactnaactanagnaaaatntttacacgggcntttttttttaaa

SEQ ID NO: 109801 - DNA, 306 bp, Zea mays
  Clone ID: MRT4577_31637C.1
actacaggtacaggcgcccataagcttttactgcccgagcgtctggcgacccgcttcttgggagatggcctgactctcgccagtctcccaactcaggtgaccagagggtcctagacagggagatccaagcatcggctacgactacgagctggcactagctgaacacacaggcgcccatgactgactccgacctgcaccacgagcacgctagacgtcaacctgcacctgcacgagctggtccacactcgggtgttctgcagcgtatacttgctcctcgagatgatccagtcggtgctgtgcctcctc

SEQ ID NO: 109802 - DNA, 373 bp, Zea mays
  Clone ID: MRT4577_31638C.1
ggggaatacggcgatagagaggtggaggacgaggctgtaaagaggaagtggtcgaggtaaaaaaaaaaaaaaaaaaatataaaaaaattaaagataagaaaaaataaaggtttttaatatttgaccgggaccgcgataaaggtgaagccggagcgcaagggcagggaggggcggagggaagaggacttggggccagggatagggggatggaggggagccttgggtggggaggcaccaacaaggataaaaacgataccttacgtggaaatggatagcttggtaaaaatagcaacgtcgttcacgagaggtagcatctgtacctttggtgtttaccttccgcatgcacattaaggaggggggggtcaatctatca

SEQ ID NO: 109803 - DNA, 371 bp, Zea mays
  Clone ID: MRT4577_31639C.1
gaatttccggtgttaactggatagtggatatcatcctccatatgttgtgttgttcccttattaggttgaccagttgttaactgggtgtgggtactctaggatagattagccagccgatgtccaactgagcaaggaatatgcttggacacactgatatctctgatgttacaactcaccctccaatcatatggtatggatcactttcttacctaaatatatcttccaaagtcttttatatgcggcatttgattttttataccaaattaagatgagtatactactgcttactgtaagaccacctttttgaaaataatctaattaactatctctaatactattggaatatcattgtctatagatgttactgatgt

SEQ ID NO: 109804 - DNA, 649 bp, Zea mays
  unsure (1)..(649): unsure at all n locations
  Clone ID: MRT4577_3163C.1
tcgagccggccgggntcacggccagtgcatgatacgtgccccgtcgagcacgccgtcatggaagtgggcagcttggtgtccgctgctgccggaggcggcggcagaggcctggacaggttctggttgctagggtttgggaacaaccaggcttatttgaagtccagagcagggcagccatctcttgaggctgtctgggagctgcaccccatcgtcgtgccggacggcggcctcgcgctgagcctcaggtgcaacagtgacgccgaacaagctagagcaacaaggccttggcccttcgctaacggcactgcagcaaccggcgacagtgagctcatcactttgtcctgcgccaaggtggcggcgacaactccaaatgtgccgccatggcttcagggctaccaaggtcaagatacgaccagactggcgagccgcagcaccagttttcagatgcaagattgggaacccaactctaatggagcagcttaccacacgtcggagatcacactgagcttctccccacaggctactaactctccagacgcttcttcaatctccggctcctttgcccccagcttgatgatgagctccgaaccatggcaattcaagctgatgcaaccgtgccgaaactatggacgtggcgatccatttgcca

SEQ ID NO: 109805 - DNA, 180 bp, Zea mays
  Clone ID: MRT4577_31640C.1
ccgcaattccgcatcacgcacctcttattccttttgtccacaaccccaagctcagattgcgttaaattttaggggtcgggcccccgcactcgagaccaaccctggtaaacacaatccacttacatctatcaccagcaacattcatacatctcctcctgatccatcctatctcacatcatt

SEQ ID NO: 109806 - DNA, 590 bp, Zea mays
  unsure (1)..(590): unsure at all n locations
  Clone ID: MRT4577_31641C.1
ggtccgtgacgcggtctgccgcggcgcgggcgggggactccacgtgcctggctctgtcgcgcgagctgcgggagatgcgcgcgcgggtggcgagccggcaacagtacgagttgtccgggcgcgcgtatgtgctcgccgggctgagctcgcacgcccaccagcgcgccacgtcgcggcaggtgatgtccggtggcgtggcagaagcgactcggggcggcgaatcggcgcaggtgcgcagtggggcgttggagacgtcgggcatcacgatgtcgtacatgacgccggcgatgctggacatgctgggccggtcgcggaggtcgcgtgagctgctgcagcaacgccaacaacagacggagctgagaagaacgttttgaccgtgtgattatgtggcgtaggaggtactaggcagtcctcccgaaaaaccgttcgtgtgatcaagtgtatggttatccattgatattttgactaaacggtagttcaatttggttcattcttcttattcaaactgtactttaccctcaaaccaaatataatgtagtattagattaccctaangnaaaaaaaaaagggcggggcgctcttgggggatc

SEQ ID NO: 109807 - DNA, 286 bp, Zea mays
  Clone ID: MRT4577_31642C.1
accgggggtagggttattatgttcacccatctagcggaggcgggcaaacagttcatctatccacacggacttctccacagacaaacattggcctccaagggccgcgattcctccagatgcacggccaccaactaatcattgttcttccacaaggggatgtgggcttactgaatcgtggtgaactaacaagcacacatcggcggtggtcacccactattattggtaacatagatagattttattgcctatcccctgcgactccgcctccatgctccactcatgcctg

SEQ ID NO: 109808 - DNA, 329 bp, Zea mays
  Clone ID: MRT4577_31643C.1
attggctctgctagaatgcatctgaactggcaccaaacctatcataatgtcgtggaacatgtcccagctttccttctatcgaaattctggtctttgctaagcagtttgcaattcggaacccccataaaccctcgactattgtacctagagataaagtgaacgggtatcaagatagaaatgcattaatgtttttgtgatgtgtagtatatttttttttgagagaggacgcatgatgtcgtttgagcaatagagtttaatttgggagagattacagtgtcttcatatgatcagcacttgaacggtctatataaaggaattctgttaagacc

SEQ ID NO: 109809 - DNA, 382 bp, Zea mays
  Clone ID: MRT4577_31644C.1
gcctgcaggtaccggtccggaattaattcccgggtcgacgagctcactagtcggcggccgccctttttttttttttttttttttttttttttttttttttttttttttttttttttttttttttttttttttttttttgaaaacatcataaaatcctttttataaaagggtttcaagggggggttattaatttttcaagggaggaaatgccttaactttttaacacacaactcctattacctaatgccttatttagggggataaaaatttaaaacccccgggggggggcaaatgcccggggcttgcctggaaaacactattttagggttttttaaattcccacccctttgcgaataacttttggtttaaaacctgctttggc

SEQ ID NO: 109810 - DNA, 360 bp, Zea mays
  Clone ID: MRT4577_31645C.1
cttattgggttaacatatagcttttatctgcattcttgtatggcagaaggtggaacggcatgaatgttccaaattaagtggatataagttcacatgctaacatagtcttaacagtttacacaattacagctacgaccactaacaaaacttgtaatgatgaaaactaggttttgcttaagcatgcgcaggatcgcatcatttcttcttggtagcagccttgttcaccttggctccggttggttactttcttttcacactcttgttatcttcaacatgctacctgttgcctcatgtcacggtcagcaaacctaccaaggggaggatactgctgagaatgtttgcactaccttgggcttggtt

SEQ ID NO: 109811 - DNA, 433 bp, Zea mays
  Clone ID: MRT4577_31646C.1
aggtctaggaatcgcgggccgacccacgcgccaacgacaagtcggattaacagaactcttctgccttgcttttggatagtacaaccggcagtaatcctgtttgagtacggcatggtgagaacaaacgacgagacgagtccagtcaaaagtcagctttgtctcgcctgctccatcttttcgccgccggttacgtgcagtttcaagcacgttgatttgctgaccgggacctggaaaagataaatggaagaaacgaaaaaaagaaaatcttttgtatagtgaagtcagatttttgttgcagactgctgcagtagacctggaatgatgagatttgtcaattctgacggcaggtgttgcggcgagcgtggcggcggccaccggcgcgcttctgctgtgctggctgcagtgccggcggcgcaaggccgggcgctcggcg

SEQ ID NO: 109812 - DNA, 691 bp, Zea mays
  Clone ID: MRT4577_31647C.1
gccggggcatcattcagagctagtttgttaacctcattttttcaaagggatttctatttctcccaaaaaaaaaaaaaaaaaaaaaaaaaaaaaaaaaaaaaaaaaaaaaaaaaaaaaaaaaaaaccggctttgcccccaattgcaaaggctataaggaacaaggctgaactactcaagtgggattttccgatcacaaggggccagctggcatcgcctgaattgggttgttgggctgaagtaaatggaagtttagttgcaggggcccctttggatggggggcatgatcgttttgaaactaaagcatcgccaactgacctgaaaaaccttaaaacccggctggagtttatgttgccaagggaagcatcatcatcaaaccagtcaaagtcaattgcttatgttggccgggagggaggaggaattataggggctatggctatatcaaattttttacgaaaagatgcaaacttacctggggagaggttgcagcaggaaagcattacaacgttcctgctgtcaggggataggggaaaagcagggacaagcattgggaggaccttgggaatcaggaatgaaaacataaggtcttccctgactccgcaggacaaagcaggctttatatcaactttgcaagcgaagggacacagagttgcaagggtaatgaaacccaaggctctatgggtgttctatcat

SEQ ID NO: 109813 - DNA, 674 bp, Zea mays
  unsure (1)..(674): unsure at all n locations
  Clone ID: MRT4577_31648C.1
aattcggcacgagggttcagttctgatactttttgcttcagcttccgccataaaccttcggttgcatggagctcaaagttctttttctcgaaagcatctgattgctcccttattctgctttctaaattttcaattataacttcgtgctttttatcttcaaaatcttgctgcatttgcaaggctttgctcaacagcatactctgcgcgaaaacaaccttcgttagacatgttttcattatcagaaacaataaaagttaagggaaaagtagttcaccttgaagttggaataaaataaactaccaacgatatgttgtcgtcggtagcggctgatgtctgtttctagcttcggaaagccgatactcttggacagagtaccgataaccttggctccggtatgatctcgaatacaatctagcttttcatcatcaacgcctccgaagaggagncgccccgggtttgtatccgcatgatttaagcgtactcttctaagtttatctatttcagcttttgattagttgttcttcaaccaaattctggacataaaggttttcgttctccgaagcttcatcagcaatttctttccctttctccacgctacggtcgcggcctcttcggcggcngggggtagctttctctgcagccatgtcttctgcagccatgtctagcagcatttg

SEQ ID NO: 109814 - DNA, 537 bp, Zea mays
  Clone ID: MRT4577_31649C.1
ataaaaaaaaaaaaaaaaaaaaaaaaaaaaaaaaaaaaaaaaaaaaaaaaaaaaaaaaaaaaaaaaaaaaaaaaaaaaaaaaaaaaaaaaaaaaaaaaaaaaaaaaaaaaaaaaaataaaaaaaaaaaaaattcctttggcccgaaacaacttttaggggaaaattttccaaaatttccttaaaattgtggggcctttttaacattcattttaaggggccaaattccccttttagggggtgtttttaaatttaattggccttgttttaaaaacgaattacctggaaaaaaccttgggtttaccaaatttaatccctttgcaaaaattccttttttcaaaagttggaaaaatataaaaaaggccctaccttttttcttttccaaaaatttgccaaccttttttgggaaatgtcccccctttttttgggcctttaaagcgcggtggttttggggtttacccccattttaacttttatttttgcaaggcctttaactccctttttttaaatttttttccctttttttttccccaatttcc

SEQ ID NO: 109815 - DNA, 313 bp, Zea mays
  unsure (1)..(313): unsure at all n locations
  Clone ID: MRT4577_3164C.1
cccccgccgacgccagggccggggggggcttcttagagcctttttccctatatcaaccganaagccggcggaggggagaggctgggttagcaggaactcctatcgggcgacgagctcctgtcggatgcatccacctacaaggagctcgagaaccgcgtcctgtgggagggcgagggaaagagggccacccaaggacctgttgaaggggacattggcgccacaccatacgccgggggtggagaggacgaaagcgttgatgacacacctgtgaaggcgggtgataatggagacacataccgtgtacaggagccac

SEQ ID NO: 109816 - DNA, 868 bp, Zea mays
  unsure (1)..(868): unsure at all n locations
  Clone ID: MRT4577_31650C.1
cttcttcggccacctccgcaccccatgcttggaccccgacggacgtgacggcctcttcccctggcagggcgccaccggatccacacgtcctcgcggccacgtcgccggatttgctcgcgcgggggttggcacgggcccacccatctccactcgtcggtctcctccagtcgcccccacccccaccctgcgaccggttgcaccccctgctcggacccacgacgtggtcatgtcggcctcttcccctggcaggcccgctgctggatcaaacatccacacggcagcgtcgttggatccgcccgagcaggggtcgttgcaggccctcccagccctagctgccggtctcctccagccagcgcccccctccacgcggtcggctgggcccccgcgatactcgaccgcgctgcccacccctccttcgtcgccgccacagtatgatccatcgctgccgtggctttcccggcttgatccaccgctattgcggccttctcaactagattcctcatccctttggccaaatcgccgtcttcatggctggatccatcattgtcaagaccttcccgatcggatccaccgctacccgttctactctaccgcgtgcgtggccaccctgaccgcacagacgtgcgcgatgccgctagcctccctagcgggatcctcgacgaccgaacttgctgctcttctttttgtgttgccccgccgatagttgaccctcaaacatcgaccccttcgaagaacgaggctactgctgcatgtctcccgaccacacccacctcgacttcggctgtctcggcctccaggagctaccgncttatcgaagcccacactggnctctgctccaaccgcaacattcacactcacgatgctgcgg

SEQ ID NO: 109817 - DNA, 381 bp, Zea mays
  unsure (1)..(381): unsure at all n locations
  Clone ID: MRT4577_31651C.1
ttagcagccagccgactcgnctccagcaatgcggccggggtcggctcgctggaggtgggcgtcnccgccgacacctccaacgcctccaggcagggattagataccacacatatgcattctatgcctgccgcgcgctttacgtagctaacaagttgaattcatcatcaacatatccattgctcgagcttttcttcaagaaccaggtccaccacattccgtattacaatggttaaagtttttatatttgcttgattctcttntttttatatgctaattgacttttnctctttctatattatccacttgtgtgggttggttatagcttgtgatttcacatttcatttgttagcggccaagatgtattctgttagtttatgacta

SEQ ID NO: 109818 - DNA, 240 bp, Zea mays
  Clone ID: MRT4577_31652C.1
cgtacgctcggaattcggctcgagctctcactctcaaccttcattatccttttagcgacaggaaaaccggagacactgggaaggagcagccccagaactgcttccttgaccgctcctcttcgactgctcaacgcgtgctccgtctcaagagagccttggtggcaatctttgttccatgcccaatacctgctccaaggcggtagggggggcattcgggtcagaccagataggggagttccc

SEQ ID NO: 109819 - DNA, 183 bp, Zea mays
  Clone ID: MRT4577_31654C.1
gataaaatgacaaataacatagaagctttagaagaaaggctcgaaaaatgctcgataaggtcatctctgagctgtgaatggagctagcaaacacagcaatgcaatgcaccaaccatgggccatgcagtaagtaagagctgccgtgcgtgcaccctccgaccggattcaatgcctgcaagcagt

SEQ ID NO: 109820 - DNA, 823 bp, Zea mays
  Clone ID: MRT4577_31655C.1
agttgaaaaactttgcttcataatcaatgtgatagatcaattctatctcttcaatgtacatataccatatcaacatggtatctatgatgtttaacgttacaaactgtgtgcatcatctcagctccataattacttgttggagatatttgaatgacttctcatagctgacaaagcccatgaaccaaaaatcaaagccatcaacagtgactacatcaatatacgtctcatctggattgtataaattttcccgcactaaagcactttcatcctctctgtggggattaacaccttgtaaggcacccttgtactgcctcctttaggagacgtgaaactcaaaggcctatcactatggaaagcaatcttcttagttgagatgaaaagcattctagctattggaccagttgtggttgaaaaatatcactggaaagccttccgtggtttctcatctttctcaactgcaaagtattctctgaagactttatcaataccgccagcttggagaacctttgcactgaagcttagtttcccttttatagtttctgaattttttgtttcgtcccatggttaagtgttctttgaatccttgcatgtagctatctgttttatggctcagtttgttcatccgatgaatgaaggaactcttcttatcttttttatgaaccatggcagaacaggaagattttccttgtctttcctcatcggcatatgcaaacgaagtcaatggaattccaatgacatgctcctgggtgaaagtctccatggcttggagaaggtctatctgcaaatctgctttgatgctaggagacttctcttagcctgtgag

SEQ ID NO: 109821 - DNA, 331 bp, Zea mays
  Clone ID: MRT4577_31656C.1
ggggtttaggggtggctggtgggcactagagttgtaataggatgaatacaatatcaataaaattatatttgtttttcttatttattttcattcggattcgaatacggatagttttgaatgcgaatacgaatatggatgttctcggatgcaaatacggatagtcgtgggtcgaatacgaaactagtcggacatgaataatgtcgataacgaatatttttgtcggatatcgtgtaaaacatcattccacatatatcatacttgtaatcatttagtctctcctttagtccaaatattttttaggattatatatggacatatggtccccgccccc

SEQ ID NO: 109822 - DNA, 198 bp, Zea mays
  Clone ID: MRT4577_31657C.1
ggaaacaaacattgccttattggtgtgtcccaatttcaacacacaactttacaggggccatgcacaaattcttttacacgggcatactactttcacttagaggaaatgtgatgggcaacctttaggccccttgaacaactcgaacagactccggaagattttttacagggctttcatagttcacgaaaccctttgaac

SEQ ID NO: 109823 - DNA, 531 bp, Zea mays
  unsure (1)..(531): unsure at all n locations
  Clone ID: MRT4577_31658C.1
gaataagggagcaagaacccaggggagattgcacttcagcgttagggggacaagnagtcatctctcaagcgagnaaagggtggcggagttaactggtgnacgtaagtgaatcgcgagtgtgtgatcaaatcatttnnttcgcattttagggagaatccactgtgcgcgnagganggnggcanngtgccgtggcatttgaaccctgagtataaatgctnntttttgtactaaaagggagtcgagtcaagggagaagagagtaagaaggagcagtgtatgagngagagtgcactgaagagtgtgtgcgggtcgagagaagtatatngtgtgcgttgtgagtaaccgagagcgtgtgtccataacttncnncttgagaatagtgtgtgagagtttaatgtgtgatgttctctgacagggtgagttaaatgtgtgaagtcttgtactttactattatggagatccccctcttgtgtttaaatgtgtgttaatttgcgctttnnnaaaaaaagagaaaaaagaaaaaagggggggg

SEQ ID NO: 109824 - DNA, 353 bp, Zea mays
  Clone ID: MRT4577_31659C.1
gccccccacgcatctcgtctttactcccccatacctgaccgattatccacctgggctggtaactggtttgtcaacacctcctatgcgtcgactagctcctgcaggtattcattaccctacaggagctctagaaacggttatctcgcttcgagaggcggagacagagtgttactccacaagggcctggtggtgaaggacataatgctcaatacatccttcaggcgctgctgcagatgttgtggagctcacacccccagctgatgcggtaggaagacgagactcatcttctccaggggagcgaccagatcaaggatgaaaatgaatggtactttatacagtgaactacacctgac

SEQ ID NO: 109825 - DNA, 367 bp, Zea mays
  Clone ID: MRT4577_3165C.1
attcggctcgaggacacacctcgtttcgatgggcctcgcgggcaactccgcctcacaggcgacacttctccttctggacacatcaagcgtgctgaccaaacctgcgaaggctgggatcaaggatgattccacacaggacaaattgcggagctgcattctgtccgagaggtgaagatcatggctccacggaataacatctatctagctcaccagggagagtactcctccaatgctaatatggcgaacatctctcatcatacttctgttgttgattctaactaggtgttctgcaacagcatctactatcagctggtagccactgatatcaacaacaagcaagcattgtagcgctggtgcgagctcaaca

SEQ ID NO: 109826 - DNA, 250 bp, Zea mays
  Clone ID: MRT4577_31660C.1
agctctgaagcatctatctcatgaagcatactggtatttcttcaagacacttgcgtttggaagcatggatcctgagacacacccaaggcttgcacaggtagccatggagatagccagaacgcagaatcgttcaatcaacgccgcgtacatcatctgttatttgatgaggaacaattttaacatccacttttggtagcaggtttgaggttcttcagagtgttcgtccagaagcatgtctccagattcggca

SEQ ID NO: 109827 - DNA, 2421 bp, Zea mays
  Clone ID: MRT4577_31661C.1
gatgaatggacatcttgagatcaacagtgcaaatcttgctcgcgtcttaagagagttttcacctgaggaagttacagcaaatatctatacagtggttgatgtgcttctgcatcatatccaatgcgaggtgcaaagggggcatctagcacaggatttactatccaaagcaatcacaaatctttctttttttatatggacacatgaactccttccgctggatattctattgctagctcttattgacagggatgatgatccttatgctttacgccttgtgataagtctgcttgaaaaaccagaacttcagcaaagagtcaagaatttctgtaatactcgttctccagagcattggctgaaaaatcaacatccaaaaagagctgagctccagaaagctcttggcagccatctttcatggaaggaccgctatccacccttcttcgatgacattgctgcacgtctgcttcctgttattccactgattatttataggcttattgagaatgatgcaactgacattgcagacagagttcttgcattctattcttccttgcttgccttccacccgctaagatttacatttgtacgtgatattcttgcgtatttctatggtcatcttccaatcaaactaattggtaggatcctcaacctgctgggtgttagcactaagacccccttttcagaatcttttgctaaatatttagtgtcatcaaattcttcaatatgtccaccaccagaatactttgccaacctgttgctaaacctcgttaataatgttatacctcctttaagtagcaaatcgaaatcaaacccagcagacacaacacgctcgactttcaacaaacatcatgcatcttcacaacctggtggagttggtaacaccgatggccagagggcattttatcagaatcaggatcctgggtcgtatacacagcttgttttggaaacagcagctattgagattctctcacttcctgtgcctgctgctcaaatagtgtcctctttggtccaaataatagcacatgtacaagcaatacttatacagtcaaatagtggccaaggaatgtcaggtggtttggggcaaagttctgggctgccaacttctccttcaggggctgctgaatcctcaggtcccaaccaagcgaacagtgctgcaactggcatcaatgccactaactttgtttctaggagtggttactcctgccaacaattgtctgttttgatgattcaagcatgtggtcttctgttggcacaactcccaccagaattccacatgcaactatactcagaagcagctcgagtcataaaagactgctggtggcttgctgatggttccaggcctgttaaagagcttgactctgctgttggatatgcactgttggatcctacatgggcttcccaagacaatacatcaacagccataggtaacattgttgcccttctgcattccttttttagcaatcttccacaagagtggctggaatctactcatactgtcatcaaacaccttcggccagtcaattcagttgccatgttaagaatcgccttccgcatattgggtcccttgttacctcgtctagcctttgctcgacctttgttcatgaagaccttggctttactcttcaatgttttgggtgacgtgtttggtaagaaccctcaggtctcaaatccaaatcctgtggaggcgtcagaaattgcagacataattgacttcttgcatcatgcggtgatgtatgagggccaaggcggtcctgttcagagcacgagcaaacccaagctggagatactgacattatgcgggaaagtaatagagattttgaggccagacgtgcaacatcttctctcccacctcaagattgaccccacctcttcaatctatgctgcaacgcatccaaagctcgttcaaaacccatcctaataatgttatagcttacaagtgtattctaatgatgcaagatgcttcgaaccactgcagaagtctcaacatgtgatgctgttggatgagtagaattgcagtaactgtaacatgtgattcaggggcgtattctcaagtgattcgccgttgtcagttgtatcctttagttagaatgttgtaaatgctatctgcttagtgcatattaggacataactacatagtgtaagcagtaaccatggaggttatcttgccaggctaagaattttggcttccttgcctgtgagccatgcgacatatgtatcctgtcgcattaggatgagcgacaaccgacacggtcgcatgatgcaagatttgtgccggttggccgattgtcaccgtgcagacctcttcgtaacagtgcttcacgtggaaggtttgaccgagtgacggcatcaccagttaacagtgtaaactgtatcaaattcttgatcatcttgcttattatgaaatgcctactttgtgtctcaaaa

SEQ ID NO: 109828 - DNA, 789 bp, Zea mays
  Clone ID: MRT4577_31662C.1
ccggcggggggggcggatggaaagacactgggacaggagagcatgtggaatatgatcagaggcctgatgtcttcagaggaactgttcggtatgctagcgtgcatgctcatttggggagaactggaagcaggagggatgaccttgaatctcttgcctacacacttgtatttcttctgcgtggtcgccttccttggcaaggataccagggggagaataaaggtttccttgtttgcaagaaaaagatggcaacttctccagaatctttgtgttgcttttgcccacaacctttccgacaatttattgagtatgttgtgaacttaaagtttgatgaagaaccaaactatgcaaagtacatttctctttttgatggcattgttggtccaaacccagacataaggccaatcaatacagatggtgctcaaaagcttatatttcaggtaggccagaagagaggtcgccttacgatggaggaagatgatgatgagcagcccaaaaagaagattcggatgggaatgcctgcgacccaatggattagtgtttacaatgcaaggcggcctatgaaacagaggtatcactacaatgttgcagactgtaggttagctcagcacatttcaaagggaaatgaagatgggttgtttataagctccgttgcctcttgttcaaatctgtgggctttgataatggatgctggcaccggatttacttctcaagtgtatgaactgtctccatattttcttcacaaggaatggataatggaacaatgggagaagaacttctatatcactgcgc

SEQ ID NO: 109829 - DNA, 712 bp, Zea mays
  Clone ID: MRT4577_31663C.1
ggccgcttttttttttttttttttcttttttttttttttttaaaataaattttctgttggatggccagttaaagcactgatggcagccaaaggactaaatggcttgccaaaatggtctcttccttgttggagatagtctacgagctgctttgtttagctcaaaatagactatggcacaaacatttagtcttaagggtttgtttggttcgttgcctcagttgccacagtttgccacgcctaagttcatgcaagtttaactgagttaggcatgtgtttggtttgtagccacaattgtggtaagatttttctcgtgctgcgtaggtcccacttgtcaatgacttgtaaaagcatgtcagattcccttagtcatgccacagttgtggcgcagaatttgagcgcttaaccttagacaagtgtggcaaaaaatgtgtggtaatttttggcatcttaggcaagaaaccaaacagcccctaaatgacgtggtttaaaaatttcttacactgttttcagtctcttttaacgtgtttctagatcggccactactgtcggtgaacggaccgagttggcccgacagcgtcgactgccttctcgctcatgcacagcaggctgctgctgcttacgattccgcttctccttctccgagtgttcctggcaccggcgccccgcatcgcaccatggtcgaggtcgttgaggcagtagtggtagtagtacc

SEQ ID NO: 109830 - DNA, 177 bp, Zea mays
  Clone ID: MRT4577_31664C.1
aactctctattatgagtcgtattacatcatatttcaccgcatcacgacatgcacgccgcacgcgcagaatcaaagatacagctactgaggctcggcgtcgatcacctgccgctctctctcactcaatgtagtcgactgcacaggcgatagcggcgactgatgacgctatgctcaccg

SEQ ID NO: 109831 - DNA, 157 bp, Zea mays
  Clone ID: MRT4577_31665C.1
caaaaattggtggcttcattaggggataggaacagcgctgaccagaggatgttaatggaatagggcattcagctggtgaacaccaggcgtgcctcgatctggctactaaagctggttagtcacaatggggcacaactgctggctgggtacagatcga

SEQ ID NO: 109832 - DNA, 492 bp, Zea mays
  Clone ID: MRT4577_31666C.1
attcggctcgaggctccactcattcttttatacattcatcagccacccatcctggggagggccttacctgactggaggggggtcatcacacaccacacacactaacgcgtgagcgaatccatggaagaagacaaggtcgaggatccatgctgaattgcaggacggtgccgtaaaaacactacacaacattactaccggtgaggatggagtgactactacgaggactctaatgagtgagcctaggcaggatcaaaaggggtacacttacaacgggcctagcggccgggacaacctggaggcgagatgattacgccacgtgccaacgtacaacgtagaggccactcacggactgatcaagaccaccgttctcattagcaccaaggggatcaagaccaagttatcccacttccgctactgaggcctctgaactgatctgatgagcgtcagcctactgtatgcaacgcatcctactcctacgactgtagacatata

SEQ ID NO: 109833 - DNA, 412 bp, Zea mays
  Clone ID: MRT4577_31667C.1
acgcctgcaggtaccggtccggaattaattcccgggtcgacgagctcactagtcggcggccgccctttttttttttttttttttttgacggacgaggcctcaatgtgtgaattttactcgtcagaatgccattgcaaacgagttgcaaattaactcgaacacaaatagatatgactaggtactaatatcactaggtcaggtgagcaatacattagatgaactagaagtaccaaggggaccaatgattgtcccaatcctttgttgacaaaaattaacaaacaaatacttcaacaagtaagttggttacagacagacagccaacttgatccaacatgaccagggaatccacaagtaaacgtcccgggagactggcagttatatgattcgaacaacaccatctcgtatcattacc

SEQ ID NO: 109834 - DNA, 690 bp, Zea mays
  Clone ID: MRT4577_31668C.1
tgtgcaggcgctcgatgccggtcgatcaacctgccttatctctgtgcctctactttcttctctctctgtctcctcctgctccgcctgatccatcatatacaggaatcgtcatgtcaggctcggaggagcaccacttcaaatcgaaggccgacgctgcggcgtccatcaactacccgcagcacgctggcaccgtccgaaataacggtttcatcgacatcatacaaccgtaccctgcaaggttgtgccaggttctctactctccaacactggtaagcatgatcacgccaaatgccactttgtcgccatacacatattcgatgggaaaaagcttgaagatatctcgcttccttcatcacactactgtgacattccttatcgtgaacctgtactgattatcaactggttgatatttctgaggatgtatttgagagccttcttacttcagatgacagcactaaggatgatcttatactcccaactgatgagactcttgtgttccatattacagaacgtttctatagccgaaaggatcttgttgtgactgtccttctgctatggggaatgaaccgatctgcgcgttaaaggatgttgcccccaagaaacttccttgcctttggagaccgaaccctactgcatctcaacttaaatcagcaaatatctggatcaccaaaccattgctaccgacacatt

SEQ ID NO: 109835 - DNA, 111 bp, Zea mays
  Clone ID: MRT4577_31669C.1
ctctctcctctccaaactctctcgagctctcacccgtttggaagtgtggttggagatccgttcttcccggcgtgtttccagcaacttccttgtgctgtgtgaaagcttgtg

SEQ ID NO: 109836 - DNA, 256 bp, Zea mays
  Clone ID: MRT4577_3166C.1
tgaaacgcaagggggcgggccggcctcacgacaacctgtaccagggcccagccctgcatcgtctgggaggcagtagcctgcagtacacgttggtggaccagagggaaaagcttacatcaaaggcggcacccttaaaggcgcagtcgattccacagttgcggcggtacccgttgtacttgggcataacgaggacaattgaggtggaatacactgatgcaacacaaaggctgctaccggaagctcgaacggaaccaag

SEQ ID NO: 109837 - DNA, 306 bp, Zea mays
  Clone ID: MRT4577_31670C.1
ggctggccgttctaaacatatggaccccccggcctcaaggaattcggcacaaggcaatcatgacgggtggcaataatgatgcggccgatgcagtaatggacatactgctggttctgcagctaatggcagctccaacgtgagctatggacgccctattgccacgcgctacccagccaggtgtttctcctcccatgacgcccaaagtacctattgctgagggccaccctgcgctacacgggggagaacatgcaaatacactacctgcgtcactccagcttactcctgcagctttattgaacgcccttg

SEQ ID NO: 109838 - DNA, 1240 bp, Zea mays
  Clone ID: MRT4577_31671C.1
cattgggaccctcgaggccggccgggaccaccgcatcccacaccgggcacaccccccgagctcagcttagctccactccagctccaatcacagtcgtgaccagagcgcgagagctagctagagggccgtgaaaatgccgatcaataggatcgccctggggagccaccaggaggtgtaccacccgggcgccctcaaggcggcgttcgctgagttcatctccaccctcatcttcgtcttcgccggccagggctccggcatggccttcagcaagctgaccggcggcggcccgacgaccccggcgggcctgatcgcggcggcggtggcgcacgcgttcgcgctgttcgtggcggtgtcggtgggcgcgaacatctccggcgggcacgtgaacccggccgtgaccttcggcgccttcgtgggcggcaacatcaccctgttccgagggctcctgtactgggtggcgcagctgctggggtccaccgtggcgtgcttcctgctccgcttctcgacgggcgggcaggccacgggcaccttcgggctgacgggcgtgtcggtgtgggaggcgctggtgctggagatcgtgatgaccttcgggctggtgtacacggtgtacgcgacggcggtggacccgaagaagggcagcctgggcaccatcgcccccattgccatcggcttcatcgtgggggccaacatcctggtgggcggcgccttcgacggcgcgtccatgaaccccgccgtgtccttcggccccgccctcgtcagctgggagtggggctaccagtgggtgtactgggtcggccccctcatcggcggcggcctcgccggcgtcatctacgagctgctcttcatctcccacacccacgagcagctcccctccaccgactactaaaagccgaagccgaccgacccaggggtgcgcagcgcagcgcagctagcatccagcgctctctccccggcccgctcgccgccgtttagtttctctcgtgcacgtgcatgcatcgtagactgtctcaggccgccgctgcgccggcgccgctcgcatcgtttgcttccttggaccagcagtcgtcgccgtcaggctgaactgcttgtaaccgtgaattccggacccgtttgcttctgtaagatttgtgcatttgcctgagtacacctcgatctgcagcaaaaaaaaaaaaaaaaaaaaaaaaaaaaaaaaaaaaaaaaaaaaaaaaaaaaaaaaaaaaaaaaaaaaaaaaaaaaaaaa

SEQ ID NO: 109839 - DNA, 2749 bp, Zea mays
  Clone ID: MRT4577_31672C.1
ctcgaggccggccgggctcaccaccgcatcccacaccccccgagctgagcttagctccactccagctccaatcgcagtcgtgaccagagcgagagccagctagctagagggccgtgaaaatgccgatcaataggatcgccctggggagccaccaggaggtgtaccacccgggcgccctcaaggcggcgttcgctgagttcatctccaccctcatcttcgtcttcgccggccagggctccggcatggccttcagcaagctgaccggcggcggcccgacgaccccggcgggcctgatcgcggcggcggtggcgcacgcgttcgcgctgttcgtggcggtgtcggtgggcgcgaacatctcgggcgggcacgtgaacccggccgtgaccttcggcgccttcgtgggcggcaacatcaccctgttccgggggctcctgtactgggtggcgcagctgctggggtccaccgtggcgtgcttcctgctccgcttctcgacgggcgggcaggccacgggcaccttcgggctgacgggggtgtcggtgtgggaggcgctggtgctggagatcgtgatgaccttcgggctggtgtacacggtgtacgcgacggcggtggacccgaagaagggcagcctgggcaccatcgcccccatcgccatcggcttcatcgtgggcgccaacatcctggtgggcggcgccttcgacggcgcgtccatgaaccccgccgtgtccttcggccccgccctcgtcagctgggagtggggctaccagtgggtgtactgggtcggccccctcatcggcggcggcctcgccggcgtcatctacgagctgctcttcatctcccacacccacgagcagctcccctccaccctcatcttcgtcttcgccggccagggctccggcatggccttcagtgagtcctccgctgtccgctcctacccatgtgcatgcaacacaggctcgatcggccctcgtcctgccttcaacgagcagctagctagttagcctgccctgtacacggcacgccccaccaacagcttcacgacttcttctaagctgttctttaaacatcttgtttaaaacaggctctagtatctctttgagctcagcttggtctgtcatgctctagcactagcacaaggtcatggccggctcttttgagttcgacaccgaatgactgaaacgaaggggcagaaaaaaaaagatgtccttttcgtcctactagctagtaccaggctttcggtaggtattcctttaatacaaggccagtgtttaatagaagctcgcagaaatgtctttttgaaaaaaagtcaaaagcgaggaaagcgaagccttttaggtgaaatgattagtgcaaatgacagatttagacctgtcatcatgctagagggctgcagaggatgggaatccttggcagaatcagtagtaccttctattcgcgtattacctgtgatgccacaaggcccagttcccatgtgcagatgtgctgctgctccgctgctccccagaactactagcaaaaatgctccacctccactgacacgaacgcctcctgtgtcctggaaaaagaaacgtgctgtagtttttatattagtatcaggaaaagaagaatgtttacagatgggccagtaaaaaaaatatcagacagtgcttgatactagtagttcaaactgatccagttaagtagctaatgctagctaggattagtaaacaaataacagttacagactcaacagcggcagtaaaaagtcacagcagtaaagcagaaaggcagggaaaaagaaaagaaaccctgaacatgtttttatttgtacagtagttgtcagtatttgactgttactcgtacctgctggtgtccccctcgcgcaggcaagctgaccggcggcggcccgacgaccccggcgggcctgatcgcggcggcggtggcgcacgcgttcgcgctgttcgtggcggtgtcggtgggcgcgaacatctccggcgggcacgtgaacccggccgtgaccttcggcgccttcgtgggcggcaacatcaccctgttccgggggctcctgtactgggtggcgcagctgctggggtccaccgtggcgtgcttcctgctccgcttctcgacgggcgggcaggccacgggcaccttcgggctgacgggcgtgtcggtgtgggaggcgctggtgctggagatcgtgatgaccttcgggctggtgtacacggtgtacgccacggcggtggacccgaagaagggcagcctgggcaccatcgcccccattgccatcggcttcatcgtgggggccaacatcctggtgggcggcgccttcgacggcgcgtccatgaaccccgccgtgtccttcggccccgccctcgtcagctgggagtggggctaccagtgggtgtactgggtcgggcccctcatcggcggcggcctcgccggcgtcatctacgagctgctcttcatctcccacacccacgagcagctcccctccaccgactactaaaagccgaagccgaccgacccaggggtgcgcagctagcatccagctctctctccccgctcgccgtcgatcgtttagtttctctcgtgcacgtgcatgcatcgtcgactgtctcaggccgccgctgcgccggcgccgctcgcatcgtttgcttttccttggaccagcagtcgtcgccgtcaggctgagctgcttgtaaccgtgaatccggacccgtttgcttctgtaagatttgtgcatttgcctgagtaaaacccaaacaaccacaac

SEQ ID NO: 109840 - DNA, 298 bp, Zea mays
  Clone ID: MRT4577_31673C.1
ggaaatccatggtgtaagcccacagagatctagctagagtttcatgcatccggctacgccacccacaaaaatcacattaatccccaatcgacctggcccagagcaataaggttaccagcccaaaacttggcctacgccttctaaacagaatcctgactcaatcgctccaaacgctctactcgctatcatcaacgatcttcctccgaggaacgcaatgacaaggataaatcacctcatttaagatcactaatgtctaattacacgtgatgttccatgaattccaaggacaatctcaacc

SEQ ID NO: 109841 - DNA, 254 bp, Zea mays
  Clone ID: MRT4577_31674C.1
cggacgcgtgggatctaggtttaccaccttttcccattgcgtatggtctctgctggtgaagttgaaaaataatgtatctgaaattattcacagtgcttttcttttcgagatagcaaaatgttgtgaagagatttcacccaatcaatgaaagaaaacatgtatcttgttgatggctatagtggtttgaaaacaaatcgtccataaaaaaaaaaaaaaaaaaaaaaaaaaaaaaaaaaaaaaaaaaacaacaaaaa

SEQ ID NO: 109842 - DNA, 583 bp, Zea mays
  Clone ID: MRT4577_31675C.1
catgaggatagtggcgtatttcgccatcgagatccgtctgagcaagatcccgcacgctatccaatgcatatcttcattcctcagcaactcagaggcgtctcatcgtcaacacaaagagacaatcatatatatcctttggaaactcaccgacgacgaggaaaatctaaggctcatgagcaacaccaacggtctcgccttgaagatcatagggatgcttgtggattctgacggcgaagaactccacaatagcaaccatggtacatggtgctcaaatatagcgctgcccgggatggaggtgataaaacggttcacatctgtcatgaaaagatccaacagcatgcagctcccgcgtgaaatcttggaaagcaccgatgccatcagcaccctggagagtatgctcgactgccaacagtgcaaagtggaagaagagcttcagaaatcggtcataatggttctaacacaaataacatcgatggaaacatctttggctgtgggcgatgaagtcaagaagagactcgatcaaatccagaagaggctcatcttgtcgctgatagccattttcctcgacggcggcgatggcaag

SEQ ID NO: 109843 - DNA, 1626 bp, Zea mays
  Clone ID: MRT4577_31676C.1
gggtacctcgaggcgcaatcgggctcccgcatttcgtcgagcaggtgtgaatttgtgatgccgccgtctcctatcgtcctccctgccaccgcgctgccggcggcccgcctcgccagagtggtggccgcctccgaaagcggaggcgcgactcctccgagggcgtcccctcggcgggggcggcgcggcaagcccgggttctctcggcgttcggcaatcaagaagagcttccaccaggagcaggtcgtgttctccactcccgtctccaccgaccccaccgttgccgtcatcggaggcggcgcttccggcctctcctgcgcaacttccctcgccgcccgcggcgtccgctccgtcgtcttcgatacggggatgcatggcctagggggaaggatggcgactaggttcgtcgacggaggcaagcagctggtgttcgaccacgcggcacagttcttcaccgcgagcgacgagaggttccagaggctagtcaacgagtggctcgacagagggctggtccgtgagtggagcggtttgatcggcgagctcgaagccggcggctgtttcaggcccataccttcgttgacaccgaggtacatcggtgtgaatgggatgcgcccacttgcagatgcaatgctgcctgagactgatatgattaaagttttgaggccttgttggataagcaaacttgagccgttcaatggtttgtggcgcttgtttgagaatgaaaagcctcgcggtgaatacgatgcagttgtgatagctcataatgggaaatgtgccaaccgtctgctctctacatcaggattgccattactaacaaaacaaatgaagagactagagctcagttctgtctgggctctccttgcagcatttgaagatcctcttccgattccacttcttgattccaatgcagcatttgaaggagcatttgtgagagatgtggattctctctcttggatgggcaacaatacccgcatactttttccaatgcagacaggcgcacccgagtgctggacatttttcagtactgctgcttatggaaaaagaaacaaagttccacaggaaaatatcccaaaactcactgcagaaaaggtgaaggaagacatgcttggaggagtagaacatgctttagggttatccgaaggatctcttcagcaaccaatttacacaagagtgcagttatggggtgcagctctgcccatgaacactccaggagtaccatgcatatttgatcccctagggcgagcaggcatctgcggcgactggcttactggctcaagcatagaagcagctgttttaagcgggatgtcgctcgcaaaccatatagctgactacttcgtgagcacccaagatcgacctgaagagtttgcgattggtgtgcacgacgacctaaatgcagttgaagggcatgatatcggtcagtttcctgggttagacactcagacaccacaagtagccgaagctcagctaacaccgagcatatgatttattttgtactgatcgttagtttgtaagatgagctgattttgttctctctcctttttttggttggaaaacatgcaaaatgtacatacatgtatcgtcgatgtagaacatttctcagaaaaaaaagttgttaagcttactttctaa

SEQ ID NO: 109844 - DNA, 544 bp, Zea mays
  Clone ID: MRT4577_31677C.1
catagtaagctacataaggagccaacaaagccagaccgaaaccttgaggttgttgtgctccttgctctctctgctggtgctggttcggagcgcaatctccacgcatagcatgggaggcttgtatagttcacctacctccgccgtaccatttaccagcggtgtctcatgtgtcagaaaacccaaaccttcaaccttacaggaatcaacagccgatcggacatgtgatgttaccttaattaccctcgttgctccaacaatcatcagccctataacaacagccacctttgtggcattaatctgactcaaaacatcagggctacaacaactacaacaactcgcgctagcacaccttgctggctactttcaacaacaggagatttttccattaaaccaactagggtcattgcactgtgcttgttatttggaacaacaacaactaccattcagccaggtacctggtggctaccctaaggaatgtcttacattcaaccaactaggaagattggactctactgcttattgacagtggagacaactactacca

SEQ ID NO: 109845 - DNA, 406 bp, Zea mays
  Clone ID: MRT4577_31678C.1
acctacctccatttactaattttccaatacaagcaccaaatcctccacggtttcagtaccttattaaactactgtaattgccattcatctcatcatctattctctagcataactactactactaccactctatctgctcactaaacacagctctgcaaactatcaccagcattcataactcagaatgtgcaagtttaatttacttcattaccacttaaccaataatatcaacataagcctattcgctcttaaagatccaaccttaaaaacacattcattccacttaatacctcctctaatagtgttacctcaaaccaattcactaaccttcaatttacaaacgtatctacttgtaaaaccctaacatttcccaaactaattgtactacaactaattcccctttttt

SEQ ID NO: 109846 - DNA, 772 bp, Zea mays
  unsure (1)..(772): unsure at all n locations
  Clone ID: MRT4577_31679C.1
cccacgcgtccggtcgttttctttctcagatatcctcccaccgctcactgcctttgctctatcccggccaccgccgctcaagcacctggatgaggatcgatgccgtcgccaggatttttcctcgtcgtgctcttctgctgaaatcggtgcccagccactcctctacagccgttgccatctccctcttgtagctcgtcttctccctctactctccgctcaagcttgccgaccgcccgtcttcctccctggccggcgttctgcctccggctcgccgctgcgcgcgcccatctccctccgtgccgcgcatccgggtgtctgctcgccccctgtgccgcgccgtggtctccctccctgcgcacagccaccaccggccgagctcgccccggccccttcgctcctcccatggcgagctcgccggggatgcccctgtcccagttcgctgcgccctgctcggtcccgggcttatctgctgctcggccgcgtccctcccttgttcctccagccgagctgctctcccagcgctctcccctgcctatccgagctcccatggcggcttctcctggccgcgcccctatagtgctcggattcggtcatcgtctctcggtctcgacccacctccagccgatgcctcctccctccatcttcccctctgcagctcgtccctcacttggtccttcgccttgtctctggcccgcgatactctntgtgcagcggcctgcagcaagccttgttccatgataccaccgtggggctcctgcgtggggtccatttg

SEQ ID NO: 109847 - DNA, 962 bp, Zea mays
  Clone ID: MRT4577_3167C.1
ggtaccggccccccccctcgagttttttttttttttttttttttttttttttttttttttttttttttttttttttggacacgggcaactgatactagtacatagtaggaggaaagcaaactgagactacaacaatgggttacaggttcttggtgcggagcataatgccagttcacaccggaaatgtcgaatcacaaccagaaaacagaagagtgatcctgccggggagcaaccaacgcggcggagggagatggaacaagcaaaggagcacacgctaaaaaaaatccagatctccttgctctttcgttcccccctccttcaccaacagcgtgagcagctactgacaaatctaccatatgtacacagagacggccagacagagaacgggctacggcggcggcgcaacccaccggcgagctggccgcgcgcgcaccaaccctaggaggagcgtgcgaggcgcgacgcgatggcggagtggtacatggcgtcgtggaaggactccgtctgcgccatccgcgcccgcagctcccgggccttctcctccgtcatcacccccacgaactgcctccgcggcgcctcatcctgcgccggcgccggggcctccaggtagtcggccttccccgaccaccccagcagcggcgcccaccacttggctccctccgccgaccccgcgacagcgtggaccgccccggtgcccgcggcggcgcggggcccggccgtggacgccgccgggcgggcggggaacgagacgacgcatgctgcggacggtgccatcgccattggattggatctgtttggtcgcgcccctctttgcctgcacttgcagggttgcttttcgattgctttggtggttgattgcgttgtggtttaagcttgggtttgcgaccggtggggtggcgaggggaattgtagcaatgggcaggacccttgtgatggggatcccgccgcctcgaggtcccaat

SEQ ID NO: 109848 - DNA, 508 bp, Zea mays
  unsure (1)..(508): unsure at all n locations
  Clone ID: MRT4577_31680C.1
tggtcgcgtgggncggacgcgtgggcaaaaaaaaaaaaaaaaaaaaaaaaaaaaaaaaaagaggaggacaaataataaaagaaacaaaaattaaaaaacggcctgaccatgccaaagggtatcctatttttttaggggcacccttaatacaaattaatgggctgttgtttttccacctaaattactggggaaggcccggggggttacccatttttttttccccgtggaaacccctggcccctttccccccggttggggttttgacgaaataggccctttcccgatcgccctttccaaccgttgggccccctgaatggcggatgggcccccccctgttccggcccatttacccccggtgctgggcctgttaccccccatttgacccgttcactttccagggtccttgcgcccggtcctttcccttttttcccttcctttctccccccgttttccggtttttcccgttctgttttaaactgggggcccccttttcggttcccgttttgtg

SEQ ID NO: 109849 - DNA, 398 bp, Zea mays
  Clone ID: MRT4577_31681C.1
ttgacgcgtggactatctccagttcaactggggtcttttttataccaaaagggggtcattcccatcaaacagaatggggcggccgaacccaaaggatctggccttttttccacatgcggaggaagcttttgaaagacatcactgcattctgggaaacaagcaggcttagacacgctacccgctgcctgggcgcactacttagcacacttatatggtcaggagcctcgccgtcaataatctttgtgatgaacatacttgggattttccgtcaccagaaactactgacctgcgcgtcgtaggagcccaataacatggtcgccgccgtcggaagctgcccagatctttccgtcctagatcatcatgacggtggtcaccaccacgcaatgaccacgaccact

SEQ ID NO: 109850 - DNA, 329 bp, Zea mays
  Clone ID: MRT4577_31682C.1
acattgttaagtgccaacaactggttatgagaaccatgagggtctccgattccagctcaccatcaagctctgggggggcgtcacatggctttgctttcatcacccgcccgcgcaacgtgctacaagaacccacgtcgaccatcaatcatatcacaaccaccaacactatgcacacaggagcaaccatgttcgctatacttaccaccagacacaatacaaaataacggagcatgtatggcgacgattaccagttcacacataccgtcgaataactagcgaacactgcatgaaacttcactttttctacaccggggtttaaacccccacaa

SEQ ID NO: 109851 - DNA, 280 bp, Zea mays
  Clone ID: MRT4577_31683C.1
ggcagatgaaccggcggcggcacatgttccgtgtggtggcaggtggaccggcagcgggtggtgtatcgtccgtgggagatgcacctgacgttgcagttgtcgatgtcgaatcacttttatatatgaccttactatttcattgatttggtggcacatactctgttatcgtcaaatccatttttattctccttgttacaactattatgattgctgttgactcttcgtgatactataacaggtcaatatacattgatccttattacattatatcacactttat

SEQ ID NO: 109852 - DNA, 153 bp, Zea mays
  Clone ID: MRT4577_31684C.1
gatcaaagcaagcgatattatagaaccatgcctggcacaacatacaaactcaacaccggagccacaatcccagctctcggattcggtacctggcaggacgcagacgcacaggtgggtgccgtcaaggaagccatcaaggcaggctatagacac

SEQ ID NO: 109853 - DNA, 1973 bp, Zea mays
  Clone ID: MRT4577_31685C.1
ggtccggaattgactctctggagcacgaactaacaggtcggggagggcgtaaacttaggagatagtctcgtttattttacgatacatttctctctcacagtacgatatttgagattccttctctatcatatttactagcttcgagctagggctatctagatcgtacatacacagagacaccctccctctgcgcctccgttgggaagacccgaaacaacctaccttgacgccggaagcaggaagcaggggctaacctccgagcggcgaggatgaggggcggcggcgggatgattgacgatgaagagcgggtgggccacgcggagatcccgaccagcttcggccccgagctgcgcgcctgcctccgatgccgcctcgtcaagacctacgaccaggaacccttctccgctggcgccgctcccctcccccctcctcacgcctaggcctgcggtctaggttcaccagcctcccgttgaagggagggttcgaggactgggggtttcgtttctcctggtgcggtccgttctcggcggcggctaaggtaggttcattccgggttgctacacacttgctgtttcggaggaacttcaagaagagtatcaggtgaaaactacgtacctccattttagaaacgacgatgactaatatacaagcagctattatgtgtaagcgtgcaagtagatctcattccgttagatatagatctaaccatatgtcatatttagcatttaaatcctctcactgccgccttactttataaaaaagctcctaacaaatcacgattacacatacggttggatcttagatctaacggacaaagagagctacttgcacggcttgcatatttgtcactgcctttagaaacactcactatgatttaatgcactactcgagacacgtcgttgttcatcactgcaggggagccaagacaacaacatgtagtatgtgccacccaagcgatgtctagagctcctgaagcagtatgaataatttagcttatataaaaaagtccatgtgcttgttgccaagcgaactgccctgctttgttgtatctgagtgctaatcaggacccctaattaaccctttcgagctaacattagcacaaatgtcagacacatgaccaagacaagttcataggccagcaattctgttcaacaaacaccttgtcttcgtcgtacacggatgtggataccaatttgcagattgccgagccacgagcccatctaccagtagcctccgtgctaccgcaggcagtggcccataattctttctgtacggagtataagtacaatagtagttctaaatgcagacatgcagttgcttaacaagccggtgaaaatccaggttgttctctcctttattttttttttttttgtttgaacaatcaaataaataatttaattcggctgagcacaaagtaacatttgacccgattaataatccaaccagtcaatgtttaccagtactttaaagagaagaacacagcactaccaaatgctgaagtaattcacacaaacagatcaaaagctagtcttacaaaaccatcggtagttacacagcttgatcggtcgacggactccacaaatgacacggtacgaagtctttgcggcaaatcatcagcattcagatccaggtcaatcgaccagtcagcgattctgttgctagaacctctcccacgccttctattgctgaagaagggtaacgagcaccaaaaaatacaaatactcgcatgcggcatgccatcatacctttcctactctagatgcattagtgcagtatttcatgcaaaacatgaaccattaacttgcaagcctacgtgggtatgttcaaagaacagttggggtagccagataaggatacccttttatgaccataagcatgtcaataaacttgaattgcgtcacaagtgtgtatacagctttaatactcacctgcttaagacatgcgcttatgcattctcgataagacatgtttgg

SEQ ID NO: 109854 - DNA, 342 bp, Zea mays
  Clone ID: MRT4577_31686C.1
tttttttttttttttttttagccgagaaccatcagacgtggtactaattacatttttgacaaaatatgtgatgataaccatgaagttggccaccaactgcgcactggatggaaaaaagaaagaaacggcagcacagctacacttatcttgattcttgacagatagcgatggttcaacttccattcctagcaagttgcaagagtgtacagtttacagctacttccagttcttgaatcacaagctgggtgcacaaatgatgtgcttgccaacctgtgactgcttggatcttgggagtcctgaatacaccagtgctagtcatcattagaatctgctcgtgccgaa

SEQ ID NO: 109855 - DNA, 460 bp, Zea mays
  Clone ID: MRT4577_31687C.1
acgcgtccgggctaacctccgagcggcgaggatgaggggcggcggcaggatgattgacgatgaagagcgggtgggccacgcggagatcccgaccagcttcggccccgagctgcgcgcctgcctccgatgccgcctcgtcaagacctacgactaggaacccttctccgctggcgccgctcccctcccccctcctcacgcctaggcctgcggtctaggttcaccagccttccgttgaagggacggttcgaggactgggggtttcgtttctcctggtgcggtccgttctcggcggcggctaaaaattatctctttgatggaccccagtaggagttgggcagctcgttggttgagaattggtgacccttgttctcgtgtatcctgcagtttgtttgcctcttcaatctagtgcgttcatttttgtctttttttttcttcactcgtgcaagggtttagtattttg

SEQ ID NO: 109856 - DNA, 175 bp, Zea mays
  Clone ID: MRT4577_31688C.1
gcgtccggatcgcgagcgcttttttttagtggggggggtgagttgactctcagtacaagagctttcttggatcgcgaggaatccaatggaaattttgtaatcgcaggagagaactgtatagtccgacgaaggtgcttggtgttggacatgggtcacggaagagaacagagacgag

SEQ ID NO: 109857 - DNA, 1562 bp, Zea mays
  Clone ID: MRT4577_31689C.1
cttcagcatatatttgcttcatcaagtcacacatatggtggcttgactctggatttacattgtaatcgattgggtccaactgctttatttcagatatgtgagtgcgctgttttgactgatcgattggaagtacttaatctatctgggaatcgcctcactgatgcatgcagttcttacctattcacaatcctgaaaaagtgcaaagcactttatagcttgaatgtcgagcagtgttctatcacgtcaagaactgttcagaagatgacagatgcactccatgaagagtctgtcctttcacatctctcattaggaaagaacaacccaatttctagcaatacaatgcttaaccttctatccaaacttgcatctctcacaaggttttcagaactaagcctgactggtataaaactgaataagttaatggttgataagttgtgcctccttgcacaatcctcgtgcctatcaggacttctgctaggtggaacttccattggaccggtggagacaactaggcttactgaggcattgtcttgtacatctcaagatttcctaaggttggagttgtctaattgtgggctcacaacacctgatttcacacaaatctgtacaaatctctcccggatcaatattcttgagttaaaccttggaggaaatccaattaacctggagggatgtgatgctgtacagcgaatgcttgtaaatccccaatgcagtattagatctctcagccttgacaaatgcaatcttggacttgctggaattgtccgtgtcattcaatcattaccagaaaacagccaattagaggagctgcgcgtgtctaagaacaccaacttggcgttggagacaacaacaaagtatgacgaagacatgcaggaagtatcaacagcttctgagcaaaagcaatgtaatgaccctgaaacaacgaatgatatagctccagggaacatagattttgcgaacatgcaggttccagacagtgaagatgaagcagataatgatgcccaccgtgccagatctggttcacgcaggagctgtgcaagttcatcgcagaaaaactcttactcttcttgtcagatgattgaagaactggcgaaggcccttatttcagcaaagcagttgatggtgcttgatcttagctgcaatggtttgtcggaggaggcagtccagtcactgtattctgcttgggcgtctgttccgagaggcgatggaatggctcggaaacatgtaaataaggaggtggtccacttttcagtggatggtatgaggtgctgcggcctaaaaccctgctgcagaagagacctgcaaatgtgaaccctggacgaccttccgatgctaaattatggttgcactctgtaaataaatcatgagtgaatcaactaggcgttgaagcattgtcaatgcaacttcacactagtcacgatagtttggtgagtaattatgctgattcgcgggaatgtatacactacaatactagatgcttgagatttgggtatgcagttgtttcctgaggtgcagttactccttcgaaatcgtgccgtgtgacaagtttttcaattaaaagg

SEQ ID NO: 109858 - DNA, 284 bp, Zea mays
  unsure (1)..(284): unsure at all n locations
  Clone ID: MRT4577_3168C.1
tctttttcttgttccgaccgcgtccgcatccgcggcggctttttgaacgcgggggcgcgtcacggatccactgggcgtgcgcgttaccggcgggaggcgagggcaggcggtggtcgcgatggcgttcgccgacgctcgcttggcggagattgccttctccatcnnnnttattctcgtcttttccaagccagggatcaagttccaggacattacgacactgttgctcgaccccaaggtgtaccgtgacaccatcgacctctttgttgagcggtacaaggaccaat

SEQ ID NO: 109859 - DNA, 781 bp, Zea mays
  Clone ID: MRT4577_31690C.1
gacccgaaacaacctaccttgtcgccgttgccggcgccggaagcaccggaagcaggggctaacctccgagcggcgaggatgaggggcggcggcgggatgattgacgatgaagagcgggtgggccacgcggagatcccgaccagcttcggccccgagctgcgcgcctgcctccgatgccgcctcgtcaagacctacgaccaggaacccttctccgctggcgccgctcccctcccccctcctcacgcctaggcctgcggtctaggttcaccagcctcccgttgaagggagggttcgaggactgggggtttcgtttctcctggtgcggtccgttctcggcggcggctaaggcagaacggctgaacgtcgtcaactgcgccacccccaacttcaccagaattatctctttgatggaccccagtaggagttgggcagctcgttggttgagaattggtgacccttgttctcgtgtatcctgcagtttgtttgcctcttcaatctagtgcgttcatttttgtctttttttttcttcactcgtgcaagggtttagtattttgaactgtgagcgaagtctcacatcaggtgcagtttatattaaatgttgtttatgtagtaactcccttggtttacatggttttccagattagagagcaacatctgtaggaaaggcacttttattttcagttgtcgttcatagcaaaactgcacagctaaggttacctcatgtggcagtgtaaaaagtaaaagagatgaaaaatacatgtttgcattttacttttgtcag

SEQ ID NO: 109860 - DNA, 682 bp, Zea mays
  unsure (1)..(682): unsure at all n locations
  Clone ID: MRT4577_31691C.1
gnaaggaacaacccaatttctagcaatacagtgcttaaccttctatccaaacttgcatctctcacaaggttagcagaaaatgtccatatcagttgtatagttactaaggtgttggcaagtatagacccgatgcatgttgttcttgcaggttttcagaactaagcctgactggtataaaactgaataagttaatggttgataagttgtgcctccttgcacaatcctcgtgcctatcaggacttctgctaggtggaacttccattggaccggtaatttgctttccattttcttttccaaagaaaggctttgcgttcgagaaaaaaaggctttgctttccatttgtggttagtgtttgcaacctgtacacaagcaatggtactactgtttatgcaggtggagacaactaggcttactgaggcattgtcttgtacatctcaagatttcctaaggttggagttgtctaattgtgggctcacaacacctgatttcacacaaatctgtacaaatctctcccggatcaatattcttgagttaaaccttggaggaaatccaattaacctggagggatgtgatgctgtacagcgaatgcttgtaaatccccaatgcagtattagatctctcagccttgacaaatgcaatcttggacttgctggaattgtccgtgtcattcaatcattaccag

SEQ ID NO: 109861 - DNA, 743 bp, Zea mays
  Clone ID: MRT4577_31692C.1
agtatgaataatttagcttatataaaatggtgcatgtgcttgttgccaagcgaactgccctgctttgttgtatctgagtgctaatcaggacccctaattaaccctttcgtgctacgaatgggttttttagccaagatggcataaaacattagcacaaatgtcagacacatgaccaagacaagttcataggccagcaattctgttcaacaaacacctcgtcttcgtcgtacacggatgtggataccaatttgcagattgcgagccacgagcccatctaccagtagcctctccagtgtccatactgagaaatttatcgcaccagcaccactgtcacaatacaatggtacaggtactgcaccgtgcacgtgcccacaagctttcgacatctgcgtgtcagcatcggttatcatcaatcaccaagaatgactggaccgtggcgcgctggtcctctgcgctggtcctccgggaggtcagatgatacgggcgtaacttatctaagaacaatcaaataaataatttaattcggctgagcacaaagtaacatttgacccgattaataatccaacagtcaatgtttaccagtactttaaagagaagaacacagcactaccaaatgctgaagtaattcacacaaacagatcaaaagctagtcttacaaaaccatcggtagttacacagcttgatcggtcgacggactccacaaatgacacggtacgaatttttgcggcaaatctcacccggga

SEQ ID NO: 109862 - DNA, 125 bp, Zea mays
  Clone ID: MRT4577_31693C.1
tttgtttatattaacagagccaaaaaaaagcaatcgggtggggtttatttaatgggaatggcgggtttcccacccacaaatgtatcaaatttcaatgtggttattttcatagctcttccttttct

SEQ ID NO: 109863 - DNA, 119 bp, Zea mays
  Clone ID: MRT4577_31694C.1
tctaatcaataccagattatcactgctctccgtggaacctactgcatgagatggtgatcgtatctgactggtatcgtgggagtggatcagatcgtgatgtaacatatgatggcgaagag

SEQ ID NO: 109864 - DNA, 365 bp, Zea mays
  Clone ID: MRT4577_31695C.1
ggaggccatcgccctcgcgctcccagtcctgatcggtgagcctggtgtcgataagaagaccgtcgtggacggcctcgcgtagcgcatcgttcgcgtcaacaaaaacgtgcccaacaacctcctcgacatccgcctcatcgcgctcgacattgatacgcagcggggggaagagatggcctttgctttgccgggggaagtgatcagtgttgcatggagccgaaaggtcccctttggtgcttcagcgacaactgttttggagcagaacgcgtccggttggcgtgcaaatctaatggaataaccctctataaatagatgtgtgagctattggggacaactatctctttggctatttgcatttgtctctt

SEQ ID NO: 109865 - DNA, 516 bp, Zea mays
  Clone ID: MRT4577_31696C.1
atgggcaggcaaggcaacatggaggacgacgactttgaagcaaatggaatcttagaagaagctttcctccaccattcagcaaagcaagcatctcttctcttaagcaccatagtagaaagaccaattcgagctaagttgaaaattgccaagaacatcccacagttgcagatattgttcaataccagcaagagaaagatttccatggatatcttgtacccaggtgttgacgacgaggatctggttgtcaacgacgacccgagatcgactagggcatcggccatgcctttgaacttgcggaagtattcgctcatgatgaggttgtcttatacaaatttgcggaaggtagcatcaagacgctcgctcctcatcaaggagctagcgagcagccagcacacgatgatagacaacaacgacattctcttcgacgtcattggtgacggcaaccaagacgacaagtcgttacctgagggcatcgatgtctcaaggcatgaaggccaaagggaaggcgacaattga

SEQ ID NO: 109866 - DNA, 1086 bp, Zea mays
  Clone ID: MRT4577_31697C.1
aaaaaattggccacggacaaaggagccacaaacaacaaatcactccgttgagccttcaccatcacctccttctctggctctctctcacacacgcatacgaacacactctctactagtactaacctctccctaatctatctctagcagcaagcacacaccgtaacaacaaagccaacgacgacgcggggccggccgcccatggccttcacgtcctgcttattgggcagcgacgcggagcggaaggtggcggtggcggaggtggcgctgcgggcggtgctgtgcgggctaggcgcgctggcggcggcgctggtggcgacggacacgcagacgcgcaccttcttctccctgcagaagaaggcgacctacacggacatgaaggccatggtgctcctggtggccgccgcggccacggccgccggctacagcctgctgcaggcggcgcgctgctgctgctgcgtcgccctgctgcgcacgtccatccgcccccgcgcccgcctgctgctggcctggtgcgtcttcgcgtgcgaccaggcgctggcgtacgcgctgctggccgccgtcgccgccgcgctgcaggcctccgtcgtcgccaagcaaggcctgccccagctgcagtggatggccatctgcgccctctacggcgccttctgcaggcaggcaggcgccggcgtcgcctgcgccgtcgccgccgccgtcgacgccgccctgctcgccttcctttccgccttcaacctcttcaggctctacggcgccaaggcctagcgcccagcccaccaccacgacgtagctttgttgcattaattagcacagcagaggtgccttccatctgaccatcctctcttgcaaacaccgtaacaccgcgtagtagagtagagattatggagagacaattaataaggtgcgttcaagctttattaacatatataaacgcattactcatcaataaattctacacgcatgaaaaaaaaaaaaacgggccagcgcgtcgctgtgggggaacaagtcccttcaagaaaggtgcgagtgcgatgtctcgtttttttttctttcatcaaggtaagtatagtcccaaaaaaaaaaaaaaaa

SEQ ID NO: 109867 - DNA, 1119 bp, Zea mays
  Clone ID: MRT4577_31698C.1
gcatctgtatgacggccgaatcttccgctccgacgatcccggggactttccagtaagtagcagcctcaagcaccaattcgtctctctgcctaagttaccaagggcaccccagttctgcctgaaggcagtttgatttggtggacctaacggccttccggatctcttgggagccagagcgatggcgcgcggcgctcgctttctccttgttcttgcgttgctcgccgcgctactcgccgtcgtcctccagctctaccgccacaggaagccgaggttgtggatggtggaggagctatctgtgtacaatggaaccaacgaggagttgcccatattactcgcgattttgggctcagtgtttgatgtcacgaaagggaggtcacattatggtcctggaggaggttatcatcactttgctgggagggatgcatcacgagcatttgtttctggaaattttacaggtgatggtctgactgattccttacagggtttatcaagtagtgaggtaaacagcgtagttgattggaggaaattttacttcgaaagatacatatttgctggtaaacttattggacgttactacgacagtgaaggaaatcctacgaaatacctgaagggtgtagaagtgaaggcaaagagaggtacacagcttcttgaaaaacagaagagtgatgaagctaaaatacctggctgcaattcaaaatggagccagcaagaaggtggtgaagtaagtatccttgtaccttcccctttttttttgacacatggttttatctcatgttgttgatatcttatttgatttcttgaaagacatttgtgaactgagcttcgtcctatcgtatccaaaataccaaaagaaaatagtcactataccaaagttaagagtgttagacatcgacaaaaatgcatcttcaaccctatctcttctgatgtaaattaggttgaggactgtagtagaagatgcaaagcagctcatagagttagggtgtgtttggtttagtttttgccccataaaagctaaaagtcaaaccaaagagtccgaactaggaagcaactttttccaaaaagccgactttcttaccgtgtaaaattgaaagcacatctgaacctacttttagcggcttt

SEQ ID NO: 109868 - DNA, 681 bp, Zea mays
  Clone ID: MRT4577_31699C.1
gccggccgggccgggctatgccgattgggactgtagtgactagtgaggacagggactctgaagcttgatcacaatgtgccaaagaatttgttttccttttttgttgtgctcccttgaagtttgaacaccggattcatgtatctctggttatggctcaagaaaaccgctcatgatcggccatgttcaggtcctgaaaaaaaaaaaaaaaaaaaaaaaaaaaaaaaaaaaaaaaaaaaaaaaaaaaaaaaaaaaaaaaaaaaaaaaaaaaaaaaaaaaaaaaaaaaaaaaaaaaaaaaaaaaaaaagacaaaaaaaaaaaaagaaaaaaaaaaaaaaaaaggggccccaaggcccggggcccccaaaaaaaaagggaaccccccgggcggcaaaaatgggaaaccaagtttcccattccccccaaccccaagggggggcccggaccccaattcccccaatattaaacctaataaccggcgttaacggggcggtttttaaaaaagcggggatgggaaaaacccgggcgttccccaatttaatcccctggaaaaaagccccccttatgccagttggggaaaaaaagaaaaggccccacggaaaaccccttcccaaaattgggaaatcctgaaggaataagggaaatatgaagggaaaatattttgaaaaatttccccaaaaattt

SEQ ID NO: 109869 - DNA, 555 bp, Zea mays
  Clone ID: MRT4577_3169C.1
ccggccgggtaaaaaagaatcgttattgacaattatttaccttctcacacttgttcaataaagtgtgccgcatggagtttctcatttggttattgggacctttttatggtctacttcctaccaccaccaccaagtcagtttgtttgtaagctgggaagataagagtccagttacaccgtgtggctccttaaatacgcacatgatttttaatgttacaggacaagagggcaagaagagcgtggagacgcacaagatctacagctgaagcaggtgcacattggtattggaataggtcatgtctctcatgaactcgttcatcaacgacaacttgccggcgaggctgccaagttcatccgccacaataagatggccaccatcacatcccaggacatcaaggccgtcaccaagttcacctcgtcttaggcttctcccgtgtgactgtcttcgagagagtaacatgttggttggtcggaggcttggctgttgtggtctcgcgtaattgccgcggtggctttttggcagaatggaatgctatggttatgtgaatggtgatct

SEQ ID NO: 109870 - DNA, 533 bp, Zea mays
  Clone ID: MRT4577_316C.1
cccctcgagttttttttttttttttttttttttttttttttttttttttttttttttttttttttttttttttttttttttttttttggggacaaggcacacatccatacagttttaaagttggaaaaaaacaaaggacccaagttttgataaaggcaaaaacagggcatattttaaaaccccctaggacgacccccctcgaaaataaaggggggggccccctggacacaaaccgggagaacaaacgggggttaaaaaaggggttttcccttgaaggacaacttttgccaaagtatttgctacgggggggtccccttttacccccttttttaagaaaaaagctgggggatccctcgaattctggggaaggggtgcccaagaaacttttttggggggaaaaacgggacaaaaagccccgccctttggcccttggaaaaaaacgggatgacttggaaacaaatttgtccctgggccggggggagtatggcaaaacaaaaggggacccgcgttttttgtagcaatagggggacctt

SEQ ID NO: 109871 - DNA, 1307 bp, Zea mays
  unsure (1)..(1307): unsure at all n locations
  Clone ID: MRT4577_31700C.1
ctcgccgatcgtttccaccaaatccaccggtatgacggccccatcttccgctccgacgatcccggggactttccaagcgatggcgcgcggcgctcgctttctccttgttcttgcgttgctcgccgcgctactcgccgtcgtcctccagctctaccgccacaggaagccgaggttgtggatggtggaggagctatctgtgtacaatggaaccaacgaggagttgcccatattactcgcgattttgggctcagtgtttgatgtcacgaaagggaggtcacattatggtcctggaggaggttatcatcactttgctgggagggatgcatcacgagcatttgtttctggaaattttacaggtgatggtctgactgattccttacagggtttatcaagtagtgaggtaaacagcgtagttgattggaggaaattttacttcgaaagatacatatttgctggtaaacttattggacgttactacgacagtgaaggaaaacctacgaaataccttaagggtgtagaagtgaaggcaaagagaggtgcacagcttcttgaaaaacagaagagtgatgaagctaaaatacctggctgcaattcaaaatggagccagcaagaaggtggtgaagtttggtgcgacgcgngctacccaagactggtgaggaggncaggcgacatagctctgaccggacnagttagnncaaggtgcgcttggttcccaggaaaacgagctggacaaagccgggctagtggtgtacgaagggtgtgattacttgagccagtcttgcaaagtaaactaggccgtacatatccatcccacgcacttgttcctttggggggtactcaaacgcaaggttcatcagttacgggggcgctgcgacattccacgagcacccaccagccacgcatgcatcatgaaggcgggcctttctgctctgtcccgcgtgaaacacctggtgcaacgtcgtggttcagttcagatgcctagatacgcaattgattggaagatacccgcgatcgaatcaaatgatggtaacgctgcgccgccacgggcaagatctcgatcctaaaggctgtccgtgttaataggcatggggccttgggctgtcgattgatcgaggctgccttgcaagttgcgccgtctgcaccataggctacctcctttaatgaaatgcatttttttggagagtcattttagccatttgcatagcgaacagtgtgtgcgtgtgtggtacgcaaatttttgtttctccaagttggatcatgcatatgcagatttatacagtgccgtgcgagaggcattttacgtttgc

SEQ ID NO: 109872 - DNA, 369 bp, Zea mays
  Clone ID: MRT4577_31701C.1
tcgttgaagcttcgtatctcgtaaaatacatgcgatttgcatgagcatagcttcaattgcctggctgcacagcaggatcttgcgaggcagcataacttgcagtggctctcgggctgggccgtgtgctacgctgcctcgtcaggggctggttcagacatggaggcactgctggagttctaccgaggcattcgacaagaccccttccgccgtcaggccattgcctggaaccccaccagcgcgctggactcctgcgactgccccgtagattggcacggtgtgcagtgcatcggcgggccgattctttccattgacttagacggcattgacatcgctggaaatgctagatcgtctgtggtagcgaggatgcca

SEQ ID NO: 109873 - DNA, 386 bp, Zea mays
  Clone ID: MRT4577_31702C.1
ctgatgcttactccaactgcgcgaagaagccatcctgatatcccttttggcttggtcaggctagtagtttaggatttctcgtctgacactttgattctgaccaatctctctggcctgctgcttgctgataatcgaccagttccccagccttgctccttgcactcctccctccatctgcagcattgcgttctgattcacctgctccaatgctgtctttctgctgctgagcttcacggtctagctatcgttttgagggctatgagacgccctgagatccatcttgagcacctgcttgggccctatggagcgtacgtttgcgtgccctctccagggcccagattgactctgttctggatcttgcacgtgtgcacaattgtgtctgagct

SEQ ID NO: 109874 - DNA, 865 bp, Zea mays
  Clone ID: MRT4577_31703C.1
gggtacctcgaggccggccgggaagctcccctcgccgatcgtttcaccaaatccaccggtcttgcggccccatcttccgctccgacgatcccggggactttccagtaagtagcagcctcaagcaccaattcgtctctctgcctaagttaccaagggcaccccagttcgccgaggtggatcggtagcaaaaaccgatactggtacgttgccatggaggcagtttgatttggtggacctaacggccttccggatctcttgggagccagagcgatggcgcgcggcgctcgctttctccttgttctcgcgttgctcgccgcgctactcgccgtcgtcctccagctctaccgccacaggaagccgaggttgtggacggtggaggagctatctatgtacaatggaactaacgaggagttgcccatattactcgcgattttgggctcagtgtttgatgtcacgaaagggaggtcacattatggtcctggaggaggttatcatcactttgctgggagggatgcatcacgagcatttgtttctggaaattttacaggtgatggtctgactgattccttacagggtttatcaagtagtgaggtaaacagcgtagttgattggaggaaattttacttcgaaagatacatatttgctggtaaacttattggacgttactacgacagtgaaggaaatcctacgaaatatcttaagggtgtagaagtgaaggcaaagagaggtgcacagcttcttgaaaaacagaagagtgatgaagctaaaatacctggctgcaattcaaaatggagccagcaagaaggtggtgaagtttggtgcgacgcgggctacccaagactggtgaggaggccaggcgacatag

SEQ ID NO: 109875 - DNA, 849 bp, Zea mays
  Clone ID: MRT4577_31704C.1
gtttcaccaaatccaccggtctgccggccccgtcttccgctccgacgacccggaggtctgtccagttggtagccgcctcaagcaccaattcgtccctccgccgaagctaagctgctcggtcccaagggcttccctagctggctgaggcggatcctgttacgttgccatggaggcagtttgatttggtggacctaacggccttgcggatctcttgggagccagagcgatggcgcgcggtgctcgcttcctccttgttctcgcgctgctggccgcgctacttgccgtcgtattccagcattaccgcctcaggaagccgaggttgtggacagtggaggagctatcgctgtacaatggaacccatgaggggttgcccatactactcgcgattttgggctcagtgtttgacgtcacaaaagggaggtcacattatggccctggaggaggttatcatcactttgctgggagggatgcatcacgggcatttgtttctggaaattttacaggtgatggtctgactgattccttacagggtttatcaagcagtgaggtaaacagcattgttgattggaggaagttttactctgaaagatatatgaaatgctaggtgctaggctggcagtttggtggcaccttacattggcaggctagtggagcataatttggatcactatttatgtgtttgtgctatagcacttgctctagattctcttgatcatgttcttaaatccatcaccaccatatgtccataccatgtgttattcagttagtaccaaatgtgtataccatatggaacacacagtggatcatgttagagaaactactcaactcataatatatacccttggtacc

SEQ ID NO: 109876 - DNA, 968 bp, Zea mays
  Clone ID: MRT4577_31705C.1
ggagtacccggcgacgatgacaggaaaccgtttgccgtagtagtttgaactgcacacaagcatatctgaaactggcaaaaagtgtcaagctactatgtgcgaaattccttgatcaaggaggccctatgtgcaaaataggaggtaccagaagaagtatactatgaatttccgtatcttcttgccttgccattactgccgcgcccgcgcccgtgccctgcctgcctgcctgccatttctgccgccgctccgtcctcgtcgagctccctccctgctcccctcctgaatcgcggcagcagcagtcaaggcaaggatttcctggcttcctggtccgaactccgaaggtccgaacctacccggctcggccccgatgggttcgctggtgtcctgcctctccgacccctgccagtcggggaacgggtccccgccgccgcaggcgaggcggcgctcctccacctcctcccgcggcggccgtggcggcggagggagggactccgccaaggcgtccgtgaccatagacgaggaggcgccggccgccgcggcggcgctcgtgctggggcagcggggcgctggcgcgttcgagcggtccgcgtcggtgcggtacgcggccaagcggcacggccagggcccgccgctggcccgcagctgcagcacgcgccccaggtcgctcgctgaccccgagctccagccgcagcagctcctcgccaaggatttgaacaccaaggatttggaaaccagcgtcattgttctcgttcatggaggcggattcggcgcgtggtgttggtacaagactatatcgcttcttgaagacagtgggttcagagttaacgccatcgacttgacaggctccgggatccattcttatgacacgaacaagattagcagtctttcagagtacgctgaaccgcttacgtcttaccttgaaggcttaggtgatgctgaaaaggtaatcttggtggctcacgatcttg

SEQ ID NO: 109877 - DNA, 637 bp, Zea mays
  Clone ID: MRT4577_31706C.1
cggcctggccgggctatcctgagaaccgcagagactggcgtcttcgtactcccctatctccgagacccagagcgttcccccttctcccattcttatctcatttctcaccaccgacggcgctaccccctttctacacccatgacggagtgcatctcgatccacatacccccagggcggaattcaggtcccaaaaccgcgctgagagctgtactgcctcgagcatggcattcacgctgaagaacacatgcccgttgaccagaccattgcaggaggtgatgatgctttacaacaccttcttcagcgagactgtggctgccaagcacatgccccgggatgattttgaagagcttgaacccactggcatctacgaggtgaggagtgggacctatcgacaactcttccatcctgggcggctcatcagaggacacaggagagatgacttccatcacttcgctcgtgtgcactacaccagtggcaagcatattgatgacctgagccttgaccggatcacggagattgcagatgattgaactgcgtccccagtgcttcctcgtcttcgacgctggagcgggaggaaggggctctgggctcgggtctctcctcctggagcgcatgtctgttgactataggaagaaga

SEQ ID NO: 109878 - DNA, 450 bp, Zea mays
  Clone ID: MRT4577_31707C.1
aacacgcccatagagagctccagaacgcagccctacaagctttctttttcttatttaatctttttttttttttgttttttttttttctttttctttttttttttttttcattttttttttctattttctttaaaatatctaaaagtaacatttcactattcattggccacacacaaccacaaaaaaagcctcatacaaaaacaccacaacaaccccaccaacctaaggacaccaacaacaactcctaccctgagaaaaccagcttggttccaccaaccaactggctaaaacaaaacaatattcttattcccactaacaaaaaccacctttcatccatctcgctgttaaacacccccagcaaaatccttccttcaaacaaccaacgataaggcacaccaccacgtctttaccgcaacaacaactactaccacatcatccacattacacaac

SEQ ID NO: 109879 - DNA, 279 bp, Zea mays
  Clone ID: MRT4577_31708C.1
tcctcctgcctcgtaagctcacttgcctatctatgtattgctgcttaagaaggacatacgcacgggtgtgcacaccatatgaaccggcagacccgtctatctactgtttttcacaagcgggggctaaggagatatccctgttttcacgtggcctgtatcgacctctgacgaaaacggcctcgatacaaatttcacctgtgccggtatcaggtcttttgccaccaacatcctaacaaaccattggattggcccgcttgcccgttctagcccactcaggaa

SEQ ID NO: 109880 - DNA, 311 bp, Zea mays
  unsure (1)..(311): unsure at all n locations
  Clone ID: MRT4577_31709C.1
acccacgcgtccggggaaggtgagaacaaacggggcacagcactcgtgtgcctaaccataacaatctctgaccgctgtctatatatacatgtactattttgctgcagggagcacagatgaggcgagattcatttacgatcagctgactgaactgggaaccaagcctgacgattcggcggtcgctactctgatcgtccagtatggccaggcaaagcagttagagcgagcacaagaactattcgattcagcgtcacgtgcacgtncgttcccagatagggcgcttgtctgcaacgccatggtcgatgcgttct

SEQ ID NO: 109881 - DNA, 240 bp, Zea mays
  Clone ID: MRT4577_3170C.1
gactttcttatttctgcgaagcctccccgtcacacatcattctctcttgttgtgacttgtgtgtgtggcggtcgaagaacagggcggtgcggaagccctccgtgcgcggcgtgactacgactgcgtagctgatgcgcgccttgttccctaagaggggggatggttgtgtgttgccggtcgtgcttggtctcgcgtgggtcttgggcctgtctggctggccgcctctgggggcgtgttgcc

SEQ ID NO: 109882 - DNA, 301 bp, Zea mays
  Clone ID: MRT4577_31710C.1
cacgacatcatgcatatttgtcgtgataaggttggtttctaatcttataaaccatttaagatcttaccatgtaagaataaagttccaaagtaactataagcacaggaagaatggtaaacaaagattcaggtgggcaaaacctgagaacagatatttataataaaaccaatgccaacggcattagaactacaaatgtctgacacccacatatttaagaaatactccattgtgatcctgaatcctgacttaccagagaatatagcgaacaaaggaatgaaaattgtgaatcaaattaaaacta

SEQ ID NO: 109883 - DNA, 220 bp, Zea mays
  Clone ID: MRT4577_31711C.1
agctactcgcctggcgattgacttcgcactggtgcagccgaccgccagcgcgtctgcagtaaccaccagtgaacaggctccagaccttatcgacgctgctgcggattacgacttggaggacggcagtgcacatgctctcctctgcgatctcgctggactacacacactcgcaaggccggacagctattcacatagcttctgccaatggacaccttgctat

SEQ ID NO: 109884 - DNA, 646 bp, Zea mays
  unsure (1)..(646): unsure at all n locations
  Clone ID: MRT4577_31712C.1
gtggaggagatccggcggaaggcacgagccgaggtggcggccatggtgcgggagaccatcacgtccatagactacgacgagtacctgcaggagctggtggactgggtggaggtgcacaagacggagcacgtgatggagaagggcgtcctcgggctgggctcgccgacgttgaaccagaccgtgttcgcgtcgttcccgctcgacacgaacttcggcttcggcgacgccgcggctcgcgctgcccatctgcgactatgggaggctttgttcgggctacctgtccgtcggagcgcggcctggaggcgacggctcctggctcctcagcgcctacatttggccgcagatggcggcggcgctggagtcggacggcgtctttaagcctctcacggcggagtatctcggtctcacagtcacaccctagcggcgacgtggtcgatctacatgcgctgcatgcatatcagatcagaatcatgcatgcgcgctaccttgcattgtgtacgtcgttcgtgtaataatgttgcatggtctcgggccagtgctaaataaaaatctctgttaattttcttcacaaaaaaaaaaaaaaaaaaaaaaaaaaaaaaaaaaaaaaaaaaaaaaaaaaaaanctcgagactagttctcctcgtgc

SEQ ID NO: 109885 - DNA, 1916 bp, Zea mays
  Clone ID: MRT4577_31713C.1
aggccggccgggccgggcgtacgactctcggcaacggatatctcggttctcgcatcgatgaagaacgtagcaaaatgcgatacctggtgtgaattgcagaattccgcccccctcgagtttttgaacgcaagttgcgcccgaagccttctggcggagggcgcgtcctctcgggcgggccgggccggggactaatagcatctgcctgcctgcactggactcaaaaacatgcctgccgtaggatcctctgatgtgtccattcgcgtgttgagtcggcggcttgtgaaggcatccgacccctccctccagccgcacgtcgtcaccttctcaaacctagatctctacccggacaacgtgcaggcctccatagtgtgcctctaccccaagctgtcaacaaagtccggcccgggcggcggcttcgacgccgtcgtctccaccttcgaggccgtcctgccgaccttgcttaaccacttctaccctctcgccggccgcattgtcgtcaacccaagctccggcgtccccgagctccactgccacaaccagggcgcggagctcgtcgtgggagaggtcggcgtcgccctgggcagcctggattacggtctcgccgaggagtccctgaagaagatcatgatgccgtaccctgaggacgtcacgctctcggtgcagctgctgtccttcgcgtgcggcggcttctccgtcgtgtgggccaacaacaacctcctcaacgacggcaacgccatcaccatgtgcgtcaggatgtggtccgagctggcacggaccggcgggagcatcgccaccgtgggagcggtgtcagtgaaccacgaccgctcgatgttccgcccgcgcaacccgccggcctacagcgacgcgctcgacgccatgttcgccacgtacgacgaccaccggacggtgaacgccctgacggccgccgccagcttcgtggagcgcctctactacgtcgaggcggccgacatcgccaagctgcgggacatggccactgtcaccgagctccagcgtccctcacgcgtccaggcggtgtccgcctacttgtggaaggtcctcgccgccgtcgtggccgcgtgccgcgtgcccgaggagcggtgctgcatgggctggatggtggacgctcggcggcgggtgaagtcgcccgagctgatccccgcgatgcgcaactacttcggcaacgtcacggcctacgcgctgggcggcgcggccgtggaggagatccggcggaagccgctggccgaggtggcggccatggtgcgggataccatcacgtccatagactacgacgagtacctgcaggagctggtggactgggtggaggtgcacaagacggagcacgtgatggagaagggcgtcctcgggctgggctcgccgacgttgaaccagaccgtgttcgcgtcgttcccgctcgacacgaacttcggcttcggcgacgccgcgctcgcgctgcccatctgcgactatgggaggctttgttcgggctacctgtccgtcggagcgcggcctggaggcgacggctcctggctcctcagcgcctacatttggccgcagatggcggcggcgctggagtcggacggcgtctttaagcctctcacggcggagtatctcggtctcacagtcacaccctagcggcgacgtggtcgatctacatgcgctgcatgcatatcagatcagaatcagatatcgttcgtattgctcattgttgattgcatgattgcgcgctaccttgtattgtgtacgtcgttcgtgtaataatgttgcatggtctcgggccagtgctaaataaaaatctctgttaattttcttcaaaaaaaaaaaaaaaaaaaaaaaaaagaaaaaaaaaaaaaaaaaaaagggaggcagctctagaaaatataaacccccaacaaaaaaaaagggggggccgttttaaa

SEQ ID NO: 109886 - DNA, 128 bp, Zea mays
  Clone ID: MRT4577_31714C.1
cccacgcgtgcgctaaggcataggtaattacgtgtcccctattttcagcatccaattctcgcatggcttgttgggcaaggttacacattacaaggcctactatcacctgcataatgagatatagctac

SEQ ID NO: 109887 - DNA, 499 bp, Zea mays
  Clone ID: MRT4577_31715C.1
gtggaaagcaagaactgccttgtggttgaggatagtgttatcggattacaggctgcaaaaggagcagggatgtcatgtataataacatatacaccttcaactgctagccaagatttcaaggatgcaattgctacctatcctgaccttaataatgtcaggcttgaggacctcaagctattactccagaaaactcttgttactggatagcaaagtgtcttgttttccccaaagaatacattgaaaattttcttgatgcatgataatccacgctattattccctggacgttgaacagttggtgctgggtgttgaacagtagatgaatccaaacatacatcttgttgaacagttggtgctggatggtggaagacatgattactcagatagataattaatgcaactagaaagatagatagttacgattgttaaaacttttgttgtgaagagtgatacaattgttgtgtatcgaaaaacaaatttatcttacattttggagagag

SEQ ID NO: 109888 - DNA, 251 bp, Zea mays
  Clone ID: MRT4577_31716C.1
tttatgaacaacttgcacccctgacttcttgtaagggaggaattggactacctatacgtaggcttgtcgataggcccacggctacagcatatcgttacgctgcatatttgcatatctgtgccatcttagttcatgaacatgtagcatttgaatgagcatgcgaatccagatctcattgggttaggctcgtggctagggcttataggaaaagaaatgctgcccattcatatatgaacatttcccgcagctta

SEQ ID NO: 109889 - DNA, 290 bp, Zea mays
  unsure (1)..(290): unsure at all n locations
  Clone ID: MRT4577_31717C.1
aacaacgcccgacgcgaccgctacactagtcatccgccgcccgtgcatatataataatgctgacattcattcttaagtccggcttgcatttatcatgtatctgncnnccnggaagaaatgngcttgctcggctaggcaaaagactgcctacactgtaagagggcgcccatcgaaaaccaaagcaaggcaccatctataaccaataaaacaaaaaaaccgacaaaaactcaaaaagaccccccacattattttaattggccggccgcctactaggaagccccaccccccaa

SEQ ID NO: 109890 - DNA, 299 bp, Zea mays
  unsure (1)..(299): unsure at all n locations
  Clone ID: MRT4577_31718C.1
cgngnacgacttgcagtcgtccgggggggggtggaccccttatgtcgtccttcaccatcctactgctttcttcttttgctgcaacgggtgcgtatcctgctcgctntgaattacagcctatccagatgaaaaaccaccatttttctttttttttttacatcccacanccggtggggggggggggctgatcaactctaccgtgcctaccttattttccagcgggggaggacaccctcttttgcgaccccaagaacgtcactgtcacctggtttggttctgatctctgctggttatcgacc

SEQ ID NO: 109891 - DNA, 319 bp, Zea mays
  Clone ID: MRT4577_31719C.1
atgattcttacttataatgaattgatttctcttgatgttctaaacacaacaacagtttttgaccttagaaaacgtttttcgtcaccatggcaagcacaacagacggtggcagggcagccacacaaaatatgaaagagcgacgccacacaaaacacacacatacggatcgatcaatacaaccaaaaatcaacaacggggaacgaacgacggcccgcgatctgggcatacacctgcacaggaaaaataatttttggcacgggggccctcccaaacctacgctaatacaaagaggggggactcgacccccatgggcagcggc

SEQ ID NO: 109892 - DNA, 826 bp, Zea mays
  Clone ID: MRT4577_3171C.1
cattgggtacctcgaggccggccggggccacccatcactccttcaacagcatcaactcctcctcaattagcccacaatggcacgttatgcacttctcgcagcagcccttttgggtttcacagtggcccaaaccccaggaaccactcctgaagtgcaccccaagctcaccacatggaagtgcaccaagcgtggaggatgcaaggcgcagaacactgccattgtcacagactccgccgcccaccccatccaccagaagaacaactccaccctgggctgtggatcctggggtgacggccccgaccccacagcgtgccctacaaaggaggcttgcgccaagaactgcattatcgagggcatctccgactattcgactgtaggcgtcttcaccaagggcgccgacctccgcatggacatgtacaaccctgctggcaactttgtcagccctagggtctacctcctatctaaagacgaaaagaactacgagatgctccagctcactggtaacgagcttacctttgacgttgacatgtccaagttgccctgtggcatgaacggtgccctttaccttagcgagatgagggccgacggcggtcgctctaagctcaaccccaagggtgctgcctacggtacgggctactgtgacgcgcagtgcttcgtgaccccatggatcaacggcgaaggaaacgtcgcaaagcaaggtgtctgctgcaatgaaatggacatctgggaggccaacagccgctccacctcgatcgcaccgcacacatgcggcaagccaagcatctttgcctgcaccggcgacgagtgcggcaagacaggtctctgc

SEQ ID NO: 109893 - DNA, 199 bp, Zea mays
  Clone ID: MRT4577_31720C.1
gcacggaccatggacgcacgtcttcctgggcttatctatccttgggcctgttccgcttggccggtgaacatgaactgcatccgtggcagagtgcgaccgctgctgcagctgctgctgaatcaagtcatgcaactgcatgtcccttaacttggagaccgccgcccctagcagcatcacgaccatagccctagctgcgccg

SEQ ID NO: 109894 - DNA, 672 bp, Zea mays
  Clone ID: MRT4577_31721C.1
cctcgaggccggccgggattttgtcttatattagggactatgagaagtcaagtcaaaaggagcaaaagagaattaaaagaagaaaggagcaattgggctattctgtagaacaccggacgatccgttgcacggtccgaccaagcaggtcactctcgagaaaaccaagactccatcggctataaatcactggacagtccgcgcagagcgccgaacagtccgatatgcgagtcgcccaattgctagttgacacatcgaccggagcccacgatcaactggtgcaccgtacagtctgatgcctcctagaagaggaaatcagtcaatcaggagatacatagccattgcactgtgcagtgtcaggtgtgcatcggacagtccagtgcacccacggacagaagacaatcagggccttccaaacagagctccaatggctcctaaatcccttggggctataaaaggacccctagacgccatggagcactacacaagcattccttgagcaactacaacttcgagacctcgcggccacactactgtttcattagattaagatttgagtgcatttttaagatgtgactctgctatgctgtttcgtgcgctctttttcgactcgtgtgcgtgttgttgctgcaactttcaaaataaaatacgaaaaaaaaaaaaaaaaaagcggcc

SEQ ID NO: 109895 - DNA, 487 bp, Zea mays
  Clone ID: MRT4577_31722C.1
gttaaaaaagaagcgaggactttgaacgttcatgaaaccgctataccgagctcaggcacgcttgacacatactgcagaggagctgtaccaactcacacgcactaatttcaaaaccaagcgaccttaattcgaccagtaccaggctactaacaagaaaactgatgagagtggaaacaagaacagatacaataatgcctcggcccagattccacagcatacagcatataaaacattggacttcgaacaactttgctccccctgcgaagattactagacctcgcctgcatcacctttcggcgcatgtttaccctcttcagcgccattctccgagcggtccctggacccaagccacatgttattcttcaggagctgcatgaacatagggctatccttggatgactcctcaccactgctgactaactcagagagagcttaatcaaacgcctgttctgccacgttgcaagctttgtctggcgagttcagactc

SEQ ID NO: 109896 - DNA, 216 bp, Zea mays
  Clone ID: MRT4577_31723C.1
cttttatccttctggcagcaatgggggtttcctcgctcgtggaggtgggaagatagaccacaaggagcacgtagtcgcctagaatcgccacccacaaggggtgtttgtttgtactgtttggtttagtttggttttcgtctcttgtctgccatggtagagatgagttgtgccagagcatttgtatacaagggtatgtcatcaagaataagttacgtc

SEQ ID NO: 109897 - DNA, 397 bp, Zea mays
  Clone ID: MRT4577_31724C.1
tcgagcggccgcccgggcaggtacaagcttttttttttttttttttttttttcttttttttttttttttttttttttttttttttttttttttttttaaactcgaaagggactttcttatttcggggaagccacaaacatcaaacaaaaactttattattgaactataactcaaaagaaatctaaaagggggcccccccaatgaggggttggtggaaaaaccctgctgggtttgaaaaaacaaggggggtgaatggcaacaattgtggcagttgaaagagggggccaccgttaggcccaccgggttggtaaaacaacaacaactgggggtgtgggaaaaaggcagcagggcccacaccaactagctggctgaaagggaaaagttgtggctgctggaa

SEQ ID NO: 109898 - DNA, 3855 bp, Zea mays
  Clone ID: MRT4577_31725C.1
atctctctcgtgttagacctactgtcttccacaccccaccgcaacatgagccctgcgcggcccgagcgccagaccagactagacagctccgtttcccctccccgtcctgcatccatctcgaccgcgcaccaaacccgaaaacgcagccacattccctcctgcagccacccccccccccccctccgctctcgcgcccctccgctgcgcgtcactccgagcggcggcggcggcggcggcgcccgcccccacagggcagtggcggcggcgaacgagggagggtttgttccccggaagagggagggaggctctggcgggagtgtgttacgggcttacggccgcctcgtgctggtgacaggcgcggcgcgagatccgggctggaagggctggcgggtcccgttggtggcgccgtggcgtcggcgtgatctgagatgagattggacccggctgcgcggtattcgctgcggaggtagacggccatgacgaccaacaccaagcgcgcctacaagctccaggagtttgtggcgcactcgtccaatgttaactgcctcaagattgggaggaagacctcgcgggttcttgtcacaggaggagaggaccataaggtcaatctttgggctattgggaagcccaattcaatactgagcttatcaggtcacacaagtgctgtggagtcggttggttttgattccacggaagtgtttgtggctgcaggagcagccagtggaacaataaagctatgggatttggaggaggcaactattaacggcatttgttccgatcatacattcaactgtatcttcgtgtccttgtgttggtgtaggccttgaggcagagcaaaggagggagcgctgcaatttatgcttcattgaattggagaatgccaaaaataagcttccatctcttacaagaagaaaaggggcagttgcaaatgctgcacaagagcttgctctcgtcttccaggaaatcatgagctgactgacgacatactagacacacagaattagatgggacgttcttccctctgctggcaccgagattggatatcagctgcccatggagccacccgagctactcccttttagcgacaggttcagcctccaaaactgtcaaattctggaagggggttttgtttgaattgatccgatctacaggacccatgctaacaggtgtccgatccatgacattcaatccagctgcagccattttgttatgtgggctgcacgaaagcttaaaggttttctcttgggagccaataagatgccatgatactgtcgacgtgggatggtctcaacttgccgatttgaatgtccacgagggaaaacttcttggttgttctttcaatcaaagttgtgttggaatatgggttgttgatctgacgcgtcttgagccatatacaatgggtacttcaacaaaagtaaatggtcattctgaattgaagactgtttctagcggcactttgcctttacaaaatgatagtggttcaagggctaacatagggcgatcatcagtcttgcaaaatacagagaacaaccttaaaactacttcaggaagactgtcggcttcacagaactcagattctgcacccaaagaaactaactcggcaccttcaagcgggttgatcccaagcacaccacatagggctggagttggctcccataatagatctgttggaaattcagcttttcaatctggtggtaccaccttgaagagaagttcgttgaggaataacagtgcctctaatgttcacaatttcagtaaagctgatgtagtgcctgtcattgttcccagaactagctccggaggggagttggctactgattctagaagcgatgctgctgatgtggcacccgttcttccgaaggtaaccagaagggttgaacctgctaccgattctagaaaagaaagtaatgatgtggaacttgttgttcctagagcaagctcaagaatggaaatagccgatttagcacccatttctagttccaagtcaggcagaaggttggagtctgcccctgattcgaaagaagaaagtgctgatacagcacctgttgttgtttccaatcccagggctaatgtaagaatggaaatagtctctgattctgcgcccgctctttcaaagtcaaacagaaagctagattctggcactaactcaaagaaagaaagtgctgatgcagtcattgtacccagaacaaattctagaatggaaatgatttctgattctaggagagaaccctctgctggaagaatatcaccattcagaatccagtcaagatatgctgagccacggaagctagcccatgccagaactgattcaaacaaagttgatagcagaagtaaaattactgaaacagaagacttcaattgccaaatatttcttccccgtagaaacggtgtttttcaaacaataagttctgaagaacctcgtgaagatgtaaagtgtggtccagttgacagggtgggattttcaaattcatcagaaccaaatgcgagtgtccgcaatgagaattatgttcctagaatgcgcaaaccaggagacaactgctatatcgaagtttcaagagcagggagagcaaggtcaagtgtctctaattgggaagggagggatcagccccctagtcatgaagaaccaacaacaagcagttctacactggctcctaccggccatccatattcatctagaggaagcaatcaagcttctgaagctccaatcatagctagtgatgaagatgttatatctcttatcatggagcgacatgatctatttttaagctcaactaagtctcggctgatgaaattgcagattattcatcaaatgtgggaaagaaatgacatcaggggtgtgctctctgcgatggacaggatgggtgatcatgctgtctgtgctgatatggctagcgttctcatggagaaaagtgaaacaatcacactagatttatgtacctctatcctgcctgtcgtcactgatcttctggagagcaaaattgacagacacttagtcgtcgcattggaattgttggtgaagcttgtaaggacttttggtccaatgatacattcaacagtatcgtcaggtccttgtgttggtgtagaccttgaggcagagcaaaggagggagcgctgcaacttatgcttcatcgaattggagaaggccaaaaataagcttccatctctaacaagaagaaaaggggcggttgcaaatgctgcacaagaacttgctcttgtcttccaggaaatcatgagttgactgacgacacactagatatacacaattagatgggacatgcttcggcctctgatggcaacaagattggatatcagctgccatggagggtgctagctattcagtcttagcgacgtcatcaagctccaaggccacagcaccaacaaatgcattttgttgctgctgttcgtgccttttgtacacatgctaacacataatccatgtcatttgtgaagagaagctgccatggacagtgacttcatccacaatattatgtggatggcggcagctggagatgttaggccccgatcgaatggtgatcagcagatgagacttgcttgggcttttctggcactcgtagttctttgctgtctgtaacatctttctcatgtaccgttatcatgtgcatgtgcaacagtcaagtggttgcatttggtagtttatggttgtgctgtgtgttggtcgatttagtggtcgttgatgagtgaagcgagccatgtacatcatttttttttaagatttgatatcttctttttccttgatgactcctctcgttatacttgagtgaaaatgatatcttgtgtacttgccttgacagctttcggaaaaaaaaaaaaaaaaaaatcgaggggggggcccgg

SEQ ID NO: 109899 - DNA, 627 bp, Zea mays
  Clone ID: MRT4577_31726C.1
cggacgcgtgggtacaaaggtcacacacgaggagtgaatgctattagattcacacccgatgggcggtgggttgtgtctggtggcgaagataatatagtaaagctctgggatcttacagctggaaagttattacatgaattcaagtgtcatgagggtcagatccagtgcatagattttcatccccatgagttcctcctggcaacaggttcagctgataaaactgtcaagttctgggatttggagacatttgagttgattggatctacaggacctgagacgacaggtgttcggtccatgacattcaatcctgacggaagaactctgttatgtgggttgcacgaaagcttaaaggttttctcctgggagccaataagatgccatgatactgtggatgtgggatggtctagacttgctgatttgaatgtccacgagggaaaacttcttggttgttctttcaatcaaagttgtgttggaatatgggttgttgatctgacgcgtcttgagtcatatgcaacgggtacttcaacaaaattaaatggccattctgaattgaagactgtgtctagtggcactatgcctttacaaaatgatagtggttcaagggctaacatagggcaatcatcagtc

SEQ ID NO: 109900 - DNA, 303 bp, Zea mays
  Clone ID: MRT4577_31727C.1
gccggccctttcatcgaatccggggttaagggattggctattaaaacagtctcagatcctgccagaaaggaccatgtctgtgagtgacatatgagcagttcttcatctcctcccaatgagtgagtgtggcttgtgttcagtcattctcatttactgagcacctactatgtgacatagtagccatcaactccaattagacattagatcattaatgattcatgtctcattagaccagagagcatcaagtccaactagacacaatctacgccttcaaggaaagggagaaagacatttgccttacta

SEQ ID NO: 109901 - DNA, 468 bp, Zea mays
  Clone ID: MRT4577_31728C.1
tccgggtcgtcttgtctgatcaaaatggccggtgttgtttcccgttcccgccgcgaggctcgcaaggcccacttcggtgccgcttccgatgagcgccgcgtccgcatggccgctcctctctcgaagagcctcaaggccgaacacggtgtccgctccatccccgttgtcaagggcgacaccgtcaaggttctccgtggtacttacgccggacgtgagggtgtcattgcctcctcgtaccgtcgcaagtgggtcatcaccatcgagggtgtccaccgtgacaaggcctccggtgccactgtccccatcggtgttgacgctagcaagtgcgaggtcatcggcctcaagctcaacaaggaccgcaaggccatccttgcccgcaagtccaacaagaaggtcgagaagtccgaggatgccgagatgaaggcttaaacgattttgtcgtttgagaattgatctatgttttccgtg

SEQ ID NO: 109902 - DNA, 320 bp, Zea mays
  Clone ID: MRT4577_31729C.1
cacaagacatatacaggacgggttcttttacaaatgttcgggaatggatttaccaaaaaaaaaggtacactcaacgtagacatattgtacaaaatcgtgatcggttggttccaactgctcagatagtcgttcgagcatgagaaatcaggcttgcgtatcatattggagctaataaatggcatccactggagttttcggagactccaatatattggaccactggacatatatgaaggtacacctgcatgcagttctgaatatttcgctgaacgatagccaataaccttgaacccttcctctgaaaggtattacgtagcatt

SEQ ID NO: 109903 - DNA, 559 bp, Zea mays
  Clone ID: MRT4577_3172C.1
gtgcggcgctcgagccggccgggccgggatcacacacagcaatccacacagcacttcgacgtcacacgggcgctgcacacagacacaccaagcgtcggcaccaatggcttactaccaggaggtggactactgctcggaggaggtgaggtcggtggccccggccggcttcggccgccacggtggaggcgtccagcatcacgtcgtcaaggagaatttcgaggaggtcgacacggtcgcacgagacggcgacaaccatcaccaccaccatggtcaccattagcgctcactacttcgagctgcacgtgaccatcggccaggaggacctcgacacctgctacgactaagtgtcctcccaccgcactgcagagcttcctctgtcagggcttaattgatacagtccgacctggacggcatccacccccgttcatgtctgcctgtgtgccttatgaatgcctgtgattgcgcagcgtcgtcgtacttggctagggcacgtacgtgccccgacctcatctcctgtactaattacgaccataatctcgtgttctgaataaaacttctt

SEQ ID NO: 109904 - DNA, 332 bp, Zea mays
  unsure (1)..(332): unsure at all n locations
  Clone ID: MRT4577_31730C.1
aacatgcagaagattagcagaaacagggtacagatcaagggaacaacattcagaatggtgaacaagacaaatgatcacatcaaaggttcataggattattatgggggccaccatgccaatcaaatggatatggggatcaaagcgcaggaacaatctctaggtgttcnggcatttagaagccgngagaaaacctaagaanngnngctgggccttggtctccatatcccttnnagtggcatggggggtggaataatnnncctgtgaacctttgttgtgtnnctttgncttgggcatcatccggntggtgaatccctgttccggccactgtttct

SEQ ID NO: 109905 - DNA, 554 bp, Zea mays
  Clone ID: MRT4577_31731C.1
atttcgctctcctccgtatgcactaaacgccgagctcgcgtggacgataccagtcggcgggatggggtcctcggcctcgccaccgccaccaccgacgatgccactgctcatgattgggggacgcgggaacctcaccatcttcataacgccgccatcccccgctagaacgccccggagcgctggtgcgacacgccgcctgctcgagtccccgcgctcggatatctccacacccatcccgcagagggaagtcccggggccctctgtttatccctctccgcgaaatcaagagagtcggcgcgcggagtctgcggaggcgatcatcccgcccccgccggctgcttgtgagaatgacgcgctgccgccggtgcatgtgacaccgccgcagtaccataaggagtccgcgttaggcaagcatgacgtatcggcggtcgaattcttctgggacgccgtcgggcgagtccaggaagtgcacgcgagtctcgaccagcacgtgtctacctgttctccggttggatcagcacaagtaacagcgtgcgcttaacgactactatcag

SEQ ID NO: 109906 - DNA, 201 bp, Zea mays
  Clone ID: MRT4577_31732C.1
gacgcacgcctctgaaatgactcgtatgaaacaccgccgccgccgcgccttccattccagtactcgcggatgaacggaacaccagccagcgccatgggcacgatcgacgacctccgcctccgtgctgtccgcaccgtctgtggccgggcctctcctgtcgccttctcgccaggcgcgtctggtcttccgcgcggctcggtc

SEQ ID NO: 109907 - DNA, 805 bp, Zea mays
  Clone ID: MRT4577_31733C.1
ttgggaccctcgagccggccgggactttgagacattgccttcctcttctaaataagacccatctctaattcttctaacatggatgagcataagttaggttataaaggaagtgatgttcttcaagagcttgaaatactgactataaatgccaaaaccgcacaagaggttatattgagtaaaattcttgagaagaatcgggctactgaatacctgaacaaattcatgaatggatccatagacatttctgccttcaagtgccaggttccagtagtgacgtatgatgtggtccaaccctacattgcaaggattgccgctggtgaaaggtcttcaattttatgtggagaacaaattgtagagctgctccgaagctcgggaacttctcggggtgaaccaagattgatgccatccatctcagaggatatttatcgccgaacgtatctgtatagtctgatcatgcctatcatgagcaagtacatacgaggccttggcgaggggaaggcaatgtatcttctctttgtgaaagctgaaacattgacaaatgctggcattccagtccgatcagtcctcaccagctactacaagagccctcagttcttgcagcgcaagcacgacctctacaacagctacaccagtcccgacgaggtcattctttgccccgacagccagcagagcatgtactgccagctactctgcggcctggtagaacgcgagaacgtcgtccgtctcggagcagtcttcgcctcagcattcctccggtgcatcagcttcctggagagcactggcatgacctaaccaccgacatccg

SEQ ID NO: 109908 - DNA, 222 bp, Zea mays
  Clone ID: MRT4577_31734C.1
gtaagctcggatcctctatattggccgccctctatcttttttttttctatacccccagataaactcactccttgtatataaatatgaacttgctcccttagacggacatgactgggagcacgtaacacaaataacaatgaaccctagagccgaccatggatcgatattggcgattgtttttcccaggacgtgattaccaccctgctattatttttatacacc

SEQ ID NO: 109909 - DNA, 529 bp, Zea mays
  Clone ID: MRT4577_31735C.1
cccagcgtacggagatccagacataccatagccccatagcaagctcaagcacacgagcgcaggaccccaacaagcgccaagcaaaatcaccggccggatggtccgctccagaccagtatggtgacggcgatcgcggtggtgtcgatggtgctcggcatgctgacggccgtcacgattgccaacacgtcttcggccccctccgtgggcaccccgctgtggaggcccggcctgggccccgcgctgcgctggggcgcacgcggatgcgccccgcgctgcgaggcgtgcggggggtactgcaaggagtactgccgcctgtgcgcccgctggtcccacgccaagaccattaggaagaacattagccgctcctgctgcggcacgtgcgccgacacgcgccggacgccgtgccggtgctgtagcgggtcccgtacccgccgacgcgcgcccatgcggatcggcacgtccgcgcgcactgcaccgacaactgacaagtgaggtgatgaccgaccgtcacgccgacgccgacaccgat

SEQ ID NO: 109910 - DNA, 430 bp, Zea mays
  Clone ID: MRT4577_31736C.1
cccacgcgtccggggagcggcactggcggctccggcgcgggcgcgggcgccgtggctgggtgcactttgtggcggccatgttccggtgcgacggctgcactcgcgtagccggccgctagtccaggaacatggcgacgctggatgacgatggtggggaggagcagcagcagcagcatgcgggcgttgcagcaatgcggaggttcaagtccgggaggagagctgcttcgtggtgagactaggcgctggccgcggcagctgtgggcgatgaggactaggggatggagatgcccgacagccaggacgctgagcagtggttccggcggccggtaatttatgttgtggcgagaaggcgggaaacgactggcgtcgccgggacccgtcgactgtggatgccgataggtgaaaccgactgtcctaggcgtctcgagct

SEQ ID NO: 109911 - DNA, 712 bp, Zea mays
  unsure (1)..(712): unsure at all n locations
  Clone ID: MRT4577_31737C.1
aaaaacacatgtactaggatatatatatgatagatcacacataacacttgtacaataatttgggattaaatgtaccctcgacggacctttgccaatccacatacactgaggagtctttcttacgtacaaatgcttgattaagaagctcacacagagtagacgtacattgaacctataatgcccttgacgctgaatgagagggtgtacgcatcttcacgcttgtatatgaaatctgcaattcgtgcaacattgatcattgtgtcgagaagtgctatggggcgttcctgctcaaggttgtcttggacgatgtccatcacatgccatctcgattactgctctaagcttctcgttggcttcctctgttgtcactccgtactgcttcatgcaagtctgaaccgtggatgccacatgatctaaagaagcttgttcccgctcatgtgacatgatgtcgttgcagatgcggcccacaatacaagcacctctgacgattttggggaaggtgaaaacccactcgacgtcctctctagtagtcatgttcccccttgatgaaataagcgcgagatttgtcatctccatgcaaacactcctcgggatagaaatttcgaggtgctcctcaacagtggttcgcacaacatgttcatgagnctgttaaagctcagcgtggtaagatttggcatgtcaatcaccatattcatgaccagttaagcgtgca

SEQ ID NO: 109912 - DNA, 348 bp, Zea mays
  Clone ID: MRT4577_31738C.1
atgtcaagcttgctattcccgtttcaccctaacatatacctataacacgacattgtcaattatatcaccgaatctagctatcctgctcatgagaagatcaccttaacactcccacatacctattcagactgccacatatctatatactccaaccttcattacttaatccagaccatacacataacagaatcagacataccactatcacataaccctactacattacatcatattagactggtcacaactacacacttgaagcatttactgctcattgaccagtcacttattatgatactagctcactagatcgacaaacatcacgatatcatacttcatgacgataat

SEQ ID NO: 109913 - DNA, 344 bp, Zea mays
  Clone ID: MRT4577_31739C.1
acattctacagagctggtccacagagctagcgcaagcagatctagcacgttctattcttgaaagaagccagctaggcgcgtgattatggatcgcctcactgagatggcgccgacggtgctcgtcctcctactgctgctcctctcgcggggctcggctgcggcgacacggcgcggaggtgtctggtgacatgagggcgagggggagtggaggccaagcgacgatcatgataagggcaaaggctagggtagggggctgtccctactgcaccgtctgtagaatgtggcaaactatcaggggcgtcacgtgctcaccgagcgcggccagctgggggcgcagacctgct

SEQ ID NO: 109914 - DNA, 1407 bp, Zea mays
  Clone ID: MRT4577_3173C.1
atttgcggacgcgtggggttggcacgtgctggtcatttagaagaagcatgggattttattgaggaaatgcctggcaaggtagatgccgtcatgttaggcgctttgcttgctgcttgccggaaatgcaagaacactgaggttggtgagagggtcatcaataggattatgaagctggagccatcaaactcgtggaactacgtggtgtcatccaagatttatgcaacctcagataaaatggatgaatctgcaaggatgatagggctaatgagggagaggggtgtcaacaagactccagggtgcagctgggttgaggttaatggaaaagttcttgaattctatgcaagcactgaaccacagcatggtgcggaagatatgtatcaactcatgggcgtactggtaaatgagatgagactaaagggatatgttccaaaccttgatctggtgtagcacgtaataaagcatatttcctgttcttcttggagcaaaaggaatgacttatgctaattcacaggaggaggaaaatcgcaaaatgaaataaacagaggaacgacaagaacagcagcagccaacaatatgatgggataccatactataatataaaacgaaaaagagggaacacccaaatgctaaacctcaatagctgatactctttgcctgatttcaacttcttccttaatgcagtgaaccatttgcagcgtgctaagcaatcgttattgacaattatttaccttctcacttgttcaataaagtgtgccgcatggaatctctcatttggctattgggacctttttatggtctacttcctaccaccaccaccaagtcagtttgtttgtaagctgggaagataagagttcagttacaccatgtggctccttaaatatgcacatgatttttaatgttacaggacaaggtgaggttggcaactattgatggatccttacttctagagttgcgctgaagctatcttttgttcgcttgttttgttcttagaatactttgttttgtgctaattttgttcatccacttcctgcatatggatactaatggggaagagggcaagaagagcgtggagacgcacaagatctacatcgctgaagcaggtgcaccctggtattggaatcccctgcaaggtcatgtctgtcatgaactcgctcatcaacgacatcttcgagaagcttgccggtgaggctgccaagttcatcggctacaataagatgcccaccatcacatcctaggacatccaagggcatcaaggccgtcaccaagttcacctcgtcttaggcttcttctccggtgcttctgtgtcttcgtgtgagtaacatgttggttggtcggaggcttggctgttatggtatcgtgtaattgccgcggtggctttttggcagaatggaatgctatggttatgtg

SEQ ID NO: 109915 - DNA, 1554 bp, Zea mays
  Clone ID: MRT4577_31740C.1
caacaatgggattattacttttgaagaatggagagattttcttcgactgtaccccaatgaggcgaccattgagaacatttatcatcactgggaaagagtctgccttgttgatataggtgaacaggctgctataccagaaggcataagtaaacatgtcaatgcaagcaaatatcttattgctggagggattgctggtgcagcatctcgtactgcaactgctcctctggatcgcctcaaagtgatcatgcaagtacaaacaacacgtacttcagtcatgcatgcaattaaagatatctggactaaaggtggcatgctgggattttttagagggaatggattgaatgttgtaaaagttgctccagaaagtgcaataagattttatgcctatgaaatgttaaaagaatatattatgaagagaaaaggagaaaataagagtgaagttggtgcttctgaacgtctcattgctggtggtttagcaggtgcagtggctcaaacagcaatttatcctatagagttagtaaagactcgtctacagacttattcaggtgaggttggttatgttcctagaattggtcagctctcaagggatattttggtgcatgaaggtccccgagctttttatagaggtcttgttccatctttgcttggtatcgtaccttatgctggaattgatcttgctgtatatgagactttgaaagatgtgtcgaagacatatatactgaaggacagtgatcctggtcctctagtacagcttggttgtgggacggtctctggagccctaggggcaacatgtgtttaccctttacaggttatcagaacaagactgcaagctcaacaagccaattcagaatctgcctatagaggaatgtctgatgtcttttggagaaccctacatcatgagggtgtttctggattctacaagggaattctaccaaatctccttaaagtggtgcctgctgcaagtattacctatctagtttacgaggcgatgaagaaaaatttgtctcttgattaaattgtggagttgttggtgggaaaaacagccatcattattggcatggctgactgtagagataatgacgacacatgaattttactggttgaatagttcctttttgaagataaagatggtgccttcaatatagaactagaagcaacggtggcatttttctcctaattttgattcagcagaaatgaagtgataattatgagatcatcgagacatccatgcctggcatactgcttacgacaccatcgacaccgagttaactgttcatgaatttccgaaggcttgttttatcccccgtctggggcgagttttgttagtctgtaacactctgggaaactctcctaacttaattgcaatcccttgtgctcctcaacttgactggagctgtgacatttgctgacagccaaaaaaaaacggcaaaaagggtgctggtgatacctgtacgtattttccacggcgacttggcataaatcaatgcctagtgaatgtaataatccgcccgttcccgttagtcttacttatggtttccaatgaccctgttgcat

SEQ ID NO: 109916 - DNA, 286 bp, Zea mays
  Clone ID: MRT4577_31741C.1
cccagcgtccgcccacgcgtccgggcacgacgaagccggccttaaccaacggcggcgccagggccagcttcggcagcaaaccggcggccggcgtgggcaccgtgcttggccgggccatggaggacacgcgcgcgagctactcgatgggccaagggctctggcgcgggcacttcggcgtgacccacctgtgcacgcaccggacgagcggcgagaaactggcgtgcaagacgatcgcgaaacggaagctggcggccacggaggacatggacaacatgcgccggaaggg

SEQ ID NO: 109917 - DNA, 277 bp, Zea mays
  Clone ID: MRT4577_31742C.1
aactaatgatcaaagtttagtcattatcattaataatttgaatatgaaaggtttcactcatgaaaggttgttttttttttatctaataaccgaatcctcctccaccgaaacctccttgattgttgttgaatcctggttgtccaaagttaggctgacctccgaatcctccttgttggccaaagccttcttgttgacccattccgataccacctggacctggcaacattggcatgttattaaatcccggcataaatccgagatcatgataaacattgat

SEQ ID NO: 109918 - DNA, 331 bp, Zea mays
  Clone ID: MRT4577_31743C.1
acgcctcctcctctacttatcctcctccagctaaacccctaaagcaaaccatcaacctccttctcaaggcggattctttaacataaacccaaacaattaattacataattcaaccccctcataccagaaatcacattctatctcaacaatctagccttatacaaacaaaacgactacaaatatctcacccacatatatcttctactaaccttcccatatattcaaaattttacaccaaaaaacccattcctgaccatcaatttccatttcaacacactctgccgacgccaattcctctattctcttcctgagatcaatcacttatccatct

SEQ ID NO: 109919 - DNA, 506 bp, Zea mays
  unsure (1)..(506): unsure at all n locations
  Clone ID: MRT4577_31744C.1
ctgacatcttggatatcaccaacatattcagcatcagtttgttgctgttactgagtggaccggtggcctttacgtttctcccacaattgctggaagcaggccaggtggattgatagcgggagcttgggctgctatgatgtctctcggactgaacggtgacaaacttattctgaaattccatcagtgtgtagtgatggcttagaaccaaatagtacttgtgatgtataccatcgcttttcttgcttccaggctacttggacagtacaagccgtatcatggatgtttcgaagaaaatacaaagagggtaaacttgtttgcttattatatatgcctgcacactgaactatgactaaaagacataagacanattctgactgtagctatgttttacccatatttgttatttatttatggtaaaattgaagtagtattcacgtagatatttgttttctactagtatgcatggtcaaatgctaaattaattagcacacttgtaaatatttcta

SEQ ID NO: 109920 - DNA, 368 bp, Zea mays
  Clone ID: MRT4577_31745C.1
acgcgagaacaaaaccgggatccaggcaggagaacactcatgtaatgcatgcgctcgaaagcgctcatcggggggagttggggtcagagatctccactaccactccgatgagagggcccctagagaaacctgaaaaagaatggagaggaggacgatcagatgagtatggaggcgcgactcccagccaaagagagacagagctggagcgaaaccacatacaaggaaggccggctatgcaatgggaacagagtcagggaaataaaggcgaagagcacggacgatctctgcagggccaaacgaaccttatagacaaaccccgccaatgaacttggaagagactgacggaacccacagaaataaaggagcac

SEQ ID NO: 109921 - DNA, 338 bp, Zea mays
  unsure (1)..(338): unsure at all n locations
  Clone ID: MRT4577_31746C.1
ttgttttttttttttttttttttttttttttttttttttttttttttttttttttttgggggcaacaggagctatttgtccattgggaaccaaaatgggggcaatggacacgtacccacgcacacacgttacaaagtcaccacctgggggggcggggcggccgggggcgcaatcgaggctgttgagtctgttcttaacaaccaccacctggggatctacccctttatctggtcgagggccccggtgtttttgggcccnagccccatgccccccccggggttgtggccgacggctccgcatgccattgtttgggggagggtgaacccggggggggcacc

SEQ ID NO: 109922 - DNA, 880 bp, Zea mays
  Clone ID: MRT4577_31747C.1
ttttagcccctccaatcccatcctgttttgtggctcccaaactagccgtaagttggggtataggcttaggtacttgtcttaatatgttactccctctgtttttaaatatatgacatttagaaaagctaataggacacgctacttagttataaaaacgaatcattagcttgtcctacacttcgtagtacttttaagatcatatagcattgaacaaactggatctgcactatttgacattgatctaaaacgaggtttcattttctcactaccacatggcctttccacatgagttggagtggtttagtgtggaatgtaaactaagggctactttgtcaactcaactctattttcccaggggtccattttctaagggaaaatgaactaatttctcttgggaaaatgaaaatcccttgtaaaaatggggtttccaaactagccctagatttcatattaaaccactctaactctaacagtacacacaagaataaggccaacacatgggtctccaaacaagccctataatgtaagtcccaactgtcatagctatattgacaatgtatatattctttttgcaggaggatcagcatggccggtttgagcatgaggactgtgccccatcttgcagatgccatacacgctgcagttactcaactgaaatgaggatagtatcgcagctttcgtgaataaaacctgaatcacccacaacaatgttctaagtactcagccagtggtatttactggttgacctactgtagtttgcgtcggaatagatttgtttttttactctgttcgtggggcagttttgtattggtggattcataatgactctgattatggtgcgttgggaacttctaataatatgcacatgaaattttgcttc

SEQ ID NO: 109923 - DNA, 241 bp, Zea mays
  Clone ID: MRT4577_31748C.1
cgtaaactgggttcattttatcagcttaaaagcacccctccttacgaacaaaaatattggggcagactaacatcggtgccaaattctactccgattaaccgtctatttttctcattatccccaccaagctaattttagctctatgcctcataccgagcatacactcttagttattacaatcttctcccagtgggacaggtgaccaaccacactttcgcctgacatatcgataaataagaca

SEQ ID NO: 109924 - DNA, 937 bp, Zea mays
  Clone ID: MRT4577_31749C.1
ttagatggctcatttggacaactgggcactggtgataacctctcaaggaactttccttttgaagtggcatactttaatgcaacacatattgagaagcttgcttttggtatgcgccattctcttgtactactgaaagacaattcagtgtatggatttggctcagcaagacgaggacaagttggtaaatgtgcttctaggatccaaaaatcatataatgttcctagactgattgatggttttccaaattgtaagatagtaaatatatatgccaatggcgatcacagtgctgcattggacgaatctggtcatctgtatgtctggggaagagcattaattggacaacatgatgatgatcaaccttcggaaattttgccctccttgagtgtttctcaagtggcactaggatggcaccatgctttagttttatctgctggagaattgtacacacttggtgtttaccgccaccagaaatgtgatctccctgggttaggaaatgtattggggcagcaatcggacacaagggcaacaagcagttctcatgattgttcatcctctttgtcagtgttggagacggttccattccttgatggagaacaggtggcgcaaatagcaagtggaactgagcactctgctttggtaacagataaaggaacagtcttcacctggggctggggagagcatggacagcttggtttgggtgacacttcggatcatgtagctcctcagagagtaaacgtaggtgacaatgggcagggcatgtccggttcatttgccgtctactgtgggagtggatttaccgttgctgtgaaatcgccctagtggctgtctagtttgtaatgcatgcaccaaattctccttcccacataacagtgaagaaataaacgacaacattttgttgtgatgccgtgaaggtagtggttggattattattttacac

SEQ ID NO: 109925 - DNA, 232 bp, Zea mays
  Clone ID: MRT4577_3174C.1
aaagggtttaggcctttttgaaaacggcaacaataatccaccaggcgaggacgatggcggacggtaagaagctgggcgacgtgcgggacaagctgacggaggcccatattgctctggaggacatggtgaagcaaacctacactctgctttggtccctggggaggtggttaaaagggcaatcaaagcctatttggtccacccattggaagttttgtgggttcttagaagatcc

SEQ ID NO: 109926 - DNA, 914 bp, Zea mays
  Clone ID: MRT4577_31750C.1
aaagcaatactggtttcttcggctctgatttcgcagcaatgctttaaccatctcaacatcttcgatctggaatcttaatgtctgtcctttctaaatatatatttttttaaaaaaaaaacttcaatgtgagtacgtatgaggtatctaggaacaaaatctgggttacaagaactgctcaattggtagagatttcgactatagctctcggcctgacatcacctggacatcctaaccacttccgtgagcattagaacaagtgacgctgcagtgttgcttactctccagtctccactatgtgcagtaccaatagtggccatcagcttcatataaacgttcagaattttctggtgcaaatccgtgctaatcatcaccagatcaggaggatgtcgcctgggaagcaagaaatgccgaatattttgctcgctctgccttgtaacgtttcagctctttgattgccgccagcagcacatgcaaggaaactggtgcgaaaaatggcatgtaaatggcgaaatagtgctctactgaagcataactgattgacataatggatggatggaaaaatgcatcctcagccagtgccctggctcttgttgcagatactgctgaagagtcacttattcctagagttgcatttccctgtgctaaatttgcagcttcaagagaaagctcaacctgtcttccaatttcatccatgacaatcatcctagggagagagtggaccagactggatagagactccaatgtggtgaggcatgacagcagattggaacgtgcatggtgccgatataataaatctaactcccattctgtgaagcccttttcactaactagaaatttagttggaacgtccatatcttgtgagaaataagatggttttagaccaaacagctgccttagttgtccaacaaatattt

SEQ ID NO: 109927 - DNA, 3152 bp, Zea mays
  Clone ID: MRT4577_31751C.1
aatggcaaagcatcacaagcagttgatatgaattatcagaatgagaaaacgcgacagacataatacttcactgttctagatgctttgaactgggacatagtttggtatgcattattcacttcatgaactgaaactaagacggcagttgatatgtactgctacattctggattacatcagtattgccatcttttgctaactatttcagtagtaccgtgcctgtaagcaaggcctcaaaagcacaagatcaaccctaatgacatgtccccctataaagctaatactactaccaacaaaactttccattgccaagaaagcctccgatctgtctctgtcaagaagttgaagcagacccctcgcttgtggtggccacctgtaacactgatgatttgaggccatcatgacatgccacaccacaagtcgaaactacaataaaataatctcaccaatgcaatcaacttaaacacacctctagcatataaaaaagtaagagatagaggctacttaaacaactactaattgaataaacacttacaagcgccatcttgatgaaaagcttagcttcgctcgatctcaaatctgcacaacaacaacaacaaataaaattagtgacatcaaacatgaacaacaaaaatcaagaaaatcacaagaattctctcgctaagaggtgggggtaaggtcaacaaagatgactcatggcatggtctgggtcgattgaaggattcccaagcttcagcgatgagccccttcttctcgtagtacttgcctaaaccctaaaccctaaaccctaaaccctaatcaccaccagatcaggaggatgtcgcctgggaagcaagaaatgccgaatattttgctcgctctgccttgtaacgtttcagctctttgattgccgccagcagcacatgcaaggaaactggtgcgaaaaatggcatgtaaatggcgaaatagtgctctactgaagcataactgattgacataatggatggatggaaaaatgcatcctcagccagtgccctggctcttgttgcagatactgtacatcagcacaattctcagcaaatgttcataaaaatgcaaggacattataagaaacaaattatcatcaacttgcctgctgaagagtcacttattcctagagttgcatttccctgtgctaaatttgcagcttcaagagaaagctcaacctggaaaagaaaatgaaaatgattggaattggaacaagcttaagctcgctattaactgaccatatgctatatcaaaacggtaaacaatcagatcgatccatgcaagtacaaggtaagatacaataacacataggatacatatatgatgcaggtcagtgaaatattcaaacaaacatattatctcaatgtaacgtacttctgttgctttaagcatgcataagtgcataaccaaaaggacagaaatataaaactagtttacagatcaattgagatgagctcccatctagccagagtggtacgaggtagaacctgtcttccaatttcatccatgacaatcatcctagggagagagtggaccagactggatagagactccaatgtggtgaggcatgacagcagattggaacgtgcatggtgccgatataataaatctaactcccattctgtgaagcccttttcactaactagaaatttagttggaacgtccatatcttgtgagaaataagatggttttagaccaaacagctgccttagttgtccaacaaatatttcgagtgcctccataagttcctgagatgacattttcttctgggtaccatgagttttcttggaaccaagtgaacagtccggtgagttccagataagaacacctccccacataggggatataaatgcattggtttttgaaagcccaccatcaggaagttgtaaatataatgggcattcccttgcagatggaatgtatacaacaaattgaagaacttttgatcgtcctgtagctgaaatagatgtatccaagtgccactcatttgagtttacaaagaaaggaatgtctcccatactaaggaaattgccacccagtttatcatcaaaataagaataggacgacttaggagtgtggtacaaaacctgactttctatattgatttccgcaatcggtcgcagtgcctcaaccacaggattcaacatcttctcaccaatcttttcaaagtcccaatcatacacccaatcacttggatcagcattcagcaagctaaaggatagaacgacattgccatctgatccaactggcatgaactcgcctttcccaatgcctgcctcaccctcctcaatacccccattcatgaaatacttggcaaataccttgccaataactgagacagccttaacctcatcagcttttccaaccacccaagcatgccggtgcttcccaacgacaaccctcataccatctgcatcatcaatctccacaaccacaacagtgtaaaccctagacccatcccctccgacgctgcctaaagctgagtgcagcaattcatcgaacacctcatcgccaaccactaggtctgcactgctcacagtgccacactgccaacctgagccaacgctgccgctgctgctggagcagccaccagctgactcaacggtgactgataccgagacattaccggcggtagaagtggctgcaagaagctggagctgcgccgaaatcgaccgctcaagacgacggtacagggaggcatcgtcagagcggccgggaaccgaccggaggaagaccgcgtggagggcgcacgggaacgagggcggagtggagtggaggcggtgggcgagtgccgtgattgcgtccgaaggcagcggcgaccgatggatctcggtggacttcagcaggaagggcagcccgacgagaaaggagaggaggacggaggcggtgagaatgaggcgcttcactccgggcttcgtcgcgcgcaacggcggcttgttgctgctgccggcaggggtagcggcagaagtatgcgggtctccggatacttcgccggagatggtaggaggtgttggggcctcgtcgccggcgatctccgccatccgcacgagtggccggacggccggacggcgtcgtttggttccgaggacggaggattggggcgttgctgcgaagcgagcagcgtcccggccagaacccgagggtacc

SEQ ID NO: 109928 - DNA, 766 bp, Zea mays
  unsure (1)..(766): unsure at all n locations
  Clone ID: MRT4577_31752C.1
tcttcatcagcggcgtcgaggccaactgccgcgccaacgagaagctcatcgtaatggtcctcgccgcccgcagcaacggcaacggcaccggcggcggcgcgcaggctccgagcacggcgccgcagccggcgtcaccggcggcatcgccccctcccgccagctccaccccgcccccgccgtcgtcgcccgctcccaagggcgcgtcgccgcccccggcctctgctcccacaacgacaccgggtacgccgccgccccctgctccgagcgcgtcgtcgcctgctccggcgtcgtcaaccccaccgccgccatctgccccgcagacaccgccgccgccgccgccgccgccgccgccgccgccccctgcttcgagcgcgtcgtcgcctgctccggcattgaccaccccgccgccgccatctgccccggcgaatgccccgcaggcaccgccgccgccctcggcgagctctccgtctccgagcgcacatggagcgacagctagctcgacgggcacgccatcgtcgcctcccgccggcgccgaggtcaagaacggcgccgccctcacggtggccacgggcttgaccagctccttcggggcctgcatccttggctacgccatgcttgctctatgaagtgaagtggactctagactgtgtacacgatgcacggaagacccgagtaaatacagtatgtctatacatgttaactgaagacatgcgatttgtgcatgctttcgttttcncgccgcatgaataagaaatcaacatttttt

SEQ ID NO: 109929 - DNA, 253 bp, Zea mays
  Clone ID: MRT4577_31753C.1
tttttctttggggggggttgagcgtgaagtcaccgacccgggacacatttgaaataattacgggccggtcctcttcaagatattgtttggcgggaaattgattttcacccgttcagtcacagggaaaacgggggctgtaattgggcttgacatgacttatcgggtccattcgtgggtttttaaaagccataggctgtgtgcaaggcataaccatttttagggtggcttcctttgggttccgcacaacagcatt

SEQ ID NO: 109930 - DNA, 288 bp, Zea mays
  Clone ID: MRT4577_31754C.1
cgaagtgaactagaagttctggttaacggttgtccttcaatttgttaggaaaaaaacttttacttagatcactataccatgtgacctttgatctttttttgcagctcactctgagtatggttgaattaagagcttttcaagaaacatctgatgcatcacagcgatctgctgcaaccttgccattgtccccatcacctagtgattctcttcctggaggaaaatatgaggttttggttattaaagcagggttgaggaaggtaaaaattctcacagatctggtgtcgacac

SEQ ID NO: 109931 - DNA, 569 bp, Zea mays
  Clone ID: MRT4577_31755C.1
tcgaggtattcctgtgctccgtgagaggctccatttctctctcgtctcctctccgctctcagctggctgctggaccgaagaggtacctatatctcctgccgcctcacgtacagcgcgccatgatcgccagctcaacctgtaccagagctatgtgtttcgagctaatattcgtcaattctgattacagctctgtggccgctgaatacggcaagatcctcgaccgtccggtgctaaatgagcctcggaccaataaccttcactactctatacctgatctcctgctcttccgtatcctccatcgctgtatctttgcagtcacacagactgatgtcgagaaaatcattgattgacacaacacatctcccacggtgattgacatacctttcaaatcacccagatgcattcttgtgaacaacactgcagtcccaggctgagtgaaccaccttgcagctatgcgtggatgatgatgcctcatatgctccgcgatcccgacgagattcatccattgcttccctcgaatgctattagtgaccatgcaacgcgactagtatgtataccaggacctatcg

SEQ ID NO: 109932 - DNA, 3153 bp, Zea mays
  Clone ID: MRT4577_31756C.1
aattcggcacgaggcacccctttctcatcatttcttccacgatcccgttccatcctctctctctcaattcggcgcgggcgctatctttatccgtctcagccagggcgggtcagcactcagcaggcgcgagagatacaggagagaaaccgcagggccgccgccgccttccctgatcgaccgctcccgcgtgcggattcaggcgccgggctttccagccatggttcagtgagccgggaggaatccttgcgctgccggagaaggattatattcgtcggtggaggaggtccctgcgtgcatcgatcgtctcccgggtttccgagagcaccctccgcccccggattcactgcttcgattgattcgtcaagcaagcacagggatatcttcacgagaagtgtcatcatcaagattgacagccttcttcgtggatggcgaatggtaacaatgaagtgatgggtatatctcagcgcaaatcttgccccaaggttcacagctcaatgtgtagtgagctgacaatgatgttggataaggtctcttctattcttccatcaatagaggctgcacgaccaggttgtaaagcaggcatacaggaattatgcaatctatacaatgttgtcgagaaagggaggctcataatcatacactgcattgactgtagtaagctctatttggctattaccggagagacgattgtagcaagatgtgaaagaataagagactcactgaggcggagtttgttccttattcagaatatggttccaccagcactagctaatcagattgctgaagtccacaatgatctccgggatgtcaaatttcttcttgatccaatggaagaagaggctggcaaagccatgttacagatgctccggcagtctgacgcaagtgaagaattagaacttgagacattcctgcaggctgcttcaaagttggagctgacatctcctaaagaagtcttaattgaaagacgagcaatcaagaaactgcttggaaaagttagtggtaatgatgcaaaaaaggagggggtccttaagtttttcatgtacctcattaagaagtatggaaagatcatcagacaggactctggcgaacagaatgcggacttgcgagctgaaagtcaatctttaactctgagtacaccttcctgtgatgccagtgctcctggaaaatgttacacaccaacagactttcagatttatgaggatcacagtaatatgtctggtgcagctactccacctccagagttctgctgcccaatatcaacaaagataatgcatgatcctgttataataacatctggacagacttatgaaagagaatatattgagaggtggtttaatgaaggatatgatacttgtcctaggacacagatgaagctagagaacttctccatgatcccaaatacctgcatgagagatctcatttgcaattggtgcaaagagcatggttttacagtttccgattttattcctccaaatgaaaatgcttacagttacttaccagagcaattgcatggttactctatgtcaagtttgcacaatgtttcggtacctctcattgctggaaaggccaacagttatgtgattgatcacagcaatacgtctgttgcattatctgatgccagttttgtctctaatgcatcccacgctagggacatggaggactcaaaagatatttctcagttctcttggaacgccgactatcaaaagtacctgtcgttccacaacttcaaccaggagatgttcctgaagttctttcatgagctgtccatgctcccattcgaactgcaagacaagtcaattaaagatttgaagaacgttctcgattatggaagtgagatttcatatgatatgatgtcaaatgggtttgttgaagcattccttgaattcttgagaaacgatactggcagctacagtgtgcaagatcaggaagctggatttcggttttttcttgcttttatttccaatagcagggctaaagttcaatctatgcacgaagaatcatttcacctgatcacatccttccttgactccgagttgaaagtcgaagctttgttgacgctgcttgagctgattaagcactcgagttgtccgaaatctcatgtgatggcctctgttgttactcctccactgttcaaaatactggcatctgaagataccgaaggcctcgaattgtctctgaagatcatctgcgagctttcatccgacgccgatataagatcttcgttagtttcaatgggaataatctcgaagcttgttcccattttaaccgaagggaactttgtcgagcgctgtttggagatcctgcggaacttaagcgacatggaagaagcggtagcgcggatcacaaggaccgaccggtgccttgcttcggtagcagaatatctggacacaggaagccccacggagcgacagcacgcggtggttatacttttagcggtatgttcgtgcagcgccgaggactgtctgcttgtaatgaaggaaggcgtgatccccgccctagtggacctgtcggtgaacggaacggaagaagcgaagggctgttcgacgaagctgcttcatcttctccgggacatgaggcgaagcgaccagttcaccaactcgtgctcacaagaagtggctgccacaggcatggtagtagaggatgctcccaagaactcggttcacaagcagcctgcgtcgaagtcgtccaggtttttccagaggaaactgaacatcttctcgaagcctcggtcgctcacgctgttctgaaacccggtttgtgtttgtcggagctggtagtccttttttagtggaaagggaaagcggagtagtccttgactccttccttgtacatgcatgctgcaaaactaaccaccttctgtgtagatggtagcgcttgtgtttgccccggtgagatgcttgatgagatgatagtttttcatcctcatgtgtttcagtagagcttgttagttgctacagaactgtcctgtgtgcccaaaaaaaaaagaaagaaagaaaaaagtcagtagatggcatttcttttctcttttggcggaaagcctgccgttttgtatcccgctgttcctggctaagattacctttgaagcctgaatagaagcttgttttgccaaggtcaaagggggggggggggggggggggggggggggggggggaa

SEQ ID NO: 109933 - DNA, 169 bp, Zea mays
  Clone ID: MRT4577_31757C.1
ggggaggaggggatgggaatcgtgaggagagaggaggccgaggtccagatcgagcccgggggtgcctcgctgctgtttcggggacatcaacacaggatacgtctatcacatcatcgagggccatagaaattgcctattagagaacacgtcttatgcccgacaagagaat

SEQ ID NO: 109934 - DNA, 357 bp, Zea mays
  Clone ID: MRT4577_31758C.1
aaaaaccaaaaaccatgggatggggggactaaattaaaaatttttaaggggaattacttgttggggttcattttttcgaacaaaaaaaaagaaaaacccgaaagggacaatgcggaaacaccctttaaaaaaagggtgaaccaagggggcaggctagaaattggggtttttaaaaccaatttttttcctttcaaaaaaaaatacctttttagacgaacccaatgtacaattaatacaaaaacttattttctggttgattagacatttttaggtgcaagaagaccaacaagcttttatcactcttcggccaaaaaaaacgcatcccccttgggaaaacccaaaataacccctaccaaa

SEQ ID NO: 109935 - DNA, 652 bp, Zea mays
  Clone ID: MRT4577_31759C.1
attgggtacctcgaggccggccggcacaactttctctatatggccttgtctagcgtgctcacactgagtcgccacgcaagatcctctctcgcgagcctctcgtactgcccgctccatcgatgtccgcgcgacacacagagacgagagagagagagagactacagagagacacacatcgaccactgttcctccgacgcaaggtcatcgagagcagggccaccgtgacatgctcacgccacgcaagacgctgtccatcatatgcaggcgaaggcatcgtcccctcccgccatgataagaagctggtgaatatcctctacaccatgactctgacacacgcgacgactacattcttgtgatcgtcatacgtcgctacacgccacgaagaatcaccatatggatcgttgaggacagcatggcagtaatggcatcacaggacacccgtgcagacaagtcgagatcgatctctgtccatacaaccactgcctcccggtgagcacctctcatacgacaagagtgtccccacttaccttcagaggaaagatacatgctatacctactcatgaccgaagaagactcttgttagatgaacctccactcttatccccgcttcaacacagccatggagccatctttgactgctgccagacgacca

SEQ ID NO: 109936 - DNA, 290 bp, Zea mays
  Clone ID: MRT4577_3175C.1
ctgcatgttcgggccgaccgacgcgttctaggtcgcgtagcgcggcggtggtaaatgacttcataacttacaatactcgtgccgcgctacgtcgtggggttggtatggggacaacttaaatcccttaactgggctccattgtacggcatgtctgctgccatcacccgcgggtttcccaacttcattagcgtatatttaattcgtcgctggtcaaaatggcctatatggaacttgggccgggccgtccggcttgcctaacggtgagcaccgtgcatgtcgacccttacgcc

SEQ ID NO: 109937 - DNA, 532 bp, Zea mays
  unsure (1)..(532): unsure at all n locations
  Clone ID: MRT4577_31760C.1
aacaatgagacatatacagctttatttaataatctgtaaaaagttgtactctggcagagtgacgcattccctatctcagcagaaagcgaatactatgtctngaaaagcccctccctaagattcggaactgtggaaccctgagcttacatctgatgcccttaagagatgggcccttgctacgtggcagctggtttcatcctcctcccagcaatactctggctggcttcagcccctcacacagcagtccactaaacaccaactgtacctgcacatgctgcctttatagactggccccttcactcttttctttaagaactgtcaggaatctttctgagaaatgggttctgtaccaatttcacttacaaagcaactgaagtcaaggctatgcctgtgatgcattacattctgttaaggtctgtacctcttcctccagctggttcctatgtacataattttcaggccatacctctcctttttcagaggattgaggggtggagaaacactcttcatcacagacccaggaggcacttct

SEQ ID NO: 109938 - DNA, 294 bp, Zea mays
  Clone ID: MRT4577_31761C.1
gctgcgtccgcggagcgagcaaatatccttgcccccacgagaccctcgcacagtcgcacctctccgacgtgaccggcgccgtagaaccaccgggtcttcccttgtgggattattcaagaacatggagagaaagagaaaccccattgtctttttggatgtatctgtaggtgatgagccagatgaaagaatgatatttgagttgttcgctgatgttgcaccccttgtgactgagaacttcagagctttatgcacaggtgagctgggaattggacacaagactaagaagccattatg

SEQ ID NO: 109939 - DNA, 570 bp, Zea mays
  Clone ID: MRT4577_31762C.1
gtctacagcacggcactactcctccctctaccttctgatgtcactacaccggccgcaaagccaccagctgcgtatatcttcagaggcccgttggcgctccctcctgggctgctgttcaacttcacataattggacccataataacgatcgaaaatttgcactccattctatcacttgattgagtctccccaaatacaaacaactggtaaagtatcatacattctaaaagttacagacgccttattatgctcgtgatcaaatatagtgcaccggaaccacatttgcaactctcgccgtcgactaatcatctacccatcatagaacctacgcaggcacgcaccgtcacgtctaagctctaggcctataccatattaccacaacattaaaggaaatatccttcacttcaaaaagcatttccttcagaacatgatgataatgtactcagggtatattttaaatgcttacacaagcttaaatatatttggccatcataaacacattaccaaacttttaattttcttggataaaccacaatttattaatatcttgcattaaaattatccacataaa

SEQ ID NO: 109940 - DNA, 384 bp, Zea mays
  Clone ID: MRT4577_31763C.1
cgatagcggaagaaacaagaggctgctgctgcttcttccgttgcaacttgcatgtgaggcgaggccgtgagagaagcgcgagccatgtctatcgcactgcatagcgggcgcggggtgggcggcggcggcgcccctcggttcggccacgtcgcccgctgcggctacgcggcctcgccgccggcggtggcggggcgcggcggttcgtccttggtgggacggtacagcgacagccccgctgcggcggcgcagtgggagtgggacggcgaggaggtcgagggcggcgactgcgaggtgcaaagcttatacaagggctccgttttcgacaccatggacgcgctccatgaggccctgccctccaagaaaggggtatgcaagttttataat

SEQ ID NO: 109941 - DNA, 701 bp, Zea mays
  Clone ID: MRT4577_31764C.1
cgaagccgagatccaggccaggccaagcacgacgccgccggcagtcgaaaataacattcacctagccgcaccgtgacatggccactccgacggcagccgccgacaccgccgccgccccgctgactccagttgccccggagcccgcggcgaaagtctctcttgccccttctgatatggttgctccgaccgcagcagccgacacctccgccccgccgccgcctgcaccagtccctccgaccgcagccgccgacaccgccgcgccgccgccgccagctccagccccttcaaccgcagcagccgacaccgccgctccgccaccacctcctcctccaataacgacggagcctgcggccaaggtctctcatagtccttaccacatggccgccccgacggcaaccgccgagaccgtcggtcggccaattcctcctcctccagccccggaaatcgcggccaaggtctcccatttcccccctccttttcctcctcagcccgatgcgcctgcgccgaaaaggcggaagctggaggaggcggggttccacacttccgcctactacaagatccgggccgccgttgccgacctccgcctccgcttcgtccaggttcacgaagctactgattttcggaagagcgatgctgctcgcgagattctgagagagataaagacagttatggaactctccaagaaaatgaggcttgatctc

SEQ ID NO: 109942 - DNA, 295 bp, Zea mays
  Clone ID: MRT4577_31765C.1
gacgcatatattgttttttttttttttttataaaatttattttatatatattgtttataaaaaactttctttttatatttaatttatgggaagatacaaatatttttttacgtgaaaaaaaaaaaactcaaaaataggggaaccaaaaaacgcatgtgcatacgagaacacgagtgcgaaaaaaaaatatactgctacgctataattgtatacggtgttaccttgacaaggcccgatgagccttacatcaaaaataaaaaaggatggaaaaaaaatcttgagacctctagcaaga

SEQ ID NO: 109943 - DNA, 300 bp, Zea mays
  Clone ID: MRT4577_31766C.1
atggatgattttgtccaaggtgtagtcgacgacagaggtgacaatgatgaggatcttggtgagccgtccttggtgaaccttgagaatgcacagttatttaaagattttattaaccgcctcaacaatgatgaccttctatttggaagcccatatgactgcatggttcacatagtggagtttgaatatcgatatggagtgaaatataatttgcagcaacacgaatacattgtgtacatcacaattcatggtatggtcaggggtggagccaagggggggcaggcaggggccttggccccctaa

SEQ ID NO: 109944 - DNA, 383 bp, Zea mays
  unsure (1)..(383): unsure at all n locations
  Clone ID: MRT4577_31767C.1
ccaggatcaaaacccattaaaaatacccgggggaaaaacaagaaccccggccccaaacaggaaatcaggattaaaaagggggtcaatttccctaacaagggaaggacggacaaaagcggcggaacacaggggcacaggggacagaaaaccaaagaacacccaaattaaaggggccattaacttttcttttggccaagggggctagcaaaccaaagcggggcacaccccctaaaaacccattaaggaagtttggtttccctctccgggccaaaaagggaaccctttgggggtcccnccccccgggcccgccttttttggaacccggcccccggtgcgggggggggtcccnccccccgggggggncggtttgggggggccccccc

SEQ ID NO: 109945 - DNA, 1333 bp, Zea mays
  Clone ID: MRT4577_31768C.1
cctcgaggccggccgggattattctccccttgttcgcctcccggccggcccccgccgccgctcgcccctcgcccctctcaaacctccgcgctcccgcccagctagggtttccccgatctcccctcctcctcaaccgccgccgtctccgagagcgccgccacgatgttggagctgcggcttgtgcaggggagcctcctcaagaaggtcctggaggcgatccgcgagctggtcaacgacgccaacttcgactgctccggcaccgggttctcgctgcaggccatggactcgagccacgtcgccctcgtcgcgctgctcctccgcgccgaggggttcgagcactaccgctgcgaccgcaacctctccatgggcatgaacctcaacaacatggccaagatgctccggtgcgccggtaacgacgacatcatcaccatcaaggccgatgacggttccgacaccgtcaccttcatgttcgagtcgcccaagcaagataagattgcggatttcgagatgaaactgatggatattgatagcgagcacctcggaatcccggattccgagtaccaggccatcgtccgcatgccttcttctgagtttatgaggatctgcaaagatcttagcagcatcggagacacagtcgtcatctcggtgactaaggagggcgtgaagttctccacatctggagaaattgggagtgcaaacattgtctgcaggcagaaccaaactattgacaagccagaagaggctaccattatagagatgcaggagccggtttccctgacctttgccctgcggtacatgaactccttcaccaaggcgtcttcactgtctgagcaagtcactatcagcctgtcgtccgagcttccagtggtggtcgagtacaagatcgctgagatgggttacattagattttacctggcccccaagatcgacgatgacgaggagatgaagccctgatggcctgtgacgacataatgctcgtgttgcctgctcttccttccagccgttgtttgcttagctactctttgcaagcgaagaagggatgtgatgtgtatctcttaggctagactgcttcagctagttttctgtgactgctgcatgaatccatggattactgatttagtgggcttgtgctttgtgtatgatgctgccatctggtctcccaacaaagaagggatgtggtgtgtatctcttaggcctggttttcttttttcttggcataagtgtcatcattcatcaagttctccttgtggcggtggcaaggaagttgaaaaagctgaacgtgatgtgtttgctgcccaaaaaaaaaaaaaaaaaaacccaaacaacccccccc

SEQ ID NO: 109946 - DNA, 768 bp, Zea mays
  Clone ID: MRT4577_31769C.1
ccggccgggccgggagactccccttcgtccctttctctctcttcacactcgcctcgccattaaagctccaaaaaagaaaaaaaggctgcgaaaaaaatcatcttctcttctcctaaaatcttccacctttaaccgtccctgtccgcgaatttctagatgccccgatcgcttccgattttttcctggatttctccgattttttgaagtatttttccttggggacggtttcattgccattcctcgacggggttagggtttgcggggatgagggtgcacggcgaggtgtcggacgatgaggcggccgtggctgtggttggggaaacggtgccctcctcgccgcctcccgcctccgtggtgcagccgctggtggtggggtacgccctcaccaagaagaaagtcaagagcttcctgcagcccaagctgctcgcgctggccaggaagaaaggcattcatttcgtatcaattgatgagacttgccccctctctgaacaaggtccatttgacatcattttgcacaaggactatcgtgaagagcatccagaagtgactgtcctcgacccaccaaatgctatccaacatttgcacaatcgccaatcaatgctacaagaagttgctgatttgaacctgtccaatggttatggagaggtttgcgctccacgacaactagtcatcatgaaagatccgtcttccatacctgatgcagttgccaaggctggactaaccttgccttttggttgccaaaccattggtcgctgatgggacatcaaa

SEQ ID NO: 109947 - DNA, 414 bp, Zea mays
  Clone ID: MRT4577_3176C.1
aattcggcacgagggctgtgttgcactgctaggtagccagctcgtttcctcccccaacccaaatgggcgactccaccgccaccaacccctcctcgccgaccgcagccatggatcccgactccgaggtcgtcttcgacttcccgccctacctctgccagtacaagagcggccggatccacccgccccggcggcgcccccaccgtcccagctggcacggacccagccccggcgtcgtgtccaaggacatccgcgccggccccgcctccgcgcgagtctacctccctcccggcgcgccggcaagatcccggtggtcgtctacttccacggcggcgggttcgtggtcggctcgccggcgcggccgggcacgcacaactacctcaactgcctggtcgcccggtggggcgccgtgggggg

SEQ ID NO: 109948 - DNA, 172 bp, Zea mays
  Clone ID: MRT4577_31770C.1
ctcgcttcaagctcatcatctcgcacagtggcagtcgcctgagatcacagcgacaatagtgaaggcagtagctgtcctcgccggcactgatgtcaagggcaccatcttcttttcacatgaggaggatggtccgaccaccgtgactggaagtatctctgacctcaagccaggg

SEQ ID NO: 109949 - DNA, 265 bp, Zea mays
  Clone ID: MRT4577_31771C.1
caggtacctatctagaattgccgggccgacccacgaatcagcccacgcgtccgcccacgcgtccgcccacgcgtccggggagcaataccatagcccccggaaactgctgctcgccatgatcgctgaagtccgagagctgtcaaagctgttcatgtggaaaggggaggtgctcacgggcctcacggactgagacgatgagggcaacgagcatctcgactatgagctctccgacgtgctgctctatctggaccgcctctccgacatg

SEQ ID NO: 109950 - DNA, 625 bp, Zea mays
  Clone ID: MRT4577_31772C.1
acaggttgatcgttggagagtacacatgaacggccggcccttttttttttttttttttactcactgcattaatatatatagcggtgtaaacaggttgatcgttggagagtacacatgaatcaacaacccaagacacacacacacactctcccaactggcgactcgcgtgcgtgaagcgatcaaaacacacccaagatgaaaatactggtaaaattcaagtacaagaagcgatgaactggtatatattattatgtatcactccgggaccgggggcggcaacacgcgcgcggccggccctgcagccggaggagctcagctgaagaggtacccaacggcggccacagcgagcgtgccggcagcgagcgccgggccggtgacggcggcggcggcggccccggtggagctggcgggggatgggcccggtgcctcggacgcggtggccacgccgacgagcgacgaggccacgacggcggcggtggcggccgcggcgaggatcctgagcctgagggtggccgccatctcgctagctagctaccttctcggtcggtgctcgagagatggaggggaggagaggaggagcaggaagctagcgagccgggccgtgtgccatcccggcccggccggc

SEQ ID NO: 109951 - DNA, 1698 bp, Zea mays
  Clone ID: MRT4577_31773C.1
atgggtacctcgagccggccgggctctagactccccttcgtccctttctctctcttcacactcgcctcgccattaaagctccaaaaaagaaaaaaaggctgcgaaaaaaatcatcttctcttctcctaaaatcttccacctttaaccgtccctgtccgcgaatttctagatgccccgatcgcttccgattttttcctggatttctccgattttttgaagtatttttccttggggacggtttcattgccattcctcgacggggttagggtttgcggggatgagggtgcacggcgaggtgtcggacgatgaggcggccgtggctgtggttggggaaacggtgccctcctcgccgcctcccgcctccgtggtgcagccgctggtggtggggtacgccctcaccaagaagaaagtcaagagcttcctgcagcccaagctgctcgcgctggccaggaagaaaggcattcatttcgtatcaattgatgagacttgccccctctctgaacaaggtccatttgacatcattttgcacaagcttactagtaaggagtggcagcaagttttggaggactatcgtgaagagcatccagaagtgactgtcctcgacccaccaaatgctatccaacatttgcacaatcgccaatcaatgctacaagaagttgctgatttgaacctgtccaatggttatggagaggtttgcgctccacgacaactagtcatcatgaaagatccgtcttccatacctgatgcagttgccaaggctggactaaccttgcctttggttgccaaaccattggtcgctgatggtacatcaaaatctcatgagctatcccttgcatatgtggaagcatcattgcctttgcttgaccctcctttggttctccaggaattgtcaatcatggtgggatcctatttaaggtatatattgttggtgaaacaatacaggtagtccgcaggttttcacttcctgatgttaatacatatgacctgggaaacaatgacggtatctttcgattcccaagagtttcttgtgctacaaataatgcagaagatgcagatgttgacccttgtattgcagaacttcctccaaagccacttcttgagaaacttggccgggagcttcgacgccggctgggtcttagactgtttaacatagatatgattagagaacatggaagaaaggaccggtactatgtcattgacatcaactattttcctggatatggcaagatgccaggatatgagcacatattcactgacttcctgctaagcctcgtgcaaagcaagtacaagaggctaagtgggagctgaagcgtagagaagatttactttcgatggagactattaacagatgccagctagcctggccatataacagtggggctgctagaaaggtcttccaggttgtacatagcaagggggtgggtcttagcatgaatgcggtgtttgggccggggccttgactgaaggcgcatagcagaactaagataaaaaatgcagtgtttgggccggggcagtatctgaagaaaggttttggctccgtgcccagcctactgtgtaattcgtttgaccgagtggccgacctgtgtaaatcgttttaccgagtgccgacctgggcttctttagtttcaaaaacaaacaaacaaaacctttgcttcgttttcgcaaaaaaaaaagaaaaaaaaaaaaaaaaaagcggcc

SEQ ID NO: 109952 - DNA, 278 bp, Zea mays
  Clone ID: MRT4577_31774C.1
aatgcagaagatacggattgttgacccgtgtattgcagaacttcctccaaagccacttcttgagaaacttggccgggagcttcgacgccggctggtactgagtaaagtccttcatattagccctatgcatttcttgacattgattaactcatctgacccagtaaaatttatcagggtcttagactgtttaacatagatatgattagagaacatggaagaaaggaccggtactatgtcattgacatcaactattttcctggtcagttatccttttcaat

SEQ ID NO: 109953 - DNA, 284 bp, Zea mays
  unsure (1)..(284): unsure at all n locations
  Clone ID: MRT4577_31775C.1
tcggggttttccaaccacagccaacacaggcgcagcgttcatttttagaggagaagcgagcgcccgaaccaaangggggccgnccccgcccgcacaccatggctacgccgaggtggtggccgtccctgctgccggcatggctgagccccagcccgctatggacacacaccgccaacccgggcctcgacgcggtcgccatattgtacaggcgcccgccgctgacgatgccgtcaacccgacaccgccgtcgcaacagcggcgccaccgacaggctcacgcggaga

SEQ ID NO: 109954 - DNA, 271 bp, Zea mays
  Clone ID: MRT4577_31776C.1
agagcgccgcggggtccatggggagggagcaacgacgcggaggggggggtggatagggacgtgtctgggagaagggaacgccgggtaggagccgggagcccatcccgtcggagcccagggggcgggggcggcggccttccctccctctcccgtgatctcgtgcaccagcttcacctccgccgaggcgtgcatgggtaccgcgccggggcggcgctccttgccgatctcctcctcacttatcctgggtcactggggactctctctctctccc

SEQ ID NO: 109955 - DNA, 385 bp, Zea mays
  Clone ID: MRT4577_31777C.1
gccattaatcccgggtcaccttcaccttcaccttcatcagggtaatataaggggattaaaaccccggggcgccggccaggggaccaccccaacccataccctttttttttcggcacaacaagaaaacacccaacgcgacgccactggagccacagccacagggggcgcacgggacgcgtttaccacgcacgcccacaccaaaccaaaaaacacataccagccgttttacaccattgtttgggcggtccgtccgggcgtagtgcacgtggaaacaacgcttacaggaactgcatgagggggcgcgcgggcttttttttgcccaggcccacaagcgaggggttttcaacaagcgggccccaaagcgtgccctcgggctttatgtggt

SEQ ID NO: 109956 - DNA, 474 bp, Zea mays
  unsure (1)..(474): unsure at all n locations
  Clone ID: MRT4577_31778C.1
gcttggccctggacctttggtctgatttatgtgcttgtttatgtgcttgagtaaattaacaaagcacgagagggggagagatatagaggttctatcgtatatatcgctccgctctctagctttagagtccctccggactgtgaggaacttatcggaaaccccgtaaccgcagcagagaatcgcactgcttgatgaaggcgtacggcgccggttacgggctatggtagggaatagagatgagtaggctggtgtctcttttttagtctaccgacttcgcttctgtcacaaggcagcttcgtggcggttcttgaaccctatctgactgaatatgatacgaagtggttatgtggtgttagctttttctcggtcgtgacgattaacttgaatgacgacggccatggtgcggctgggacggaggtggatgtagatgtggatgtggatgangagacgacggtgcgtggtggtggtngggag

SEQ ID NO: 109957 - DNA, 334 bp, Zea mays
  unsure (1)..(334): unsure at all n locations
  Clone ID: MRT4577_31779C.1
ggtcgcatcattggtcatcgagncaggctcgcgtactgcggctaaaggtgcgcgtccagagataatcaactggtaatttagctaggctatgaaatcatcctgtgagttatgacctccataataaccctgcatttcccattaatctacatatcttgccacagcagctgtgctcagggatacccacatgggagaaatcccaggagatgttgcttactctttttgcccacactgctttggatacttatctactgtccgaaggccttctatccccactcaattcttcctgccctgtgattagttaagatatcttcagctagtagtcagacacaatcag

SEQ ID NO: 109958 - DNA, 321 bp, Zea mays
  Clone ID: MRT4577_3177C.1
caacttcacatataacaaaggatattatcacataactgtgggatcgtagacaacatgatagtgtagagaagagtttattttagctaagattggctctattaaatggctataatgacattgatgtgggtatattttacttatgggcagaccgatttgaataggtccaacccgatcctgtctacaagaattcaaggggtagaggtttttattcattagtatacccgcgggtagagaaatgatcccatacccgcctttatataggatcccgcgggtatttggattttaggcatccattgccatctttaatgcgccctatcaatg

SEQ ID NO: 109959 - DNA, 357 bp, Zea mays
  Clone ID: MRT4577_31780C.1
cctaaaccttttcccccaaataattttgttaaaaattttcccccccccaggttaattttattcaaaattttgccccacacaggcagagggatgatgcttatttttgcataaccctaacaacccattttttttttttaaggggaccaccaccacactttgtgctacaccttttcgtaaacccagccaccttccttgaaaccttttgagctacaaaacaaacggcagttctggtggtcctcggaaaagaacaaaaggtatggcctttttggccgggggggagactttttggtttccccgaaaccaccgccgcctttttctcttgaagaccgccaggacaaaatggcaacagccaacaaa

SEQ ID NO: 109960 - DNA, 429 bp, Zea mays
  Clone ID: MRT4577_31781C.1
ccggccgggagactgacattttcctcaatacagcacctgcgctcaccttcactggctagctcacctgccgcacccatggcctgaatatctgctacatgctatcgccctatctccaacaacatacacaaatttcacccactgtcgcgcggcttctgattccacgatcaggaactaccaccaccacatgaaaagcgacccggcccacgacccctcttactgtgtgcaccatactgcttggcacaaggataatgtgtcctgtgaggcgttcgatgctgcccgcattgcgctgcctcagtacatggccaagtctgcaggactacatggcatacatcttagaacacaaggtcaccgcgtacatgaacgtgacatctgacagatgcttgcctgctgcgtccatgactggctccaagactgcaatgatgggaggct

SEQ ID NO: 109961 - DNA, 1188 bp, Zea mays
  Clone ID: MRT4577_31782C.1
aagcaaacacgctgcacatttcagttcagacggtccaagaacagcaccaagaaagactccttgccgctcttcttgcttggctactgactaggagagctccctgccgctggttgatcaacagaggcaggcggacggcatggtcagctctatgccgctgtcctcgctgctgctgctgctctccgcagccagcttcggcggcggcgtaaggctcggcgatggtggctacgaggactggaggctcggcaccgccacctacgtcaaggagttccagtcacaccctctcaatgacggcggtggcgcctgcgggtacggcgacctggacatcttcaggtacgggcgctacacgacggggctgagcgcggcgctgttcgggcgcggcggcgcctgcggcggctgctacgagctgcggtgcgtcaaccacatccagtggtgcctccggggcagccccacggtggtggtgacggcgacggacttctgcccggccaacatgggcctcgccgacgacgacgccggcggctggtgcaacttcccgcgggagcacctcgagctgtcggaggccgcgttcctccgcgtcgccaaggccaaggccggcatcgtgccggtgcagttccggagggtgagctgcgacagggcgggcggcatgcggttcaccatcaccggcagcgcccacttcctgcaggtgctcatcaccaacgtggcggcggacggcgaggtggcggccgtgaaggtgaagggctcgaggacggggtggatcccgatggggcggaactggggccagaactggcagtgcgacgccgacctccgcgcccagccgctgtcgttcgaggtcaccggcgggcggggcaggacggtcaccgcctacagcgtggcgccggcggactggatgttcgcgcagacgttcgagggcaagcagttcgccgagtagagatcgacgccgaaaaccaagtctccggcggtggtgatgtaagtagaattatacgggtggcttcttgctcgcgagtcgtgaccggtgactcgacaaaacgagacgtattgaatggcgaaaggatttccagtcataagaaagtggcagtccaaatagacgttataagggatcgagtgtaccggtaagagatcgacgccgaaaaccaagtctccggcggtggtgatgtaagtagaattatacgggtggcttcttgctcgcgagtc

SEQ ID NO: 109962 - DNA, 1244 bp, Zea mays
  Clone ID: MRT4577_31783C.1
ctcgaggccggccgggccgggctctgccccgctctgtcatctttgactgcccctgtccggtctcctcccctccatcccactccactccacgccacccccacaccccaccggccaagcaaacacgctgcacatttcagttcagacagtccaagaacagcaccaagaaagactccttgccgctcttcttgcttggctactgactaggagagctccctgccgctggttgatcaacagagaggcaggcggacggcatggcgagctccatgccgctgtcctcgctgctgctgctgctgctctccgcagccagcttcggcggcggcgtaaggctcggcgatggtggctacgaggactggaggctcggcaccgccacctacgtcaaggagttccagtcacaccctctcaatgacgcggttggttcctgcatgcaggcggtggcgcctgcgggtacggcgacctggacatcttcaggtacgggcgctacacgacggggctgagcgcggcgctgttcgggcgcggcggcgcctgcggcggctgctacgagctgcggtgcgtcaaccacatccagtggtgcctccggggcagccccacggtggtggtgacggcgacggacttctgcccggccaacatgggcctcgccgacgacgacgccggcggctggtgcaacttcccgcgggagcacctcgagctgtcggaggccgcgttcctccgcgtcgccaaggccaaggccggcatcgtgccggtgcagttccggagttggcatatggatatggtggtggccatgcagggtgagctgcgacagggcgggcggcatgcggttcaccatcaccggtagcgcccacttcctgcaggtgctcatcaccaacgtggcggcggacggcgaggtggcggccgtgaaggtgaagggctcgaggacggggtggatcccgatggggcggaactggggccagaactggcagtgcgacgccgacctccgcgcccagccgctgtcgttcgaggtcaccggcgggaggggcaggacggtcaccgcctacagcgtggcgccggcggactggatgttcgcgcagacgttcgagggcaagcagttcgccgagtagagatcgacgccgaaaaccaagtctccggcggtggtgatgtaagtagaattatacgggtggcttcttgctcgcgagtcgtgaccggtgactcgacaaaacgagacgtattgaatggcgaaaggatttccagtcataagaaagtggcagtcc

SEQ ID NO: 109963 - DNA, 289 bp, Zea mays
  unsure (1)..(289): unsure at all n locations
  Clone ID: MRT4577_31784C.1
tctttgcaagtttgaaaattctcaggacggggggggaaatgcccccttcgctttcgaccgccggcgtctcaccgagcgtcgctggcgccgccactactggngtccgccctgctcatggatagcgtgaagnagaggaggatcagcgttcccacgctggacagcgtggcgaagaggaggaccaccctccggggatcgagccacggcgccggccgcctgccgaaccgccgggacttgcttccgggcgtgccggccagcggcgtgtggacgaccagccgcgcgctgccgggcg

SEQ ID NO: 109964 - DNA, 1853 bp, Zea mays
  Clone ID: MRT4577_31785C.1
aacacgcgcaattgctgctgagctacttactacacacaccgcagcggtgcacaccacgtccacagtccacacgcgcgcgcctaggcctagcgatggagtgacaagcatcgggttgcttccggcgatggccattgccaaccccgccccccgtctccttcgtcatgcgtacaagacatccccacatcaccccctcctccaccacctcctcgccgcaccgcaaaatccacctccccttcccggccctgcattgcatccgttcttcttgcttgcttccccggaacctcgcgcttggtctgacgcaacgcaacgcgccttcgggccctgagataaaatctcccagcgctcgcttgctccgccaaaattcactccttggaatttcctgagctgtgggaaaatttctcttttgttttggttcttctttgtccccttaggtcgctagcatttgtgcgttccgccgaagctcccttgtttgatccgtcctagttgcggaagcgcctcttgatttggttctaaaatacatcgtttcttgttttcatccttccgaagggggggaaatcatcttttttgggccctgatttgagtgtgtcacctttggttccggcaatggggaacagcagcagcagcaacagacgtccgccggggccctcggagccggcggaagagctgagctcatacgaggccgcgtgccggtcggacccggagctgcgcaccttcgacacgacgctgcagcggcgcaccagccgcgccatctcgacgctggccgtgggcgtcgaggtgcggtcgatgtcgctggactcgctccgcgaggtcaccggctgcctcctcgacatgaaccaggaggtggtgcgcgtcatcctcgactgcaagaaggacatctggaagagccccgagctgttcgacctcgtcgaggactacttcgagagcagcctgcagaccctcgatttctgtaccgcactcgacaagtgcctcaagcgcgcccgcgactcccagctcctcctccacgtcgcgctccagcgcttcgacgacgaggaagacatcgacgccgccgccgctgctccctccgcccggtacgcgcgcacgctgcacgagctgcgccagttcaagacggccggggaccccttcacggacgagttcttcgccgcgttccaggccgtttaccggcagcagctggcaatgctggagaagctgcagcagcgcaagcaccggctcgacaagaaggtcaagaccatcaaggcgtggcgccgggtgtcaagcatcatcttcgcgaccacgttcgcggccgtgctcatctgctccgttgttgccgcggccatcgccgccccgcctgtggccgcggcattggccgcggctgctgcagtccctctggggtctatggggaagtggatcgattcgttgctgaaagggtatcaggacgcgctccgcggacagaaggaggtggtgagcacaatgcaggttggcacattcattgccatcaaggatttggacagtatcagagtcctcatcaaccgggtggagctggagatcagctcaatggtagactgcgtagagtttgcagagcgggatgaggaggcggtgaaatttggggtggaggagatcaagaagaagctggagaacttcatgaagagtgttgaagatctaggagagcaagcagaccggtgtagccgggatatccgtcgtgcaaggaccgttgttctgcaaagaatcatccgacatccaaactgaaaaataaagggaaatgtaaggtatggatgtcttaatatatagccatgttactcttaataatgttgtgatggaatgtacataagagatgcacctttaggaaagtgtgaatgagtcaaatcgatttcattatc

SEQ ID NO: 109965 - DNA, 186 bp, Zea mays
  Clone ID: MRT4577_31786C.1
aaattagactgtaacaacctttgcatcgcttcaaaacagacgattctgaaggaagccccaaggggcaccacatttttagaatgaaaatccgcctcccgaaagtcatatacattatgtggtgggaaggcacattaatttataaatccgatatatccgacatgttcccctatagggtctcacaacccg

SEQ ID NO: 109966 - DNA, 393 bp, Zea mays
  Clone ID: MRT4577_31787C.1
tcgtcctctcgtctagctttctgacagcggagggccacttcatacactagagtacgtatattatcatctgatgggaaccaagggcagtttcatggatggctatttcgatccgggcccacatataactggcagtgataccatggaaaggttttctgaaacaggacacagggacttcaccgaagggtgcccagtggtttgctctaacactaacgcatgctttattgattctggcaaacaaccttcactacaacaagttcaagctggactgcaagccaccagaaggactcgactgtatggctgatgagcattatttgccaacccttgttaatatggctgaccctgggggaacaactgacatggcaatgactgaagttgatcggttcgagggaaaat

SEQ ID NO: 109967 - DNA, 237 bp, Zea mays
  Clone ID: MRT4577_31788C.1
cgggccgacccactcgtccggctctaccaagatcccattcacctttgttttccatggacgacttcaacatcaactggaggggctccaacaacaagaccatggccgtatgcaataacgctaatggcaactccaaagtttacctcaatgaactcgcatgcttttaaaaccaccatcgacccatctctctagatatacaatgtgttttgttgattagatgctaatagattctttctcaaa

SEQ ID NO: 109968 - DNA, 1149 bp, Zea mays
  Clone ID: MRT4577_31789C.1
aaataacaatttttctttctgcgagatcagtaacggttcatctggaaccaaactgccagcgcgacagcagcaaaattacagaaaccttagcgttcgtttacattacgccaaaggcatgcagaagcagaacaaactagagactccggtagagttgtagaaccgtgtcatctcatgtagtgtctgtcgacatatcttgcatgctttacttaactcacaagatctgatccatctcagcaaggactaataataaggtaattaatgtgccatgcatgacatgaatgattactagtacttaatcagactgccgcgatgccccattatcaataatccgagctgagctgtgtggtgagctgccagcctctggaaatggaacaggggagcttagctagctagctagctagggaagaaggccctctgcatgcatgctgcgctggccgatggagaagttcgttggtcggatagatcacaccttgatctcttcctcggcgggcggcttcgggcgctcggacttcttgctcgacatgatgctgttgaagttctctgatttgcacagcaggatctcgatcttggctttacggacaagccggcccttcgcctcatccttggtgccgatggttgatgtgaggatcttcttttcagtggcgaggccattgttcttgaggatctcagcgacggtcaccacggtaccaatggccatccccagagcggagagctcaacctcgtcgtagttctgcatgtacctcttggcgagattgacgtagaaatagagcggcttcttgttggtggacacctggatacggttcttcttcgcagacgatgcaccggcctccgcctccacctcgacctcctcctcgacctcgacctctgcctccgcctcgccttcagtctctgtctccgtctccgcctccgcctccacctcctcccctacaaccgccacgtctttctcctcaggcaccgcctcctcctcgtcgtgcgccttcgccacctccctcttcacctcgtccgcctccgccctcaccgcctgctcctgtgcctccccctccgcggccggacgcatcgcctgcatggtggtgtctgagactcacttgctgcctcggtcgtgcggttcgatcatgcgccagagatggccgatggagagaggaccggacg

SEQ ID NO: 109969 - DNA, 589 bp, Zea mays
  Clone ID: MRT4577_3178C.1
ctcgaggctttggccgggatcgcacaacacgccgctcccggacacgaaaggcaaacctaccaccatcacgaccagccaggaacagacatgtgtgattagagctacggtcgcgatgcgaaagcacccatgctatccagtagcaaaaccgtaggtgcagcccaccatgaagggcaaggctagacacctccaaaaaggacgagggcaggctcctgacgaccaggagcccacggaaagcgcaagagggcgggcgcgagcgccattgttaagcgaccgccctgcgctcttatcgtgctgatgtctgaatttaggcaggaacattaggcgctgtacactgacaacaagagcgtggcgaccgcgagcaaggcaccaggggaaaagtggcgagctatgtcatataaagagaagcatccatatgtggaccaagtctgctcagaagaagcaggactgtgaggagactagggcaaactgtcacaacaaggagagcacaagctcagagaatgctattactgaggatgatgatggttctaaggacatgttgaagactaggatggcatgactgacgagcaaaacgatgactaggaggaaacag

SEQ ID NO: 109970 - DNA, 401 bp, Zea mays
  Clone ID: MRT4577_31790C.1
aaatagaaagctgtgcccctgccggaccggcccattacagcgcccccaccgtcgatattcacaatggcataactcgacaatccgattgggcagaggcagtataaaagctgagaatctaagcccacctgagcaacaactgaccttacttaacaacttactcatgatatggacctaaaaaagtcagaggcttatccaaaaccaaaagaacgccgctgtaaaatctctagcgattctggaatctttactaagactaacgacgtaaatcgatgaaaccttaccctgccaagactaagctatgaacgactttagctcattgctagaatgcaatccgacactttctgggatcatggggaccattacacagctcttcctgagttccccagcaaggctgatgcacgaac

SEQ ID NO: 109971 - DNA, 743 bp, Zea mays
  unsure (1)..(743): unsure at all n locations
  Clone ID: MRT4577_31791C.1
ggggaccctcgagctgccggtttttgtctttaagctctacaactgttctcttgtttgctctacgtttagacacatgtgcaaagacatggttgcaggttcaactgttattcggccatggatccatctatttgtggagaaaaaaaacatggaaagattgatgaaggtgaattagaaagattgtccagggtcggttaggctctgttttctgtaactatagcaaaccgacctcattcgaagtgcccaacccaagttttgaagatttgaaataccaacctacaatactatttactatgtccacttttcgtgttcttcccttgcaaggaaagcccgtttgtatcttatcaaataaccttaatggctcatcgcggaagatccaaagccatgtctgagtatactaacatagatgagtacatattgaaccaaaactctctgaccgacctgagacaattggttcactttccagctaaagaattgaccagctattcatacaatgataggagaggggcaatacatgcatgcctcggactcttggttcgtgacctgcagacctggtgactcaatgagacagctgtcaccgcttcaccgggcctgccattcagctataatattaatttaattntcactgacaaattcaagtacttcaatgtatagcagtttgtaggaacagaaaatctttgtttggtattctggcaatgagtgtcaaatttgtagcatgtttgttgaggtttgtagcatatattttt

SEQ ID NO: 109972 - DNA, 910 bp, Zea mays
  unsure (1)..(910): unsure at all n locations
  Clone ID: MRT4577_31792C.1
agtggaagtaaagcggaggacttcanacttcagacagagtgacttcacccgcccggcgcgtccgtccaagcaaccaaagcaacaaccacagggcgatcgatatcgatcgcggcgttgctctgatcgccggcctagctattccagctgctgggctgcctctgaccggcgttcgacggcctgcttggggttaggatcggagctagagtctggggagggacgacagagatcggccggcggcggccatggcgtggatacggtcgctcttgtcgccgctcaagaagctctgggtccgcatgcattccgaccagaacaagaagaggggcatctacatcctgtacgaggacgtcaagtcgtgcccctgcgaggacgtgcagatcctctggtccatcctcgtcgagtcctcccacccgccgccgccgctgcgcctcaagcactgactccctccgaccaccgtccgtccgcccacgtcgagcacggcgcagtaacgtaccgacgggcgacggcgcgcgccagccggagcatcagcaggcgactgattgttgcattggtccgaccgacacaacggaactgccggtgtatgtacataaagattttccagtggttcaccttcttcagccgtgatacgatcggcggttgaaaaaaagaagaagaaagagttccccctttatttgatccatccatggagatggtgtgcttaggagatgagctccttttgttcatcctgccccgtcctccagcagatcagaagcagagcagggcgtccgtccctcaccgacaccgcgaattcgaagcgagtttttttccttttcctttctcttttgctttcgtttttggaaaaggaacggcacggttggtgtcctggtgatcagggtcaatgggccgcgtgtgcctctgtctagcttgtaaatac

SEQ ID NO: 109973 - DNA, 341 bp, Zea mays
  Clone ID: MRT4577_31793C.1
atattttttttttttttttttttttttttttttttggtgttgttttttttgggggtgtttttttttagacaccgaatttgcttgtatttagtagtagaagacacatgaacatgaattgaaaacccagaaccaaagtgggccgggtgattgtaacagtagtcacttcactcttcggaaaggggggaaaggacctgcaatgcatgattgttgcgtttagaacataattttctaaaggctaaagcctctcccttaagcctggggaaaaaatgtatgcatgtttcgggaacttgggccggccttcgtgacggtctttgggggctctttgggggacaacgagaagc

SEQ ID NO: 109974 - DNA, 367 bp, Zea mays
  Clone ID: MRT4577_31794C.1
aaatgaacaccgtcctttttttccttaactcccgatttccacaaataagttggaggcgtgtcacatataattaactatccataacacaaattcccaataaatttaaggatcagctgcaaatctaggacaaataaaggacaaatccaaagaaaaacatctaactaagaactctaggctaacttgaggatgcgaatgaagcaataatccaatggcgggagggctccattaatcggaaaaagaacaccccctccacaatatgaacgaccctggcattatctgaaacactcttttcatagttcccttaacaatcctcggcacatgcattcaaatccagggtaaaaccaggtgactccatcccattctccaa

SEQ ID NO: 109975 - DNA, 497 bp, Zea mays
  Clone ID: MRT4577_31795C.1
ctcgagccggccgggaaaaaattccaaaaaaaactgatgtcgacctgagaccttccggcggctctcaagagggcgagcgagctccgcgccgacggcagccggggctggtggggccgataccgttcggcaaggagatgatgtggaggctgggcatgaagctgcgcatcggcggcaacgaggggttgcgcgtcggcggcaacaaggcctcgagggcgtcgttgcgctcggcggcgttgcggactgcgacggtgtgaggagccgcacgacgcagcacttggtttggagctatatatagtactgtagctagccgccgccgcggtgtggccacggtgacctcatcggcggcttccgccaggcgtaacgtcgctggtactcgtgtggagactggagactgttcgtatgtgacagtctacatttcataatttttggagtttggaattacctggtcatccctgacgctcttaaggtcctgtggctgcaacctggacacagcggcc

SEQ ID NO: 109976 - DNA, 640 bp, Zea mays
  unsure (1)..(640): unsure at all n locations
  Clone ID: MRT4577_31796C.1
ccggccgggcagagcagaaccgttcantagcaggttcctgcgcatatcaacggagctgctcccgcggtcgagcaaccctactaccagcatggacggcacccctcttacccaagccaagtctctaccggcactcctaacattccggagcgagccattcatgctcccgcgttccagccttacgcgcaacctggcttccagccacaagccttcgttccacagggctactattaccccccacaaaacggtgcccagccacagtacataccccctgccggcatggtgcccatgttcgttcctggcgctcagcaacccggctatgtcatgccagtgtctgctcctcctgtcgccgccccgccagctcctgctggtccacctaatatggttgcttacgagtccaacggtatgacctactacgtggactccaatcagctacaatacactgctccaccagtggaaaattatgctcagcccagctatgctgttccaggcatggggggcatgatgacccctggcccggacggcgcctactattacccccaacagatgcaggccccaacgttctacccnngcacatagacgactagaccatctcactcatctcacaatcgctctgattaacggttttgcatttcgacatggt

SEQ ID NO: 109977 - DNA, 382 bp, Zea mays
  Clone ID: MRT4577_31797C.1
tgaattcggcacgagggccgcggtgcaccgattttggcaaccaccgcaggcgaaaaaaaaagggcaaaacgaggccaccagctcaccgccgagcggaagcggcgccgaacaaccaacccctctcctcgagcgccgccgtctccccggaccatgtttttccccaccgtgctgaactatctggtgtagggtgactctcatgaatggctgaaagaccagggtgattcaggagcggcggggattactgactacgcccagtatcaattggttgacctagatgctgtggagctaccataagctggcctcactgtatcccagggaaagacctttgtttctggtcagagtgtaaatggagccagacatctattgaccacctcctggaaag

SEQ ID NO: 109978 - DNA, 826 bp, Zea mays
  unsure (1)..(826): unsure at all n locations
  Clone ID: MRT4577_31798C.1
ccggccgggaaaaaaaatcacttcaattacgattattccagataagcacgatccgatgatggccccaccgatatccgccgatgccttggtggaggctgcctcggccgtcgccgcgtacccagccatcgcgtcggcggcggtcggcagtggagacctcaggctctcggtgtcggacatgccgatgctatcgtgccactacatccagaaggggctgttcttcccgccgcctcctcccggcgtgctggcggcctcgctggtgtcgtcgctcgtggcggcgctctcccgcgcgctcggcgtcttccccgcgctcgccggccgcctcgtcacgctccacgacgacagcatcgtgataccgngtgcgngnncggcgacgacgccgccgtcgagttctaccacgcggtggcgccgtctctgtcgctcggcgacttcctggtgcccggcgccgacgtgccgacccgtttgacgaacggcctgttccccatggaccggacggtgagctacggcggccacggccgcccgctcacggcgttccagctcaccgtgctcggcgacggcgccgtgttcgtcggcttcgtcgccaaccacgccgtcgtggacggcacctccttctggcacttcttcaacacgtgnngcggngcctgtgccgcnggcgcgcccggtccggggagcccgacttccgccgcaacttcttcggcgactccaccgccgtcctacgcttccccggaggcgcgagccccgccgtgacgttcgacgccgacgcgccgctccgcgagcggatcctccacttcagtgctgccgcaatcaacgagctgaaagcgacggccca

SEQ ID NO: 109979 - DNA, 788 bp, Zea mays
  unsure (1)..(788): unsure at all n locations
  Clone ID: MRT4577_31799C.1
tccagnaaagcacgatccgatgatggccccaccgatatccgccgatgccttggtggaggctgcctcggccgtcgccgcgtacccagccatcgcgccgaacagaatgctttgcaaggacgcgccggcgccggccatctctgtcgtctcgaagcagacggtccggcccgccggcgcgtgggcggcggtcggcagtggagacctcaggctctcggtgtcggacatgccgatgctatcgtgccactacatccagaaggggctgttcttcccgccgcctcctcccggcgtgctggtggcggcgctctcccgcgcgctcggcgtcttccccgcgctcgccggccgcctcgtcacgctccacgacgacagcatcgtgatacggtgcggcggcgacgacgccgccgtcgagttctaccacgcggtggcgccgtctctgtcgctcggcgacttcctggtgcccggcgccgacgtgccgacccgtttgacgaacggcctgttccccatggaccggacggtgagctacggcggccacggccgcccgctcacggcgttccagctcaccgtgctcggcgacggcgccgtgttcgtcggcttcgtcgccaaccacgccgtcgtggacggcacctccttctggcacttcttcaacacgtgggcgccgcggcggagtgggaggccgcgccccgttgcttcccgctaggcaaccccgacggggcggccctcacgatggggagctcgcctcggttcccgatgtacgacgggaacgacttcgggtggggccgcgcgctcgccgtgcg

SEQ ID NO: 109980 - DNA, 211 bp, Zea mays
  Clone ID: MRT4577_3179C.1
gccccggtgggggaataaattgtgcattcacaattgacaaaggttttggctttgttaaattaaacagatgtcagatacagattattcccggggggggggatatttcaaagcaaaacaaacaaggcttgggtccaaatggacaggaaacaaaagagcagtacttctgggctttagaacgagggtgggcaacatccagaaaaagttgagggtg

SEQ ID NO: 109981 - DNA, 255 bp, Zea mays
  Clone ID: MRT4577_317C.1
ctccttcccccttgcgtgtgaaggtggattgctaagtgttatggggtatatacaacgccatctaaaataaagattgaatctgactagccttcaaatgtcaaaggggaagaatttcaaaaaaaaaaaaaaacacaagggataaagacacccaagggggggggggcaaaagggccgctcggcccaattgggaggctacccccccgggcatataaagggcgagcccttttaaagtgccagccaaacttaaagcaaggg

SEQ ID NO: 109982 - DNA, 608 bp, Zea mays
  unsure (1)..(608): unsure at all n locations
  Clone ID: MRT4577_31800C.1
gccggccggttcgggnaccttcaattacgattattccagataagcacgatccgatgatggccccaccgatatccgccgatgccttggtggaggctgcctcggccgtcgccgcgtacccagccatcgcgccgaacagaatgctttgcaaggacgcgccggcgccggccatctctgtcgtctcgaagcagacggtccggcccgccggcgcgtcggcggcggtcggcagtggagacctcaggctctcggtgtcggacatgccgatgctatcgtgccactacatccagaaggggctgttcttcccgatgtacgacgggaacgacttcgggtggggccgcgcgctcgccgtgcggagcggccgcgcgaacaaattcgacggcaagatgtcttcgttccccggacaggctggggacggtagcatcgacgtggaggtgtgcctcgcgccagacaccatggcgcatctcctcctcgacaaggagttcttgcagtacgtgtcctcccctgcaccgtgaggcggtgacagagtgaatgtgtggcttgttgctgcgcagctacatatagtaactggatttgtaccctttcaggaaaaaaaaaaaaaaaaaaggccccta

SEQ ID NO: 109983 - DNA, 1732 bp, Zea mays
  Clone ID: MRT4577_31801C.1
cattgggtacctcgaggccggccgggacacactcccactacgattattccagataagcacgatccgatgatggccccaccgatatccgccgatgccttggtggaggctgcctcggccgtcgccgcgtacccagccatcgcgccgaacagaatgctttgcaaggacgcgccggcgccggccatctctgtcgtctcgaagcagacggtccggcccgccggcgcgtcggcggcggtcggcagtggagacctcaggctctcggtgtcggacatgccgatgctatcgtgccactacatccagaaggggctgttcttcccgccgcctcctcccggcgtgctggcggcctcgctggtgtcgtcgctcgtggcggcgctctcccgcgcgctcggcgtcttccccgcgctcgccggccgcctcgtcacgctccacgacgacagcatcgtgatacggtgcggcggcgacgacgccgccgtcgagttctaccacgcggtggcgccgtctctgtcgctcggcgacttcctggtgcccggcgccgacgtgccgacccgtttgacgaacggcctgttccccatggaccggacggtgagctacggcggccacggccgcccgctcacggcgttccagctcaccgtgctcggcgacggcgccgtgttcgtcggcttcgtcgccaaccacgccgtcgtggacggcacctccttctggcacttcttcaacacgtgggcggggctgtgccgcggcgcgccggtccgggagcccgacttccgccgcaacttcttcggcgactccaccgccgtcctacgcttccccggaggcgcgagccccgccgtgacgttcgacgccgacgcgccgctccgcgagcggatcctccacttcagtgctgccgcaatcagcgagctgaaggcgacggccaaccgctcgaaaagagcaggtcaggaagccgaggctaacggcaagctcgcgcacgacgactccagacttgaagggcgttccggtgaaatctcgtcgtttcagtcgctgtgcgcgcacatctggagggcggtgacgcgcgcgcgccggctgctggctgccgacaagacgacgacgttccgcatggccgtgaactgccggcaccgtctgcgcccggcgatctccccgctctacttcggcaacgcgatccagagcgtggcgacgacggccaccgtagccgagctggcgtccaacgacctgggctgggcggccgcccggctgaacgccaccgtggcgtcgcacaaggacggcgcgatccggcgcgccgcggcggagtgggaggccgcgccccgttgcttcccgctaggcaaccccgacggggcggccctcacgatggggagctcgcctcggttcccgatgtacgacgggaacgacttcgggtggggccgcgcgctcgccgtgcggagcggccgcgcgaacaaattcgacggcaagatgtcttcgttccccggacaggctggggacggtagcatcgacgtggaggtgtgcctcgcgccagacaccatggcgcatctcctcctcgacaaggagttcttgcagtacgtgtcctcccctgcaccgtgaggcggtgacagagtgaatgtgtggcttgttgctgcgcagctacatatagtaactggatttgtaccctttcagcagatatcaagtgcttgccaactttaatgaaaaacacttatgcgcggacccccgattagtgaactcttggatatgggattaattccgggccggg

SEQ ID NO: 109984 - DNA, 1778 bp, Zea mays
  Clone ID: MRT4577_31802C.1
ccacgcgtccgaaacacgcatgaaggcccaacaattgtgacgtgggcattggcaaatggcgattgcatttttggtgctaaaccgcacgacccactcggccgggcgcattccataccccaccttgcgtacgcgagccgaacgctcgtgggtcctgcagcctccgtccccacctagggttccggcgatggcgcacggcggctacccgcgccgcggcgctgccgtacgcaggcccaagtcctcggcctctgccgcagttgccgaccgcaagcggaagcggaccgccgccgccgccaagaccacctcccttaagaaccagatccgctccaccgagcgcttcctccgcaaggaccttccggatgagattagggttgctcaagagaagaaactggaagaactgaagaggcaacaagagcttcagaatcaacttgttgtccagcggacattacagtttagagatagaaagataaaattctttgagagacggaagattgagaggatgataaggcgactcgagaagcaacaacgttcaaatggtgatggtgtcaacaataatctgtcaaaattgcgagaagatcttgaatatgttagattcttccctaagaatgagaaatatgtctcgctgttcactggagggaacagtcaagatattgttcaagagaggaataaatggcgcaaacagatcaaggagaatctcatggctgctgcagcaaacggaaaagatttagaagagacagcaagcgatgacgataccttggatgtgagtgatgatgacttctttatgtctggaagttcaagtgatgaagaggctgatgatgagtggactgacaagagtgctaaggaaccagcatccagtgcttcaggtagggcagcatctggcatgtcaagtgatgaaaagaaccagcgtcagagagatgctcgagttcttatgccgccaccacgctcattagccccaaatagaggcagacatgcagataaacgtgcgatatccagctcgagcagtacttcaaacagcacaagcggcgaatcatttaaaaatagaagagtaccaaatcgtcccggggataataacagtaatctgagctcaaattctgatgttcataaaccacggcgcaaaaggaggcataagaagaaaagaaagctgcaggcatgatgaatattcccaaagcgcgtgaactgtggggggtacggtggaaattcagattcccagcgaagtttggactttcagcatggccaatttggagaagttgaaaaaaaagaagacacagcatgtgcgatgtgtctgagcaagttgattgattctgtatcctcactcctaaatcctgatgtaaaacgactgtacatccatctgttcatggatatcacttgcggtaccgaatgcttgtccatcatttccgccgtgaaattatgtatgtttttttctctcccgatggcccgatgatgtgtataactttgcatccacaccataaacccttcttttgtgccactttttatggacatgtttcagaaaacataggatgaaccgtgtctgaaacttccgtgtatcctttttttttcaatcttcactatgggttccgagctcattcatcaccttatatggctacttctgcctaaactgtgaattgtttatccaattgtggtgccttggacactgctgtgaaatctatattttggtaaccatcaaatgaccaagctatcgaagtttatcaattgggttttatagagatcataagttcaccgccaaaaaaaatgcctaatatttaatctaaacaataatatta

SEQ ID NO: 109985 - DNA, 232 bp, Zea mays
  Clone ID: MRT4577_31803C.1
atctcactgctccacgctccagcgaaggcacacaaccgctgccgatgcttcatctgccaatcttcatcttcctcgcagagtaccttgctggcgaacaggacagagccgacggaggaccaacgacgcccccgtggtcggcagaatccagcccacggaggaggaggtgacggcgggaagggcccgggtgaccgaggatcatgaagaggagaggctgctgaacctgcagtgcgcg

SEQ ID NO: 109986 - DNA, 322 bp, Zea mays
  Clone ID: MRT4577_31804C.1
accccataaaaatggtgaaggtggaatcccatcccagtgcatccttaattatgctagttgccattcccactaatttgcggcggagtcgaaattgctagggatgagagagagagatgctccctcccacggacccaccctagcacctgcttccaataaactacagccggaaaagacaaagacggagccgtgtctcttgccgtggccatcctgtttttgccaggttatcagctgttaggattttgttttggatcagcgcccacgttaagaactcgcatctagttttctgcttttgctttccaaatcaaattgttgcggaatggca

SEQ ID NO: 109987 - DNA, 322 bp, Zea mays
  Clone ID: MRT4577_31805C.1
aaacaataaaaataaaaaaaaaaaaaaaaaaaacaaataccccaaatccctcaaaaaacaacgggcttaatacacacctggctgtgacgcactcctatccaatagatgaccgtacctcttctcaccaataacatcgtcaacaatcctttcattcagttcatgatgccccatctagacctatattaatgccttaaacaaatctttctcaccccaaacttatttgctcccacctcaggacgaagttcaatggataccccttgatccccaacattggttactgctatgacacactaaccaggcactttttccccaataagttcaa

SEQ ID NO: 109988 - DNA, 632 bp, Zea mays
  unsure (1)..(632): unsure at all n locations
  Clone ID: MRT4577_31806C.1
tttttttttttttttttccaataaaaggtcaaacatggagtcatacaattaatttgaatccatgtaaagggctcaaataaaacaaattccactcaactagtaactttcaggtactattccaacaagtgacatacgtatcttgttaacatcattatcacaacgatacactctgtacttgtcatttctaggcgggaacagccaacatatatccacattattcttattatagaaaatttcgtgaaactcatttttttaaatgtcacggtagaacttctgatgataaaatttagtacacagtaatgtgtgaaatcatcagccctccagcctgttcgctggggtttgggttaactaaaaannncaaccttttatnctatttatatctattcaataaactactactcaaccttatcttgagatgatgacgggagaaacattatcacgtcatcagcataaaaggatacatgatggtttacctgttgtgttattagattatcatgggatatgttgtgttattagacttatcatgggatatgtttatagctatacctattattgatactatcttctacaaacttggtcaaactttaacatatgatccaaaaatagctacagttgcatttttcgggaccaag

SEQ ID NO: 109989 - DNA, 438 bp, Zea mays
  Clone ID: MRT4577_31807C.1
cgggccgggcatcccatcgtccgtccatccatccattcttctacacacgcagttgcagcacatacagctagctagctcgctactgccctctgaactgatgtcaccacacaacgagaacgattttctcaagtaatcaaatgtgcgccggggcgcagagaaatctgacaagggtaataagtcagaggagggtgagaaatcgattttgggagagcattggccttggtttcgagactcccagggaagccagcgaggaggcctacattgacgagaaatgcccattcgctggaaccgtcgctatcagaaggaaaagtattgctccaacatgccgccgcggtggaatgttttgtatccatccgccggccgccgcaactacctccactttggtaaaaactaccagagggatgaaaagagccactccaaccgttgcaggtcacatct

SEQ ID NO: 109990 - DNA, 649 bp, Zea mays
  Clone ID: MRT4577_31808C.1
caagaaggttactctatttgagtaagataacattgctgcatacactgttggggccattacttcatgcatgaggctatctgcatatctaggtaccgaaccaacgcctttccttaaacagatgcacacatacatttatgaaacggattaacacacatgcatgcagtgactttgagaacaacgcactccaaacacaagaattgctggccaaactgagcgcatcattaactggggaggaacttgagattattggcatgctctacctcaaagccttgaaactcgaagtgcagctttttagctccaagctcgaccacctaacctgcggcaacctctacgtgaacaacgtaagagacacacttaaaaaggtcatcgtcttttttcagtccaagtacttgaagtccggctccgtcgtcacctttcacttcccggcaccgacctccgccttcccggaacccgcggcgaaggatcaccttcacgacccagggcaagggcgacgccagaatcgcggtaaagaacggaaacgtctccggaatgatccagacctggagcctcggcagcgactccgcgatgtcccccagcaccgtccgcagcctggtcaaccgtttcgccgcgctgctcgccgtcagcgcgtgatttataccggtcggcgggc

SEQ ID NO: 109991 - DNA, 552 bp, Zea mays
  unsure (1)..(552): unsure at all n locations
  Clone ID: MRT4577_31809C.1
cccacgccgtccgtngttttgtcttaccaggnatgctgagggaatgatcatgaaagttgtttcctagcgttatatcgcatgacaaagtggacccttctcttgtagaactctttcaagttgtcagcagttcatcatgtcattcaactcaatgagaattgtacagtacaagtattagctgcagactttggtaacttgcattgtagatggaaacggtccaatatatttatgctttgtacaaacacatgctataatgatgaagcaaaacatttttctatactgttctagcaagccatgttgtggtgttatgaacatgattgtgactcagttaatatgctcagtggtcgttgtctattttattttgtaatatgttttttttgggggggggggggtccgtcgtcttgttttctatacaaggaccaggctatggtctattttaaatgggtatcatggaaatgcagatcttggcaggtgtcctcttgttcttcttaagcttgacaataggttctctactaggctggcacatctatctattgtgtcataacatgacaaccc

SEQ ID NO: 109992 - DNA, 349 bp, Zea mays
  unsure (1)..(349): unsure at all n locations
  Clone ID: MRT4577_3180C.1
gccatagtactcgcctatctccgcgactcaaagcttgccccaattcccccccttctcccatttctcaccaccgccgccgctccccccgttcaacaacaccatgagggagtgcatgtcgggcctgacttgcgctgaccagtatccaggtcggaaacgcgtgctgagggctgcactgcctcgagcatggcattcaggctgatgggcagacgcccttgggccagaccatggcagcttcactggtgcagnacaacacccccttcagtgtgacctgcgctgcgaagcccgtcctgcctcttgctgccgcttctatggcccctgctgcctccactcatgtcaggcctgtctccta

SEQ ID NO: 109993 - DNA, 314 bp, Zea mays
  Clone ID: MRT4577_31810C.1
ggcgtggtccgagctaaccaacataacagcaagattactgtggcggacaagagaaaagaggggggccaagagcaaaacggtaacaagagctggcctaaaaggctggttaaggtaaactcgccaagcagagagttttaagccccaaacagaaaacagaggagcgaaaaccaaaggagcgtaaaaaaagggagccagactgtttagtatacacaaagagggcagctcaaatcgtaatgaatcgacaaagacctgctgaagcaccctgcccagtaaaaaaaaagtgttccgggctacactgggtcacaaaagggaaa

SEQ ID NO: 109994 - DNA, 758 bp, Zea mays
  Clone ID: MRT4577_31811C.1
aaaaaaaaaaaaaaaaaagaaacgatggtacctcgagccggccgggccgggtctttcgcgaacccgccgtcgcccactgcctcctctccttctacctcgcgcacccgccgccgcttgctgtctcctctctcgcgcgcaccggtgttcccatcgccgtctccttatctccctcgtgcagccgctgttgtctcctctccacccttgtacccgccgccgcctcctcttcagatttcctcttcttcaccctcgctgcctcctcttcaccctcgctacggcctcctcaaatcgttgagacaactagtacagttgagacaactggtgcgaggtcggacggcggggaccatgcgaacaagctcgttgctgccttctcggctcgtgcaccctcatctcaagaagtgaatcgcctcaggaggaggatgatgatgatgagttattttttgtgttagttccagctatatatgcttccctttattacagatgtgctgatccaattcagttttcagagtgatacacaagggattttcatcaacaggtggtcgccagaagaactgaaacatcaagatggcgtttgcttttaggtcatgccattcaggagatgatgttttattattatgcactgagactatgtttgacattggtcgtgtacactgagactgttttattatgagactatgttttattatgatgcactgagaactatgtttgtgtacactggagactatgttttattatgatgcactgagactgttttattaagc

SEQ ID NO: 109995 - DNA, 372 bp, Zea mays
  Clone ID: MRT4577_31812C.1
gcggcccatcaatcaaaagggttttttttgcacggggactacaataccggtggggaaaaccggaaaagcagcccggggaaagttcggcggggaacgggctaatccggggggcccctggggagacaagggcatccccccggccctggactccggcggggacggcctactacggcggccacggggctggctggcacccccctcggtgtagcccccgcccggggggcgggcctcaatcccgcacgggtggtacccggactggggttggggctgcagcgggtttccttcccgggcccggggcgcggggatccgatcgcttccggggggtgaagcccttggggggtgtttcttggggggccatgcttggaggggggg

SEQ ID NO: 109996 - DNA, 1125 bp, Zea mays
  unsure (1)..(1125): unsure at all n locations
  Clone ID: MRT4577_31813C.1
agcgggctttcgcccccggcctcgtaacgtcgggtaggttttccccgactcgactgcgcttctcttcgtctccttcgcgaacccgccgtcgcccactgcctcctctccttctacctcgcgcacccgccgccgcttgctgtctcctctctcgcgcgcaccggtgttcccatcgccgtctccttatctccctcgtgcagccgctgttgtctcctctccacccttgtacccgccgccgcctcctcttcagatttcctcttcttcaccctcgctgcctcctcttcaccctcgctacggcctcctcaaatcgttgagacaactagtacagttgagacaactggtgcgaggtcggacggcggggaccatgcgaacaagctcgttgctgccttctcggctcgtgcaccctcatctcaagaagtgaatcgcctcaggtatactaacaaatgggttctagaattgagttgataaagaaacatttgaaacaggaggaggatgatgatgatgagttattttttgtgttagttccagctatatatgcttccctttattacagatgtgctgatccaattcagttttcagagtgatacacaagggattttcatcaacaagtggtcgccagaagaactgaaacatcaagatggcgtttgcttttaggtcatgccattcaggagatgatgttttattattatgcactgagactatgtttgacattggtcgtgtacactgagactgttttattatgagactatgttttattatgatgcactgagactatgtttgtgtacactgagactatgttttattatgatgcactgagactgttttattaagcagtgtgaagttcacagctgctgttctcattttaatgcaattgtgttcaatgagcagggaagaaccaaatntgtgcaaaaagcatgggagggacaaaagacccggtgagatggggactgaccgaccccggcattgcagaacagcgagcggagagtcatggaaggaaagcgaagcaaagtcagattgctggggttcttgaggaatatttggattacaaaaggcaacataatgataagttgcttgatgtgggaaatcagattgatcaacaagctgagggaaagaacaagaaggaagaat

SEQ ID NO: 109997 - DNA, 113 bp, Zea mays
  Clone ID: MRT4577_31814C.1
accactagctgggcgtatgaattcctcttgtaattacagcaaggcagaagtgtagggaaccccagtgggcttaatccacttatcacctccaatgaattgtccaggtgtgaatt

SEQ ID NO: 109998 - DNA, 329 bp, Zea mays
  Clone ID: MRT4577_31815C.1
gaactatatcagggacgcggaaaagccgcacctgtagaggaggaaaactgagcaccaggggccatacttgaggagatacgattgattggacatagatgggagattgttacaaaactgttacctgatcagaaagtttgtcaggaagagagtcttgtattcgacatacggttactggtcttagtcattggaatttttcgaccactgttttaaaacatgcctgagcgcatcgctgttctttgatctattgctggtggtgttctatttggttcataagggctctgcatcatccgatttgttgatggaacagatgcaattgctgaatttcaagt

SEQ ID NO: 109999 - DNA, 283 bp, Zea mays
  Clone ID: MRT4577_31816C.1
ctcacgcgttcagcccacgctttcacctgttttacctgatctcgactacctacttgtatacaatacctctggggttgacaatatcggccgaccctgttcgtcttgacttttcttcaaacttcaaccaagacgaataattctcatctccctaatactcatacatttgctttagtgtagtttattaagctgcgggatttatactataccacaagttcttcctttaaaccatattcaataaataatatcatcagggtgcttttatttgtttacgcaatctctttgt

SEQ ID NO: 110000 - DNA, 601 bp, Zea mays
  Clone ID: MRT4577_31817C.1
tcggtttttttttttttttttttttttttttttttttttttttttttttttttttttttggcgcaagcaacatgaccgacgatttacatatgccactaccaaaacaggtgggtacataagcccctagtatatattactagagaggggagagggggcggccaggtgaaacggcagcagtcagtgtaacagtctacaaaacccaagtagccggcaacaagccatggttttttaccaaacacgggaaacgaaacacgcacggaacgggatgcactccctcccggccatccttgttggtccaagccgaggcagatggaaccagatgatcaacttttagcagtctcaaggagcatgggcactgcacttgcctcccatggccaacatccaaagagaaggtacggccgagctagcgtccatcagtccttatcagcagcaacgggagcactgttgtcggagtcgctctgtggcacgtcaaattctggtggcagtttgcttgggtccggcttgacgccggtgtcaccaccgatggccggcagcttcgccttgggagtcaaagacttggcctcctcgtaggaataaatgtatatcctttttaccatcctgc

SEQ ID NO: 110001 - DNA, 670 bp, Zea mays
  Clone ID: MRT4577_31818C.1
gcgctccctcccgagctcctccggctcacggtcacgcctcgtgtccccccaccccctgctgctcctcctcctcaagaaatggaaggtgatctacacagatgacgaggacgatatgatgctggtcggggacgatccatggagtgaattctgcaggatggtaaaaaggatatacatttattcctacgaggaggccaagtctttgactcccaaggcgaagctgccggccatcggtggtgacaccggcgtcaagccggacccaagcaaactgccagcagaatccgacgtgccacagagcgactccgacaacagtgctcccgttgctgctgataaggactgatggacgctagctcggccgtaccttctctttggatttgcgcttcgccggcccaaaggacgtacggtgccctgcaccatctgcctcggcttggaccagcgaggatggccgggagggagtgcatgcccgttccgtgcgtgtttcgtttgccgtgtttggtaggagccatggcttgttgccgccggcgctacatgggttctgtagactgttacactgactgctgccgtctcacctggccgccccctctcacctctctagtaatatactagggcttatgtacacagctgttttggtagtggcatatgtatatcgtcggtcatgttgcttgcgacattt

SEQ ID NO: 110002 - DNA, 2926 bp, Zea mays
  Clone ID: MRT4577_31819C.1
ggccgggccgggatgcagcgccgcgcctccaccttgactccatggccaaggcagccagcctacccagacaaccaaacgaacccgcccggagcagcaaagcataggcgctcgagcgctccctcccgacctcctccgcctcacggtcacgcctcgtgtccccccaccccctcctcctcctcctcggccggccgcctcacgccgtcacctccgctcggcgagtctcggctccgacagcagccgccacgtgcgacctcccctactcctgagagatctgcggggctcggcatggggtgaccagatcgggccgctgctcggtgctctccagctgaattctgcccgcagctcgtgtcggaggcagcggagatggcggaggccggcgtggcacgcggctcagggagtgctggcgatgctttgttcagggaactctggcatgcttgtgctgggccattggtcacagtgcctcgccaaggcgagctggtttattacttcccgcagggtcatatggaacagcttgaagcatctacagatcaacaacttgatcagcacttgcctttgtttaatctaccgcacaagatcctctgcaaggtggtcaatgtagaacttagagctgaaactgattctgatgaagtttatgctcaaattatgctgcaaccacaaacagagcaaagtgagcccaccagcccagatcctgaaccacctgagcctgaaagatgcaacattcattccttctgcaagaccttgactgcttcagatacaagtacccatggtggattctctgtcctcaggaggcatgctgaagaatgtttgccccaactggacatgactcagaatccaccgtggcaagaactagtggctaaagatctccatggaaatgaatggcatttccgtcacatctttcgagggcaaccaaggaggcatctacttacgacaggctggagtgtttttgttagctcaaaaagattggttgcgggtgacgcgtttatcttcttgagaggtgagaacggagagctgcgagtcggggtaaggaggctcatgagacaactaaataacatgccgtcttcggttatctcaagccacagcatgcatcttggagtcctagcaactgcatctcatgccatctccactggaactctcttttctgttttctacaaacccagaacaagtagatctgaatttgtcgttagtgtaaacaagtacctcgaagctaagaatcacaagatgtctgttggtatgaggtttaaaatgagatttgagggtgatgaatcccctgaaagaagattcagtgggacaattattggtatgggatgcatgccagctaactccacatctccatgggctaactctgaatggagatcattgaaggtccaatgggacgagccttctgctattctgcgtccagatagagtttcaccatgggaagtagaaccccttgatcgaactaatccacagccacctcaacctcctttacggaataagcgagcacggcctcctgcttcaccttcgattgctccagaacttgctccagtttttggtttttggaagtccccagctgagcctgcccaagctttctcattctcaggactgcagcgaactcaggagctataccattcaagccccagttcaatgttctcatcgtcgttgaatgtgggattcaatccaaagtacgagggtcccactccaaacaccaaccatttgtactggacaatgagagagacaagaactgaatcctactccgctagcatcaacaaagctccaactgaaaagaagcaagaatccactacttctggctgcagattgttcggtatcgagataggttcttctgcagtgtcacccgtggttactgttgctagcgtcgggcatgatcctccgccacctgctctctcagtagacgctgaatcagaccagctgtcacagccgtcccatgccaacaaagcaatggatgccccagcggcaagcagcgatcgctctcctaacgagacagagagccggcaagccaggagctgcaccaaggtaatcatgcaaggggtggcggttggcagggcggtggacttgacgaggctagatgggtacgatgacctccgccgcaagttggaggagatgttcgatatcccgggagagctttgcgccagcatcaagaaatggaaggtgatctacacagatgacgaggacgatatgatgctggtcggggacgatccatggagtgaattttgcaggatggtaaaaaggatatacatttattcctacgaggaggccaagtctttgactcccaaggcgaagctgccggccatcggtggtgacaccggcgtcaagccggacccaagcaaactgccaccagaatctgacgtgccacagagcgactccgacaacagtgctcccgttgctgctgataaggactgatggacgctagctcggccgtaccttctctttggatgttggccatgggaggcaagtgcagtgcccatgctccttgagactgctaagagttgatcatctggttccatctgcctcggcttggaccagcgaggatggccgggagggagtgcatgccgttccgtgcgtgtttcgtttgccgtgtttggtaggagcccatggcttgttgccggctacttgggttctgtagactgttacactgactgctgccgtctcacctggccgtcggcgcgggccgccccctctcacctctctagtaatatatactagggcttatgtacacacagctgttttggtagtggcatatgtatatcgtcggtcatgttgcttgcgacatttagcatcctccgtagctgctatttcctctcctgcattttaatcctgtcttggtatcagatgctctggcgcaatatgtgttccagcgggaaaaaaaaaaaaaaaaaaaaagaaaaaccgcagggcggcctgctatctatgcgtacgagcgcatgtacgc

SEQ ID NO: 110003 - DNA, 1115 bp, Zea mays
  unsure (1)..(1115): unsure at all n locations
  Clone ID: MRT4577_3181C.1
cattgggtacctcgaggccggccggggcctttttactattttttttctattcccatttccaccctcgcaccgcatccacctccaccgcgccgccgcgagagaggggaggagggtttccgatggagaacggcgaggagacgttcgcctcccccaccgccgccgccgccgcggacttcgagatctccatcaacggcgaggacagcacgcccaagctccacaatttggcggacgagatggaggccctccgcgcggcgaagcgcgacctggaggagaagctcgatgccgtgggacacgagaaccggttcctgtcctctgagtcccggcgcctcgaggtcctcgtgtcccaggcccgcgaggaggtcgccgctgccgagcaagtcgccgccaccaacgagagcgaggccgccacgctccgcgccgaggtcgagcgtctccagggcctcctagccgcagagaaggccagccatgaggaggagatgcgcaggggcgcaaggctcggggaccagctgcagaccgcgcaccaggaccgggccgcccttgaggaggagatcgagaccctgaagggttccgccactgccgagggcaagggcgggaaggaggaagaggagggacgtgattccgtttctgccagggccgggacgcctaaggatgagggcgtggtgtctcccgctcttgtggctgccgcggctgctggagcagctgccacggctgccatcgcggtggtcttgctcaacctcaagagatgatgtggtggtccgatgctcgggaagttttgatctgctgctatggcctatatgagaatgggttatccgttttgtcgtggtactagtgttgctggactcagtgtggtatctttactatcagctggataatatattagaggttagaacaacctatattgcaagtactttttagtttctgcagttttccatgctaataagagttgtgaacacaaacgtgagagcctgagaggtaattgaggtcaggtgtgttgtttttaagttgcacctaattcgtgattttgagttatcatgacttggatggtttgtactgttatgccttgtgcttccctgaatgatcccaaacaaaaaactttnaaacaaaccccnnnaaaa

SEQ ID NO: 110004 - DNA, 584 bp, Zea mays
  unsure (1)..(584): unsure at all n locations
  Clone ID: MRT4577_31820C.1
ggtaccctccgggttcggccgggnaaaaaaaaaaaaaaaaaaaaaaaaaaaaaaaaaaaaaaaaaaaaaaaaaaaaaaaaaaaaaaaaaaaaaaaccctttacttttgatccgccgggcgcggcccgatcgacgagcgagcctaattcacactccgatctagctagctagctagtttaggaaagagaaatttgaccacagggatgcgggggcggttgaagccggcgccggcgccggcgttgttcctcgtcctggccaccatcgccgccgtcgggggggtgcaagcggacccccaggtgccgggctacttcgggttcggggactccttgggggacaacggaaacaacaacgacatggggtggttggcgggggccaactacccgccttacggaattgacttcgccgccggccccaccggccgtttaagaaatggcctcaccaccgtggacgctatatctgggtttttgggcttcgacgattacatccccgcgtatgctggcgcgagcggggatcagttcctcaccggggtaaacttcgtttccgccgaagccggaatccgtgacgagaccggacagaaactggggc

SEQ ID NO: 110005 - DNA, 405 bp, Zea mays
  Clone ID: MRT4577_31821C.1
gtccaaatgtgtataagcattatataattgttcgtgttcaaacaacacacaagttaagtttttatgagagagattgggggttttcaagtaacatactaactggattatacaaaacaaacatttatctagttgagtaggcttactttacgcatgcagttcttgaatttgattggggttacaaataagaggcaaccttatatatactacatatgaagtgatgacactctagcaatgtccataccgtgccacacacttcatgtgttgatttttaattccatggcatgcacacactcaacatgcgcatcgccgagcatttgtagctttagagacactaaccgatgaataaaccaaacctttgatcgagaattcactatccaaacctgaaggagtatcaatttttcctat

SEQ ID NO: 110006 - DNA, 360 bp, Zea mays
  Clone ID: MRT4577_31822C.1
cccactcgtacgaatgcaaacagcttcaacgtgattcttaatagagggaggagggggtatgttggacagtgtatgcggacactactgatacacatgtccacatagtctcatgacacagtatactgatctctcaggagaacatcttttgttttgaagactggaaacattcaagtgacaacggtggatggcccaattaaagacatagattgtctacatgccgcaaatgatagtcatgtggtgattagccgcatattgtatgcaaagcattacttggtatgatatacaaattgatgtgaaggagataccaaaactaaagctcttgccaccggtggtcatttttaaacaccacatccctcaaaa

SEQ ID NO: 110007 - DNA, 307 bp, Zea mays
  Clone ID: MRT4577_31823C.1
gagaacccccggccccatgataaaatggggcccttcccctccagggggaggttttgggtccaacttttggggttccccggtgaaatcaccaaaataacattgggtttgggattggttacaggggccccgggaacttggggaccattagtcctacccatttggcgttaaggaaaactggtaatggtttaaacaggtttcccaaacgattctggcagacgatgaacgggccaatttttttaaatttatttgggaagaacactttttttctggaggttgattttcttttggggggggggtttcccttttc

SEQ ID NO: 110008 - DNA, 239 bp, Zea mays
  Clone ID: MRT4577_31824C.1
cgctcgtctcgtctcgtcacgtgccgccgccatggctgctctgggccgtggcctgcccctcctcctcctgcatcctcctcctcgccgtatcgggggccgccaacgccgcggcggcgcccggcggcatgtccatcatcacctacaacgaggagcacggagcgcgggggctggagcgaacagagccagaagagcaggccatgtacaaccagtgggtcgcaaaacacgggcagacctacaac

SEQ ID NO: 110009 - DNA, 344 bp, Zea mays
  unsure (1)..(344): unsure at all n locations
  Clone ID: MRT4577_31825C.1
gcaaacgcaagctaggaagaaggcacgaggaaaaagcgttagaagaaaccgaagcgattgggcagggcgaacccggaaggggcgcggccgatactcgaaaggcctcaaccgcctccaactagccaacaacgccggcggaggcggcggaagcgatgaccggggcaggatgctcgcccgaggatcagcgcgcaaggggaggcgcggggagggtnttcttgttgcccgccctatgtcaaggcggtggcggggtccctgggcggcgaaaaggaggcgtgctgcctgcaggcgatcgacggcggcaagacgcggctgcagctagaccgaacgggggcctaccggggcat

SEQ ID NO: 110010 - DNA, 1396 bp, Zea mays
  Clone ID: MRT4577_31826C.1
ctgtacagtgccagtcccaccgcttccgggcccgcccccaaccagcctcacgcgctcaccgtgctgcctccaccaccgatggctctccctcccggcgcaggggcggtggcgccggcgacgcccttcgccgcgaatccgtgccgtctccggcgggcgtctggtcctcctgccgccgcccttcggctcgggccgctcttctggccatgggaaaaggtgaaaatcggtcccctttctgtttcccccatgggttttggaacatgggcatggggaaaccagctactttggggctatcaagaaagcatggacaacgaacttcaggattgcttcaatctggctctaaggaatggcataaacctttttgacactgctgactcttacggaactggaaggctgaacggacagagcgaacggctactcggtaaattcatccttgagtttgaagggaggattaaatctccagatgatgtggtcatagcatctaagtttgctgcatatccttggcgacttacatcggggcagtttgtcagcgcctgcaagtcttctttggaaagattacaacttgataggctcgggatagggcagctgcattggtctactgctaactatgcacccttgcaggagcgtgccctctgggatggactagttgaaatgtatgaaaagggccttgtaagtgctgtcggtgtcagcaattacgggccgaagcagcttctgaagatccacagctatctagcttctagaggagttcccttgagctcagctcaggttcagttctcgttactgagcatgggtgacgatcagatggagctgaaaagtgtgtgtgattcattgggcattcgcatcatcgcatatagcccgcttggattaggaatgctcactgggaagtatggtgcttctaacctcccaaaaggaccaaggtcagtgctgttccgacaaatccttcctgggctggagcctctgctgtcttgcctgagaaggattgccgaaaagaaggggaagaccatgcctcaggtggccatcaactggtgcatgtgcaagggcacagttcctatcccaggcgtcaaaacggtgaggcatgtccaggagaacctgggcgcgctcggctggaggctgagttctgccgagatctcggagctcgagtccgcagcgatggcggctccgaggaagatgatccagaatgtcttccagactgcctgaccgtgctgaatacatgtgtgtgtatgcatgtttctgcaatcgtctttactgaaaaatctgaaaccgggcagccgtgaaccttttcttctcgtaagattcataatatagatagtcactgccatgttctattagttgtcgtttttgacaaagtttaaataaaacttataaaattttgactaaaaaaaaaaaaaaaattatttcc

SEQ ID NO: 110011 - DNA, 1706 bp, Zea mays
  Clone ID: MRT4577_31827C.1
gcgattgggactctcgaggccggccagcctcacgcgctcaccgtgctgcctccaccaccgatggctctccctcccggcgcaggggcggtggcgccggcgacgcccttcgccgcgaatccgtgccgtctccggcgggcgtctggtcctcctgccgccgcccttcggctcgggccgctcttctggccatgggaaaaggtgaaaatcggtcccctttctgtttcccccatgggttttggaacatgggcatggggaaaccagctactttggggctatcaagaaagcatggacaacgaacttcaggattgcttcaatctggctctaaggaatggcataaacctttttgacactgctgactcttacggaactggaaggctgaacggacagagcgaacggctactcggtaaattcatccttgagtttgaagggaggattaaatctccggatgatgtggtgatagcaactaagtttgctgcatatccttggtgacttacatcggggcagtttgtcagcgcctgcaagtattctcccgatttgtttgtttcatgtacaccacctgaatttcactctgttcagtacagattttcttcaaaatatctggacttgcagactagcacgaacgctttgcgaattactaagcagaaactgagtgtaacctagtttgagtgtttatgtgacccatggagtgtctattctcaggtcttctttggaaagattacaacttgataggctcgggatagggcagctgcattggtctactgctaactatgcacccttgcaggagcgtgccctctgggatggactagttgaaatgtatgaaaagggccttgtaagtgctgtcggtgtcagcaattacgggccgaagcagcttctgaagatccacagctatctagcttctagaggagttcccttgagctcagctcaggtgcctgcagggaaacagttggctctgcatgtttatataactcccagttcagtatcgcatcatctgtattctgaaagctcttagtcgtacaggttcagttctcgttactgagcatgggtgacgatcagatggagctgaaaagtgtgtgtgattcattgggcattcgcatcatcgcatatagcccgcttggattaggaatgctcactgggaagtatggtgcttctaacctcccaaaaggaccaaggtcagtgctgttccgacaaatccttcctgggctggagcctctgctgtcttgcctgagaaggattgccgaaaagaaggggaagaccatgcctcaggtaagtgcttaccgagcgcagaacggcttgctgaaacgattctatgatcgcaccagcctaccagcacgtcgcaactacgatgcgcgatcgtcgaagtgttcctcgtgattcaaagatgatgccccgtactaccaacgcaggtggccatcaactggtgcatgtgcaagggcacagttcctatcccaggcgtcaaaacggtgaggcatgtccaggagaacctgggcgcgctcggctggaggctgagttctgccgagatctcggagctcgagtccgcagcgatggcggctccgaggaagatgatccagaatgtcttccagactgcctgaccgtgctgaatacatgtgtgtgtatgcatgtttctgcaatcgtctttactgaaaaatctgaaaccgggcagccgtgaaccttttcttctcgtaagattcataatatagatagtccctgcc

SEQ ID NO: 110012 - DNA, 584 bp, Zea mays
  Clone ID: MRT4577_31828C.1
ggacttcgagctagagatggccacggctgcttccagctcctccctggagaagagctacgagctgcctgacggccaggccatcaccattggcaatgagcggatccgctgccctgaggcactcttccagccctcccccctgggcatggagtcctgcggcatccacgagaccaccttcaactccatcatgaagtgtgacgtggacatccgcaaagacctgtacgccaacacagtgctgtctggcggcaccaccatgtaccctggcattgccgacaggatgcagaaggagatcaccgccctggcgcccagcaccatgaagatcaagatcatcgctccccctgagcgcaagtactccgtgtggatcggcggctccatcctggcctcgctgtccaccttccagcagatgtggatcagcaagcaggagtatgacgagtccggcccctccatcgtccaccgcaaatgcttctaggcggactatgacttagttgcgttacaccctttcttgacaaaacctaacttgcgcagaaaacatgatgagattggcatggctttatttgttctttctgctttgttttggcttctttttt

SEQ ID NO: 110013 - DNA, 289 bp, Zea mays
  Clone ID: MRT4577_31829C.1
ccaggttatgagtaccagaactgtctacttgtttcttccataataacaaacggggcagctgtatttgtactcaaaaaaaaaaaaaaaaaaaaaaaaaaaataaaaaaaaaaaaaaaaaaaaataaaaaaaaaaaaaaaaaaaaaaaaaaaaaaaaaaaaaaaaaaacaaaaaaaataaaaaaaaaaaaaatgggagactactataaaggaccaaacctattaaccacggtaatgaaatgtaaaagacatttaaaagggtactcaaaatgaaattaactggcacaagttt

SEQ ID NO: 110014 - DNA, 426 bp, Zea mays
  unsure (1)..(426): unsure at all n locations
  Clone ID: MRT4577_3182C.1
gggtcgacccaaacgtccgcggacgcgtgggcggacgcgtgggatcacattgagtagcaagtaatgtgttccaataatatgtagacatttgagacaaatctgcattattattactaacaaaaactaagacagcaacatcaacacacccaacaacagttcaattcacccaaccacctcctctccctgctctttgatgtcgccctcgcttcttcctccccgaccggccatcagttccgacgactgcttccttcgtttgtccctgcagccagctgtttccaccgttcccagggcaatggtcgcggtccccgcctcgttcgactactcacctgccgtttccaccggttggcaggccgccccatgacccataccagtagaaaattaacgaagctaatgggtacagacacangacagttctaaaatgggact

SEQ ID NO: 110015 - DNA, 205 bp, Zea mays
  Clone ID: MRT4577_31830C.1
gccgggccgggacaagcatcctttgaatagcctacgacaccgatacactgcgaccatggtgaagctttgatagtttgagattcgagcaagtgtttgagctgtaattccgctgtgttgtctcttatgctcctctctcgacttgtgtgcgtgagactgcctccactttcgcatctgtgtgtgcgtagcttgtaaggcatctgacaat

SEQ ID NO: 110016 - DNA, 357 bp, Zea mays
  Clone ID: MRT4577_31831C.1
gtgtggtgtttctataaatttatggatactgcccattaacaaataacaagaacagctatggcaaaatccaacaaacaaaagatagaaggacgggggtgcgccatcacatggcactggggcagtggactaccaacagatacacaggtcgaattggcgtacgcagaacaagtagggaacctggcaaaatcaacgacaggctggcatgccttaagaacatccaacatcccaggggaaatgcacgattgcaaccaaagggcccagtcccaagggacgggcatcccacgacccaacgggagagcatagactctacgcaggcactggaaccaattccggaacaatgtctgttgggactccttt

SEQ ID NO: 110017 - DNA, 403 bp, Zea mays
  unsure (1)..(403): unsure at all n locations
  Clone ID: MRT4577_31832C.1
tttgtgcaacgctactctaacgtcccatcaagcgcaggcatgttctgtcgaatagcacatcgcactacaattaccaagagatgtgtcatattatgaccagagaggatccacaatttttctatgaccccagccaaatctaccaaattttcttctgtttattttatcttaactattttataccactattaaataatagacttatatagaggtacatggatcaagccctgggccacatcattcgctggcctgcggtgtacatccgccgctggttattactttggatgaaacttttgcgatgtcattgcatcagactatcgatttaaatattgatatgcgattgtgcgtgggacgcaacggagaagacgaatccggcaaactccggcggngggggggccccgtttca

SEQ ID NO: 110018 - DNA, 357 bp, Zea mays
  Clone ID: MRT4577_31833C.1
cactcctgtgttccagtttgatgggtccccatcatcaggtcatccaaatgggcatcgattcctggtctattaccagatgctcagtgtggaaactgggtcacagaagatcaactcaagctgtcgtaaatgaacgagtactgacggtctagaccagttggtttttagcctcgagactcattactatgaacacctttacaagctatgtgacctggcatcatatgccgtttggaacttgaagtcggtgaggtccgtggctcgaatgtgtgctggctgatcctggagaggatcaacatggagatggtgacggatggatctattcaaaatgatcgtgccgaatcttagatgaggttcttatag

SEQ ID NO: 110019 - DNA, 300 bp, Zea mays
  Clone ID: MRT4577_31834C.1
tggcgtgggtcgacgcgctcatggggctggacgccaaatccgcgcgcacgtccgcgcagatggacgccttcctggaacaggtgatcgcggaccaccgccggaggcacgtggcggccaccgtgaaggtggtgacgatcaccgggacttcgtcgacgtgctgttggacgtgaacgaggacgaggcgcacgccggtggagccacgttcgacgacgtggccatcaaggccattatcgtggccattatccaggacatgtttgccgccgccacggacacttcgtacacgacgctggtatgggccat

SEQ ID NO: 110020 - DNA, 466 bp, Zea mays
  Clone ID: MRT4577_31835C.1
attcccctctcccgcgacccggaccccgtctcccggcatctaccaaatccctctcgcctcatccccaccagagcatagccgccctatcgacctggcgtgacaactgatggcgggacgcggcaaggctattggcgctggcgccgcacaagaaggcgacgtcgaggagctccaagggtgggctgcaatttcccggcggcaggatcgctcggttcctccaggacggctagcacgcccagcgcgtggacgccggcgccctctgtctagcctctcctgtgccctcgagcacctcgccgctgagagctctctggagcttgctgctaacgcaacgagacataacaagaagacccgcatcgtgctgcgtcacatccagatcgccgcgcgcaacgacgaggacctgcaccaagctgcttggaggagccaccatcgcgagcggcggcgttatgcccaacatccaccagcacctcct

SEQ ID NO: 110021 - DNA, 2125 bp, Zea mays
  Clone ID: MRT4577_31836C.1
tacctatattcgcgccccgctcgggaccggaaggtcccaatcccaagatgaatgctacgtaggtagacagtgttcttgtggtgacgtgacctccacagagtgcagagatgggagaagctgaagaagcgccaggagacagcaatggtgaggcactggagctcctcatgtccatggcgtcctcttcgctggcctgctctgtctcgcagttcccagccaagtggcagtccatcaaggacaagctccagctgctctgctgcagcctcaattcactctgcggcggcggcggtgaccacgacgacgacgacgacaaggagcatcctgtgttggctgagcttctgcggctggcttcagcaaccgtgaggagcatccaggtcgttgcttctcagtgcagcgacgggtcatacaagggtggaaggcttcgtctgaggagcgacctggacaacctgagctgcaagctcgatgcgcacatgaagcagctcaaggagatggccgtctcgtccggggcgccgtcgccgtccaaggccattgtcgccgtcaggcccagcgccgaggccagcgtgggtgagaaggccttctacctcaaggatctcttttccaggatcaggatcggcggcaccgtccagaggagccaggcactggccgccatcagggagctgttggtggaagacgagctctgtgcgaaggttgtcgccctcgacgtcgacgacggcgtcgccctgctcacggggttcctcgagtccaccgacgcgcgcatccaagaagaggctgccggcgccgtcgccgtcgtcgcgagctccgagcgttacaggggaatgctggtgaaggcaggggtgatcgccccgctcgtccagctgctggagaacgcggacaccgccagcgagctgggcaagcagagggcggcgcacgcgctgagggagctgacggagaactccgacaacgtgtgggccgtctgcgcgcacggcggcctcaccacgctgctgcacgcctgcgcccacgccggcagcagcagcaagctcgtcagctcctcttttgcagtgctgaggaacctcagtcgggtggaggaaggtaagatgtgttcatgggtggagcaaggggtgggtcacggagctggtgaagctcttccagaagaaggaggaggtccgcaagctcggcgccgtcgaattgctccacgccatggctctggatgacgccgacgtcagggaggaagccgtcggcatgggggtgatccagtccctcctccagttgatataccccgaccttccctactcgtacaaggccagggaggttgctcttgctgccatctggttcttctgcttctcttctgcaaactccttggatgacctcattagctcggatgttcttggctggctgctcttctacctgaacaacggcgactacgccgtcctcgaatgtacgctcaagattctgaggcatctctccgaggtttctgaggagtacaaccggatgatgggcagagcagggtatttgagcgccctgtcaggcttgcttggagcgaaatcctgtcgagtccgggaaatggcggcgcaggttctttccagcttgctgatgcttcaccccaaccgtgccatcttcatccaagacggcgacaatctgaacaggctgctgcagctccttgatccagccgagggcaagttgatggcgaaggacttgatcctctctgctatcatgtccctggctgagaccaacagcggaaggaagaagattgtgacgtcggaaaatttctgcagcctgaaagaactggcagaatctggtgacttcgacgccaagaagatcgtcaggaaactatctactaacagactgcaaaccatcttcagcaaaatatggagtgtctagattattcctgactcccctttttcactgaggcttagctctagtctatttgatgtccatagtattttttctctggctttgcttgtaatctcggcgcatccatcattttgattcctttgtgatatatattgcaacttcggttaaattcatccttttttaggaacagggttctaaattcagcgccctcgccagtcttctattgtgatcgccatttagtttccaaatttctgtctcacacatacaatgacagatagaatgtccatactttaaggtt

SEQ ID NO: 110022 - DNA, 227 bp, Zea mays
  unsure (1)..(227): unsure at all n locations
  Clone ID: MRT4577_31837C.1
ttcagttcactgatgtgttatacatttttagagagagagaattgatatatgatctatttgaagctgctacaggtatgcgaatgatgccatnaattactttcgcatcggaggggtagcagccgatctcccttatggatggatggataaatgtttagatttctgtgattattttttacaagagttgttgaatatcaacaacttatttacacggaattcccttttttttt

SEQ ID NO: 110023 - DNA, 684 bp, Zea mays
  Clone ID: MRT4577_31838C.1
aggccggccgggagccatttctgaggacaaagcgaaaagaaaaaaaaagggaaaaggggctggtgcgcaaaaccctagcgcagtcgcatccatcatggcgatgtccatcttcgtcggcggcgactccggtgcgctcatcgcgccgtccgcgtcctcgctccgcccgccgttccgtcttgccgctggtcccaagggccatttttgtacttttcctcatggagcatctagcaatcacagccggctatgtgttgaacatcaaagcgtggaagataatgttttctgcaccaaccacgaaggatacctccaatgcaaacatcgcaaaacagaggcttaagatgatcctgttctccgacaggtgtgaagtcagtgatgaggcaaagaaaaagatcgtggagaacatcattgaggcactgtctgagtttgttgagatagaatcaagggataacgtccaagtggatatctcaactgatgctggccttggcaccgtgtactctgtgtcagctcctgtgcgccgtgtgaagccagagtaccaggaatctgaagagcagtacagagggaaaattgtccggtgtcgacttcaaggacactggagaatcctcagggagcgttgacgtcacctttgacttctttgtaccaatgagaactaattccctggacttctatcagagcgcggcctgcaatgtt

SEQ ID NO: 110024 - DNA, 738 bp, Zea mays
  Clone ID: MRT4577_31839C.1
gccggccgggtccgggagctaggcgccacgcttcccgtctatgccgagccgatagggcgggcggcgtcttctcgtcagcagtctgtctccgctagtccccttcatcgccatcaatgaccccccaccgtcgcagccactgatcccctccgccgtcgttggacttcgccgcaactgctggagccctacgacgctgctagtccactgcgtcgtcgctgtaagctgccggcccacaaggtgtctggacaagcagcagcagttcgtgtgacggctgacaggtgtgccttttacggctacagattccccggctggcaggttcttatgccatggaaattcaacggatgctacgcacttttcgtaatcgatcatggtaaaaagcacgtaacttttatagactttacacccactcaagatttgtgtaaacacatgccatacaagaggtttgcggaagcaattatcatatcctcaaagaaatataagattgcctacaacaagaaacgttctggatgggcagaagatatttttggccaaacattattctatagggttaataccagttactttgttctacaagctatgatcatgtgggggagtgctagacgaatgaaatttgatagggatgcaaagattcttcgaaggaactttgtaattgatctgttaaattacgaggacaattcatgccgctatgccatccctacaaacatacaacaacgacttatcaataacgctaaaaaggattag

SEQ ID NO: 110025 - DNA, 655 bp, Zea mays
  Clone ID: MRT4577_3183C.1
cattgggtacctcgaggccggccgggaaggaaacttggtcgagatctactcctatcactgcggcctgtacgcgtgtgagagacttgaccatgctccacaatcacggatggggtctctgaagctgtagcgcacatgccagctgaccgccctatcgtgtccgcgtgtggccaccgcgctactacaagaagggcctcgacttcgagatcggccctgtctagctcaccaccgttggcctgacgtagcccgagcttcctcgacctcaaccctgttcggccagatcgcggctctcgtccactgatacgaaatcctcttcgagtcccgtgcgatcaaccggtacatcgccgatgagctacgcgtcgcaggcatcgaacctgctccccgtgacggcgaccgcgacgtagttggacgtgaggatataggtgtagtcacaccacttctacccgacacgctttgccgctggtgattcagctgctcgtgaggacattgctgagcgatgcccccgacgcatcaggaggcgtaaagaccactgtactagctctccaaggtgctctacgtgtacgaggcgcacctcgaccgaaacaagtacctcggcggtgaccagttcacattcgccgactccaccacgcgtcctacctgctctacctcagcaagaccc

SEQ ID NO: 110026 - DNA, 1074 bp, Zea mays
  Clone ID: MRT4577_31840C.1
ttggggggggcgcggccggccgggaggcagcagccaacactgaggacaaagcgaaaagaaaaaaaaagggaaaaggggctggtgcgcaaaaccctagcgcagtcgcatccatcatggcgatgtccatcttcgtcggcggcgactccggtgcgctcatcgcgccgtccgcgtcctcgctccgcccgccgttccgtcttgccgctggtcccaagggccatttttgtacttttcctcatggagcatctagcaatcacagccggctatgtgttgaacatcaaaggtgttctcgcagctccacccagaactatgctctttctaggaaggatttttctcctataactcaagatgtggaaggcttccttcacaatgttgttaacatgggttttcttgaccgtctgaaattagcgtggaagataatgttttctgcaccaaccacaaaggatacctccaatgcaaacatcgcaaaacagaggcttaagatgatcctgttctccgacaggtgtgaagtcagtgatgaggcaaagaaaaagatcgtggagaacatcattgaggcactgtctgagtttgttgagatagaatcaagggataacgtccaagtggatatctcaactgatgctggccttggcaccgtgtactctgtgtcagttcctgtgcgccgtgtgaagccagagtaccaggaatctgaagagcagtacagagggaaaattgtcggtgtcgacttcaaggacactggagaatcctcagggagcgttgacgtcacctttgacttctttgtacccaatgagaactaattccctggacttctatcagagtgtggtctgcaatgtttcatctgttcgttgaatttgtgagccctctgggtagaaagttagaatgctttgttctctacagtgatgtaaatatctagggtccctgtttgctccatgtttcctgtaatttggttctggaattttgtcagagacctgcgttggtaggttcttggtaaaaccataactatgttctcattgttgagaaaataacgtccagttgctgtcttcaaaaatgccattcaaaaaaaaaaaaaaaaccgcggcc

SEQ ID NO: 110027 - DNA, 461 bp, Zea mays
  Clone ID: MRT4577_31841C.1
gataacgttgtttctcagggctacgagcgccttaaatgtgagttggttgagcacagcatgccacagttacatgccgggaggcacctgtacagctggaaaccgattatctgggcgtactgcctaggggattagtttctagtgattagggtgggacgcaaaacgagctagatgaatgcatgggttgcagagaggactggagagctactgaccgtaagaatgcattgcgctttacagggtatgagaagctttgtaacctgcttcgacctgcgatgaagggttgcgtgccagtcgatgctcagtttgttgcagagctatatagatggtgctactctgtatggtatgggaatgcctattgatacagaacatggccctgatgcttgtgatgaggctggcactgtagtaccttgctaaggtttgatcctgggttatccttaaacatgattctagcattcttcttgctg

SEQ ID NO: 110028 - DNA, 229 bp, Zea mays
  Clone ID: MRT4577_31842C.1
ccgcccacgcgtccgcccacgcgtacacgtttacatgaacagacacgtataccgggcaatgtataatttcgaaattttcgaaccaatacctgctaacgttcaagatactaatatacaaatgctactacatacttacttaccaagaacatgactatacttttataaattttatatttttatattatataatttttcttatatatatttatataaattatattatattaat

SEQ ID NO: 110029 - DNA, 358 bp, Zea mays
  Clone ID: MRT4577_31843C.1
gcggaaaagagtagtggcctgtaggatgcgaagaacaagagctcaaatcggatggaatcttataaagaaagaaagatcatattcatggcgatggcaagcctggctcgacggaagggttacgccgtcgtcttgtcgtcgaggtcgacgttttgtctgacaagctggaggggattcgcgtccggatctgacgaaaacgacgtcgtcgtcatcggcggcggtcccggcggctacgtggccgccatcaaagccaggcagctcggtctgaaaaccacttgcatcgaaaagcgtggcacttctcgcggtacctggctaaacggtcgatgcatccttttcaaggcacttctgcattcttccacat

SEQ ID NO: 110030 - DNA, 649 bp, Zea mays
  Clone ID: MRT4577_31844C.1
cttattgaatcagctgctgagatgctttatggattgattcatgttcgatatattcttacaagtaaagggttggctgcaatgttggataaatacaagaattatgactttggcagatgtccaagagtgcactgcagcggccagccatgccttccagttggccagtcggacattcctcgttctagtaatgtgaaaatttactgcccaaagtgtgaagatctctactatccgagatccaaatatcaaagcaacattgacggagcttactttgggacaacgtttcctcacttgtttctgatgacgtacccacatttgaagccccagaaaccgtcacagcagtacgtccccaaggtttttggcttcaaacttcataagccataacaagttcgaagactgaaggtgcaaaaggttcaccgcagagttgtctgattcgtcgcaccacacagcactaccaagctgctcatctgtgtgcgtggggcagtttagtacttggttcagttggttacctgtggctccacgaaaccgacctgacccctgtctgatctcccttgtcctgcggtttcgctctcgcctgacgttctgatttgatgcttgtggtttgtttagtgtagtaggttcctatcctgttctttatatactcattatatttgag

SEQ ID NO: 110031 - DNA, 398 bp, Zea mays
  Clone ID: MRT4577_31845C.1
gaccgacgcgtccggaggctgttgcaatatgcctcgctctagtcaattttcttgaagatcaaccaactgcagggaggcgtgtgttagaactatgtgccgtacataatctagtcatgtacagccagcgcagattagagagcaattgcagaatccggtcgtgtacaggtgctgctggatctgatcagctcaagcaatcctgacacttgtcttcggcctgcaacgttcgccaaacttctattcagtagccatactatacacgagtatgcaaccagtgcaacagcctgagctataactgctcctattgaaaatgatttatggtcgtaccgaaagtactaacgaggagtatctcagagcactcaatgctctgctgaataacttccgtcgtctgagggtcactg

SEQ ID NO: 110032 - DNA, 1026 bp, Zea mays
  unsure (1)..(1026): unsure at all n locations
  Clone ID: MRT4577_31846C.1
gcttcttctctgtaatttttttttcttgcatcgtggcttggcaaacggatctaggctatcttcctcgctttctgttcttctcctgctctgttctttgcttctttcttccccaccgaacagctcacaccggtgagctagccgctgcctgagcgcgcagccggctcacatatccgaggatgaccggattaatgtgcaggggcatgcgagttttaccgtcggtgtgcgcgtcccctcagtagggcgcgccgccgtcggtcaaacgtcgacagctgtccctctttgactcgatcctgttctctgtgatgtttgaatgtatgaaatgaaacttgtacgtgcggatccggtcaccaaaaactaaatgaacagtgcactgtgcactttgaccgatccggtttttggttaaatctgttagggttaaagaaccctaatctgatctacgtttctgtttcttgtctgtttttggtcgtgaatcgttggatcccgagctactgtgtgatctctgttgacccagatcaaaaaccgtttagtgttaggttaataaaccctaaccctaaaacgttggtctgtttttactatctcggatttcttgggtttggtcgagacagtctctgacagtggccaaaaccctaactcgagatctaaaattatttcattctattctaatctttctgttctcaggtgatcgatgataataaaaaaaatgagtcgatcacattgaactatgacctttctgtgatctcataaaactgatgcggattaggagatctagggttcttaggacgcctctgataccattgttagaatctatactttgtaggatcgattcctaagtccttagaaaaccaatccgtaactggaagtgaaatctttatgatgagtacatctcttctactaagaggaataggaaaacataccttattgttggagagttgtagttgctgtcttcatattgttgtcctgcagagaaacagcacgcatcgaatccgagctgccgttggttgtagcgtttnccgcggacgcggtggg

SEQ ID NO: 110033 - DNA, 697 bp, Zea mays
  Clone ID: MRT4577_31847C.1
ccggccgggacggctgtaacagactcgcgcgctaagcatggatctcccagccgccccgaccgggatcttcttcctcgcgtgagcaccccagccagagaaatcgcggggttcgttgagattttctctgctaccagcaaagtccggttcaatggaaatccgcactggccgccaggactccctgctcatataagcctgcccatatgcggccctaccccaaacgcctggctcgcgcccaccaagtactcagcatggtcgaagccaccagcgacatgccaggaaaggagagagagaaggcaaggacacccacaccgagagaaagaaacaatccgtcgtatgggctggtactcctacctcgccggaggcatctctggggggttcgctgggtgagtttcctatggagtccgtggttcgccgccgggcagctgcaaaccaaggtcaaggtcgtcgcggtttgcctagctacgtagacagagcttcgtcgttgcgtctggattattggtcgagaacaggtaccataggatgagacgcttggaggatgctgtgatgtgtttgtgagagatctaggtcatcgtctcccagtcaactttgggttgctagaccggtgtctccttataatgtaattattcattttgtacagaactcttattatatagtacagatgtgacattcgatccctaaaacaaaaaaaaaagcggcc

SEQ ID NO: 110034 - DNA, 1243 bp, Zea mays
  Clone ID: MRT4577_31848C.1
cattgggtacctcgaggccggccgggttcccttgcaacagcagtgctgaatcctttgcagactacttaaaacgcgacggggcattgtaagtggcagagtggccttgctgccacgatccactgagatccagccccgcgtcgcacggaccactctagccattttcttttcttatccccagccgccacaaagacagccggccgcctgggaacttttttttcttttcttcttcctggccgaccgcacctcccacttctctctatttttttttccttgcaccatggcttggcaaacggatctaggctggcttcctctctttctgttcttctcctgctctgttctttgcttctttcttccccaccgaacagctcaaaccggtgagctagccgctgcctgagcgcgcagccggctcacatatccgaggatgaccggattaatgttcaggggcatgcgggttttaccgccggtgtgcgcgtcccctcagtagggcgcgccgccgtcggtcaaacgccgacagctgtccctgttgacagcagagaaaaggggtcgacctcttggtcgacttctgtgactgtgcacgcccagatcttatctcccttacctctttgactcgatctcgttctctgtgatgtatgagatggatctaatgtaatattcgggatcgagttatgagttgatagaacgtagattttctgtgaggatttttttgtaccttttctaatctgctctgtcatctaggccgtggatgtaaaagatcccgagccactgtgatctctgttgacccagatttaaaactgatcagggttaggttattaaaccctaaccctaaaacatcgatctgtttttactatctcgaatcttctgggtttggccgagaccaaatctctgttagtggccaaaaccctagatttagggttaggtaaaccctaacccgagagataaaaaatattctttctattttaatctatctgttctcgggtgataaacgaaaaaaatagttcaatcatgttgatccgagacttttctgtgatctcataaaactgatgcggattaggagatctagggttcttaggacggctttgataccattgttagaatctatactgcctaggatcgattcctaagtccctagaataccaatccgtctttcactgaaacttaaatcttaatgacccgtagatctcatctactatctactgacaggtactgtgaaacacacctttattgtccatgctatcttgatacc

SEQ ID NO: 110035 - DNA, 640 bp, Zea mays
  unsure (1)..(640): unsure at all n locations
  Clone ID: MRT4577_31849C.1
ccacgcgtccgctataaattcgtaccacgtggttatatggtggtcttctttattacattacactcaaaaccggcgtagtgcagtacagtaggtaaatcagaattaatggcaacccagggaggttacgatgggaagaaagtaggtaaatcagaattaatggcagagtagttttgaaaactactattatggcgctcgttcaaagatgcaaagcagagaaaaagtacatgaactaagcatgcctcagccatggaaaatcatgtaatcgaaaactcacagtttaatagataataatgaatattggcatgtatattcttcttctcatcaccatttgttacagaaaggctgtaattcagacatgatcgtacttactaagtacagcatccatctgcacctcaaagcaatgtaaaaacagggagatacgtctgcactaagcatacaaacagggaactagagcgatccacatggcaaataaaaaacattgtcagacttacagatcgacagattcctgagggaatatacctggttcatgatccttctccaagccagatacataatccctgaccttagaaatcagaanaggcctgcacaattaagataactcanactttgaaatggtagtaacatacatcacagaccattt

SEQ ID NO: 110036 - DNA, 185 bp, Zea mays
  Clone ID: MRT4577_3184C.1
gtgacagagagcaaccaaatgcagactaatcttagttgattttgcaagtagtgacgtattgtaaattcatattcatgatattctttcattcaccatctttgttgcaaaggaaaaggatggaaaagtaatatatactttggttaaaaaaaaaaaaaaaaaaaaaaaaagaaaaaaaaaaaaagaaa

SEQ ID NO: 110037 - DNA, 547 bp, Zea mays
  Clone ID: MRT4577_31850C.1
caaggaactcatttttcataatcaattttgcgtacacagttacaagcaaaaaaaaaggaaaatccaatagtttagggagataaatctgacccaaatgttacaagccatgttcaaaaactaaaaaaccaacgaactatttggggaaaaaatgggatgtcacatgctcattgcttctacaggtacagagaagccatcctttggatagtttataaaaactcaacaattataatacaaaatctcagttacacagaaattttgaagtctcagatcctaagaagaaagaatttttaagatgacaacacctgaaaacaaagaatcaggtccccaggaagcacagcaacacattctgtggcctcgcatggaagagaacgttgtcgcacacatttgcgaacattgatccattcatcctcctctgccccaaatccagaaaaacgaacccgcacctccgggtcaccggattcaaacaacctatgtgaaagaaaggcagcaacatcataccatgcaccatcacgagctgacttggcctcaaactcaactgaaacacttt

SEQ ID NO: 110038 - DNA, 113 bp, Zea mays
  Clone ID: MRT4577_31851C.1
tccttcgtatcggctctcgcctgtattagccttgacggagttaccgcccgatttgggctgattcccaaaaaccttactcgttgacggcgcctcgggtgcgacagggtccgggc

SEQ ID NO: 110039 - DNA, 518 bp, Zea mays
  unsure (1)..(518): unsure at all n locations
  Clone ID: MRT4577_31852C.1
acgcctgcaggatccggtccggaattcccgggtcgacccacgcgtccgcgctatgggcctagacctcctccgggccctatcttctgctggttccgcgatccgcggcctggcgtcctagtcggcttaacacggagcgacagtagcaggggcagcgcggtggcggtaggcgacttcccgtggcgagcacaggctcgcggaagcccgacaggcgagtacagaaaatgcatgacgatattgatattgaagccatgcttgaggccccttcacagaaggatgagaacaagttgaacagtgctaacggccactgaagaacgtagcttgacagagattgacaaagactgagcagagctcggattgctgacagacctggaagcataagtcaagatcggtggacacgtgatatatagtacggaccctagcaaaagtcgagagcgtgaacgaagtacacgcanggatgggttacgaagccgctcacgcagtcgggatagaagattccgaggccgctactggagtccctg

SEQ ID NO: 110040 - DNA, 614 bp, Zea mays
  unsure (1)..(614): unsure at all n locations
  Clone ID: MRT4577_31853C.1
atccagtctgacctgaaccanaacaanagaattgctcaaacgctaactcttcatgccagagcatttaagaaaaatgaacatgattcaatgaagaaattcccttccaaatcctgtcctttgcnngctatggaactgggaaaattcaggaggatgcaatgaggctatttgaatctggccttcatgagtttttagaatctcagaacactggatggagcataacatccctttctgtcactgcaagcaaaatatttgatatacctagtggaacaagctcaatcctgagatacattaaaggtccaagttctgctgcagctctgactatacctgattctccaagttctgctgcagctctggctatacctgattcttcatttgtaccagaggatccatctcttggtgatgttccttagttcaagtgtgcctactgtttgcaatttttgtttgttcttacttaggatcttccaatatttttctgtagataatgatgtatctgtggagtcaattaatgaagaagaatgccaaccatctacctctgaaaaagaagaaataatacacattctgcgtctgctatttcagctaaacaatgccaagcaattgaagaaaaaagatatcaa

SEQ ID NO: 110041 - DNA, 405 bp, Zea mays
  Clone ID: MRT4577_31854C.1
tcaaattcttcggagagcgtactagtggtcggaagagacgggcgagagagaatggacgctcactggcaccgactggccattgtggccgcgcttgttcttatggcctccgcggcagaagaggcccttgccgttcaaagcccgggagccctgctggcgccacgaagcagtctggacgccttgccattcgtgagacttggtacgccggagaagaagagcacaggcacagcggcggccgatgcccgggatggctctgacccgtcggccgtcttcgaccccgacaggatgagcaagcgccgggtaagaagaggatctgacccgattcacaacaaatgctgaggtcgagtgtccaagaaacgagagaaggtctggttcttttaggtgggtactgccttaatttcttctttc

SEQ ID NO: 110042 - DNA, 224 bp, Zea mays
  Clone ID: MRT4577_31855C.1
gcctcagccaaaaaactttttccttgcaaattttttttggtgggggtacctgtaaacggccttccacatagagcaaatttaaagctcgttttgacaaacacaaaaaactgcacccccccccaaagagggcttgttttatgccgccaagagccgtctagagccgccagaatttcctacagctttttttccctttttaccgcctttttttggagtttcttccgggg

SEQ ID NO: 110043 - DNA, 246 bp, Zea mays
  Clone ID: MRT4577_31856C.1
cgccatctccggcgctacgctactacggagagagatagcatcagctattcagctgcagcaaccgaaggacgagcgagctaattagcttacagttatactagaaggtacggtagtgtgcagatcactgatcagtgacccaccacctgaacagaagacagagaagcagcagagcaccaataatggccggcaggctgcaggcctgcttgctcatctgcgcggtgctctcgtcagcggccataatggcga

SEQ ID NO: 110044 - DNA, 292 bp, Zea mays
  Clone ID: MRT4577_31857C.1
gctatgcgtccgcttgtctttcgagtattctttagagtgatcccgaggagaaaagccgtaattgctggacagtacctgatagcataaactttaaagttcggagcaagaatttcccacacgacaaatcatagatacctgcagcaagttatctaatggagcttgcagccatcgactggtttaaggacaccaaacgtatggataacgttgctatgcacaacggttgtgttgctcaggctgctggtgaaaaagggatgcatacattgaatgtcaacatacagattccttgatcaac

SEQ ID NO: 110045 - DNA, 387 bp, Zea mays
  Clone ID: MRT4577_31858C.1
ccccgcaggaccccgggtttttactggtaattgccgggtttaacccacatttccccaaaaatttaaggaaaaaaaaaaaccaattccctggcactttattcggatcctagggcaacgggtgttttttaaaactattgccccctttgttattaaagcctgcctcctgaatacataaggatgggaaatcccggacgggcgaagttgctataacaacagggtgggtggaccctaaaaaccggaaaaaacttttttgttctatccagcccctttagtttcctaaaaaccataaaactcctgttttactcctttaaccttagggccaaagggcaaaagcattgtttttttcccaacctttaatgggactgacaaacttggacagccctttgg

SEQ ID NO: 110046 - DNA, 366 bp, Zea mays
  Clone ID: MRT4577_31859C.1
aacagaacagctcgtcctaacagtttaagaaacaatgttccaaagaaaatcctgggcgacggtggagctatccaaggacacgagcccccctttttgggtgccattattaacacaccccggtgctgatctagtagaacatgacgaccaaaccatgcaggcagaccttggtgtaccaggtacactggtacggaccaaactaactcacacacaccagccgagtgtcataaatacgctgatcgacttgcaagtccacttgcctacattcaatgacttccacatgctttgataagcatgctatggcctactgcacgttaaccctacttttgatttcgacctgcgacttacctctcagctgatgcatactcg

SEQ ID NO: 110047 - DNA, 540 bp, Zea mays
  unsure (1)..(540): unsure at all n locations
  Clone ID: MRT4577_3185C.1
ggcttgganctgtgcagagtccttctatccgtcgagccgctgtggagtctcagctggtggtggatcgggccttcaggtgtctgatctgttggagnagctgctcgttagcttcaagntgcttcctgctgctgctggnaaccgttaacccgggctgagtggtgttcttatcgcagcttgatcggttcgcagntgtggagctggntgctttgcgtatcctccattgccgccctgagtgctccgctgngacgttttgctcagcntaccacgggcagtgcggctactgaaaaaaaggtgccntggcgagccggtagggctggacggagccttatctcgggatcccnggtgtcacttctgagatcttcgcttgagagcactcactcctcacggngggacagtctgaagctccgcttcttgatcatggactcgagaaccaggagcgataggttggcaggtcctgtgcgacttcttgacctattggtattttgttgttcggacactggtcacgggacctgggagctgtttgctgtacacttctgtggg

SEQ ID NO: 110048 - DNA, 1693 bp, Zea mays
  Clone ID: MRT4577_31860C.1
gctatggatgtggaaaaggacgccaatgttgaaagtttggatgaggaccagagtgacagtggcaatgaagaggcagaggagtcagaggatgatgcatttgaggttaatgatggagaggacatgaattggagaattggggatggcaggggggatgagggaatgtcacattctttgcaacgctgtaacacatttggaggcatggagtttgagaacctgaatgaaggggagactgtaatgaaggatgagttgaggtttgatgatttccctgcgagggcatcttcagaaaggatgacaccatcaaacctcctccaagccatgaactcaattccctcaacgtacaatgtagcagggaatgtgcatgatctgccttctggggatttcttggctatgggggctgatgcacataagaatggagtggatctgggaccagggagctcatatttatttgggaataatggtaagaggaatattgatgatattgatgggtacaatggcaatatgcaggtgcaagaggggtttcctcggtctaatcagcagaagaggatgcgccatagtaacagtagcaacatatcacctggatcaggctttttcaatgcaagcttttcggtgcctatacagaacttgatggttgaggcaagcaggctctatgagcagaatgagcaaaaacttcagagtttgcaatttgagaagcaacattggtctgacatgctgcagcagaaggaagccattatccaatccctaaactcagctcggtttgagcaacagaacaagtatcaagtggagcttagacgcttcgagcatgatctgaatgttatggcccatttggtaactacctacaaaagagctttaaaacagacccgggcttcttttgatgagtacaggaagaagttcccttgcaatgttcctctttatgatgatgttgctggtggtggtggtcttgttcttagtgtgagggagttggagaagaggcggtgtgaggaggagcagcaaaaaattgccatggtaaatgatatgatcgaaagattccagtacaaatggttctcaaagcttgaagagtggggactgtctgtcaactcactgtggagcagaatggaaggactctataaggagattgagcttctgaaggaaaatagaagatcaagatttgctaccccagctacagaggaatctctagctacagaagaacctaccccagctacagaggaatgagttccctgacagtcagaggttcagatgtgaatatgactcccagtcactccgctagatgttttgatgtcaacgagcatacattccctctgctggatgactcccagttagtccctaccctctgctgccaccaagagtgtggctgcctattggtacatactgtagcaaggataaatagtttcgcaagtaaccctgcttgtatcctcatgtgggatattttgattattagtgatcaaggccctgtttgtttccttccaggattattagtgattaaggccctgtttgataaatagttctctagattatataatccacctaataatctatgatgtttgtttgcctcccaacttatttaagctggattatataatctcgagggtaaacaaacatggcttaattcaggtgcatttagggtttcttaatctacgtggaagtgtgtgccttccatatccaaaaaaaaaaaaaaaaaaaaaactcaagggggggg

SEQ ID NO: 110049 - DNA, 2726 bp, Zea mays
  unsure (1)..(2726): unsure at all n locations
  Clone ID: MRT4577_31861C.1
tcgttgtgtggaacccttggttggtttactggttagtgaagctaaccctgcccagctttctgttgttcgtgcattggataggcttctagatgatgagcaactggcagaattagtggcagcacatggtgctgtcattcctcttgttgggtttttgtatggcaaaaactacatgcttcatgaggcagttgctggagctttggtgaaacttggaaaggacagaccagcttgcaaattggaaatggtcaaggctggtgtaattgagagcattcttgatattctccatgacgctccagattttctttgcatcgcattggcagaaatgcttcggattttgacaaacaatgctaccatagcgaaaggtccatctgtagccaaagtagtacaacctcttttctctttgctttctaaggcggacatgggtcctgaagggcagtatagcacattgcaggttcttgtgaatattttggagcatcccgaatgccgtgctgattataacttgacacctcgccaaactattgagccagtgataaccttattgcatctccaccagctgtgcagcaattagctgcagaactcctgtcacatcttcttctagaagaccacctccaaaaggacacaataacagagcaggcgattactcctcttattcaagttctttcttcaggtttgccaaatttacagcagagagctataaaagctcttgctaaccttgcaatagcttggccgaatacaattgccaaggaggggggtgtttttgagtagtctaaagtgttgttgcaatctgacccgcctttgccgcatgttgtgtgggaatctgcagcatctgtattgtctagcattctacagtacagtactgagtttttccttgaggtacctgatgcagtgcaattcaggaaaagttcggtgctttgaagcccttcttgtattggagaggatgactcaacaagtggcaatggctgaaagtggtgctgtggaagcattgcttgatctcctgaggagtcatcagtgtgaggaaactgctgccagactaattgggagcattgctgaacaatgtaagaataagggaggcaaaggctgctaaaaatgctattgcaccattgtccatgtaccttctggatccacagacacaatcgcaacagggaagattgcttgctgctcttgctcttggtgatcttttccaaaacgaaggtcttgctcgttctactgatgctgttgcagcatgccgcgctctagtcaatcttcttgaagatcaaccaactgaagagatgaaagtggtagcaatatgtgccttacagaatctagtcatgtacagccgagcaaataagagagcaattgcagaatccggtggtgttcaggtcctgctggatcttatcagttcaagcaatcctgacacttctgttcaggctgcaatgtttgtcaaacttctattcaataaccatactatccaagagtatgcgaccagtgaaacagtcagagttataactgcttctattgaaaaggatatatggtcttctggaagtgctaacgaagaatatctcaaagcacttaatgctttgcttagtaacttccctcgtttgagggtcactgaacctgccacattgtgcattcctcatcttgtaacatcccttaaaactggttctgaggcaactcaagaagcagcactagattcactatatcttctcaggcaagcttggtcagcttgcccagctgaagtatttaaagcacaatcagtcgctgcatcggaggctattcctctacttcagtacttgatacagtctggcccaccgcggtttcaagaaaaggcagaattgcttcttcagtgcttgcctgggactcttactgttacaataaaacgtggcaacaatctaaagcaatcagttggaaatcctagtgccttctgcaagcttactcttggaaataatccgccacggctgacaaagattgtctcgactggtgcaacacctgaatgggatgaagcctttgcatgggcatttgacagtcctcccaagggccagaagctgcatatctcttgcaaaaacaacagcaaatttggaaagaaagcattcggtaaagtgacaatccagatcgacagggttgtcatgttggggtcagtcgcaggtgagtacaccctgctacccgagagcaaaagcggccccaatagaaacctggaaatcgagttccagtggtcaaacaaataactgcatacctacataatttaggtgtcctctgtaagttaaagatatgagtttgagtgttttcttgttttgtactctgctaaaggttaccctgtttgtgcatcattgtaaatagcgggcagagaaagatgtcgtttgctgtaccttctgtgagatataaacagatgagttctcagacgttttgtactggttgtgtcaggcttcattcgtttatttttttaccctgggattttgtctttgtaaaggggtgtaaacagaagtatatgatatggttaggttctcatacggaatggacgtttgcgactttgcagtctcttaccagtatacatgtttatttgccagcagtttcctcacactgatgactgccnnnnnnnnnnnnnnnnnnnnnnnnnnnnnnnnnnnnnnnntgattnnnnnttactgaatatttgattcatagtatgcnnnnnnnnnnnnnnnnnnnnnnnnnnnnnnnnnnnggcgtggggatctcgaacctgcccgcctggggcgggctcatggggcagggct

SEQ ID NO: 110050 - DNA, 841 bp, Zea mays
  Clone ID: MRT4577_31862C.1
tcgaggccggccgggtctagagacaacctccaaaaggacacaataacagagcaggcgattactcctcttattcaagttctttcttcaggtttgccaaatctacagcagagagctataaaagctcttgctaaccttgcaatagcttggccgaatacaattgcaaaggagggtggtgtttttgagttgtccaaagtgttgttgcaatctgacccgcctttgcctcatgttgtgtgggaatctgcagcgtcggtattgtctagcattctacagtacagtactgagtttttccttgaggtacctgttgcagtactagtgcaattgctcaggtctggaactgaaagcacagttgtcggtgctttgaatgcccttcttgtattggagagtgatgactcaacaagtgcagaagcaatggctgaaagtggtgctgtggaagcattgcttgatctcttgaggagtcatcagtgtgaggaaactgctgccagactaatcgaggcattgctgaacaatgtaagaataagggaggcaaaggctgctaaaaatgctattgcaccattgtccatgtaccttctggatccacagacacaatcgcaacagggaagattgcttgctgctcttgctcttggagatcttttccaaaacgaaggtcttgctcgttctactgatgctgttgcagcatgccgcgctctagtcaatcttcttgaagatcaaccaactgaagagatgaaagtggtagcaatatgtgccttacagaatctagtcatgtacagccgagcaaataagagagcaattgcagaaatcgggtggtgttcaggtcctgctggatcttatcagttcaagcaat

SEQ ID NO: 110051 - DNA, 724 bp, Zea mays
  unsure (1)..(724): unsure at all n locations
  Clone ID: MRT4577_31863C.1
cagcttgcccagttaaggtatttaaagcccaatcagtcgntgcatcggaggttattcctctacttcagtacttgatacagtctggcccaccgcggttcaaagaaaaggcagaattgcttcttcagtgcttgcctgggattcttactgttacgatanaacgtggcaacaatctaaagcaatcagttggaaaccctagtgccttctgcaagcttactcttggaaacaatccgccaaggctgacaaagattgtctcgactggtgcaacacctgaatgggatgaagcctttgcatgggcatttgacagtcctcccaagggccagaagctgcatatctcttgcaaaaacaacagcaaatttggaaagaaatcgttcggtaaagtgacgatccagatagacagggttgtcatgctggggtcggtcgccggtgaatacaccctgctacctgagagcaaaagcggccccaatagaaacctggaaatcgagttccagtggtcaaacaaataactgtattacctacataatttaggtgttctctgtaagttaaagataagaggttgagtggttttgtactctgctgaaggttaccctgtttgtgcatcattgtaaatagcaggcagagaaagttgtcgtttgctgtacgatctgtgagatataaacagatgagttgtcaggcgttctgtactgcgaaaaaaaaaaaaaaaaagcggccaagggggcccggtacc

SEQ ID NO: 110052 - DNA, 244 bp, Zea mays
  Clone ID: MRT4577_31864C.1
acaagagtgagggtagaattgctcctgatggcgagaacgcaaagctgctcggtaaccatggaagacttgagaagcgcgctcctgggaaggctttcctcgaggccgttgtttaagtccaatctatagttgtaatgcgaattcacacgctgtgggttagcctatcttattttgctttgtgcatcatgaattttaagtgtctggggtactacagggacttgtgtgaacctgcttatttctggctgaa

SEQ ID NO: 110053 - DNA, 497 bp, Zea mays
  unsure (1)..(497): unsure at all n locations
  Clone ID: MRT4577_31865C.1
tcgatcaaacttttatcttgatggctcccaagggccctagggccctagactttgtaatcttgcatttgtgctctcctgatctggtgtgatactgatgtaactgaacaacgaactaattatattagagttgggttgtactcttttttcctttctagggttttctcacgaggggtaagtttttacctagaaagggttttagtgaggcctaataaaaaaaaaaaaaaaaaaaaaaaaaaaaaaaaaaaaaaaaaaaaaaaaaaaaaaaaaaaaaaaaaaaaaaaaaaaaaaaaaaaaaaaaaaaaaaaaaanaaaaattaaaaaaatgggggggccgttttaaagaaccaaagttaactaaccctgcttgggggggcctaattttttttttgggggacccaaatttaatttccggggcggggttttaaaaccggggggacgggaaaacccggggggtccccaattttaaccctttgggaaaaatgccccttttggaaggg

SEQ ID NO: 110054 - DNA, 322 bp, Zea mays
  Clone ID: MRT4577_31866C.1
tctcgtaaagcttcctggggccgagtataagataagtttgcctaatgaccatcaaatgattgtgcacttcattcttccggtttacatctaatatgtccacgtgggttatctcaaggcaatcagatcggagaattgtgacaatggaggacttctgttgagtagtttagttactttgacacgaaggatttctgtaagattcagttttttttttacgagagcctttataacataggattgcaaagggaaggatccaatgtaatcctttcttagaatatagggttgcaaagggtccaatgctctttcctaaaaaaaaaaagtcaaa

SEQ ID NO: 110055 - DNA, 307 bp, Zea mays
  Clone ID: MRT4577_31867C.1
tcgaggcacgcgtccggcgacgcgtgccggctaaccctgctgcttacttgtaacagctgcttccatttaaccaacgtgactgtgtcgaactcttgctgcgtacctacaactgcgacgacaggtacttaatgcactagcagggcctaacccattggtcactggctttctacagcagcaacaattgctatccatacagtcagttctctttgatgaaccctgccttgtcgtggcagcaacccaatcgtggaggtgccattttttagatttcctatttatatgttaatcgataatggtgcccttataccgg

SEQ ID NO: 110056 - DNA, 445 bp, Zea mays
  Clone ID: MRT4577_31868C.1
ggaaccaaaggcttggattattctttttttttgactaattaaacaggttttaataaactaacacaggtggcatttaacatcggggggaaagataacaatggggggaagaagatcttcctggggggctttcgattttaaggggaaaaatgactaagcgctacgacccgaactggccctaagctttttaacaagggcctaaagtttttggtaacagaaaaggggaacaaaatggaagagctgaaaaatccaggccaacggcaccaatggcaggggccacctttatcatactcatcatttagagctcggagtgctcctcaaaggccttgtcatccttgggataagagtgggccttgtcataggctggcttggaaaggggggcctaatcctttaaggaaatattgaaataatcgccaccctgtgggggttcctttttttgctgtttttt

SEQ ID NO: 110057 - DNA, 335 bp, Zea mays
  Clone ID: MRT4577_31869C.1
ctacaatggccccacatattaggggatgcctggaactgatcacagtagttctttacacctagaaaattacctcgagcattcttaatcactggtcgcaagtaatgccaattttaaacttgatcccagacaaaatgttaggggcggttgaaaacacttctaccattgtcagttcacgtactctgcgaccttatgttcagactcagctctagatctataagtgacaaacaaactgctcgcccttggcaaccttctgcacagcctcatactccctatacaggacctgtcaagcttcacaccaacatcctatttgtagtcgccatgaacctacatgatgc

SEQ ID NO: 110058 - DNA, 245 bp, Zea mays
  Clone ID: MRT4577_3186C.1
agaacgcggcccaagcgtgttttttttcttggttctgttggaatggaacaatgcttccgtcgtctaatctacaaatggtcagtcaagtcattgatcacctgtcactgccggacagggacgccatgcaccacggttggaagcgcaaggaagggcaggggggggactgaccaatgggagagagacggcgaatgctttgctctatagcaacagtaccaggaccgcgcaacacgcggtagggcgaccgc

SEQ ID NO: 110059 - DNA, 532 bp, Zea mays
  Clone ID: MRT4577_31870C.1
ttgggtacctcgaggccggccgggagatttcccatctttttgttcctcgcgccgccgccgccgtgacggaaggaagaggaggagcaaggagcacgacgcgatgggccactccaacgtttggaactcgcaccctaagaactacggccctggctcccgcgtctgggtaatttcagctggttatatgtagcagctgctttgatctgacgtttggtggtcttactcatggttgtttgatgaaataacctgagccgggtctgcgcgaaccctcacggtctgatcaggaagtacgggctcatgtgctgcaggcagtgcttccgcagcaacgccaaggacattggtttcatcaagtaccgttgaagaggccactgtgctgctgtggagaacttcctacatcaaagaaatgggtccttcattagaaggcctaatttatgtgctttagctttttgttcagaacttgagactcttgtgttacactcgacttgttacagttctgatggctacttgttggaccagctatattcacaagattgaa

SEQ ID NO: 110060 - DNA, 1082 bp, Zea mays
  Clone ID: MRT4577_31871C.1
aaaagcggctgaaaatttggatatgcttcctaaccgataggcataaatatggacaatagttccggcaaaacatcatatggtagcaagatatattatcattagaaatcctaacctggttggaacagtcatgcacaaatagacaaggattgacatgtttgtaaactgtgtagaaacgagaaatctggttgaccttccaaaacatagggagtgcataaaaataccaacttaaaatggagcccaaacagaagtttggagtaataaggataatgcatagggcttccaagtattggacatttcagcagacagtggattttgaagacagggactgtgcataatggtttggaattatggtgtagaaattttaccgaacactgacgtgcatggtgcccctaataacagaatcaaaactgaacaagagtatatacccaaagggaagaacctgcagactgaaggaaactgctcatagtacataggtgctcagaggggttgtaggcgtgctcgacgtcaacaaaatcatggcacacaaccaagacattttatcatacatcgaacaccattatagcaataattatctaaccaattcattcattaactaagtagtcggagaaatgacttgactcaccacatcatgccccgactcgatttcagcaagagcgaagacggccaccagttcttgcatatcatcgaacacctaaggagcgttgaacttaaccttcttctccaccaatttctccagggattttacatgggagcagcagaggtggccggccaccagaaaccagagaggggcagcgtccatagaaaagggaggaagaagacccgggcttgaagacacggctgcgtgcgacgcttgcgcagggaactcgacgacagccgccatgggaagaagagaagggagctcggactggaggagtgggaggccgcggaagaggaggacgccgagctggggactgggcatcgcgacgaggacagaggctgggtggtagcgcgtagaagataatgcaggcggctgaaaaaatctgtagggagagatcggcgtgaagggataaggagcagaggagtttgggcggtgggatacttct

SEQ ID NO: 110061 - DNA, 1138 bp, Zea mays
  Clone ID: MRT4577_31872C.1
cctcgcgccgccgccgccgccgtgacggaaggaagaggaggagcaaggagcacgacgcgatgggccactccaacgtttggaactcgcaccctaagaactacggccctggctcccgcgtctggtaactatcccgcgacgctcccttctctgtatagcaggatctcggttcttttcgcttttttagaatgtggacgacctgcttgtgatagggactccatggatctgttaaggttctcactctttttttatggttagcttagtcccccccgtaaagctctggaaggattaggtttcttggattagcgtgttgctgctgagatttgatgtgcatctctcgtataaactctgctatcttgttaaacatcagaagtctttgtatcctctagtttagtatctcagttcgatgtagagtaatttcagctggttatatgtagcagctgctttgatctgccgtttggtggtcttactcatggctgtttgatgaaataacctgattgatttttagctgatatattctatgactaattgttctattaatgagtatgcgtttggtctgttgtattgtgcatttatgccatagcgcgagacgtaagcagcacaaagggctcttgtttttaagggattgcgatttggtaaaaagatgtggaaatagaccgttttttacctgtatgtgcaaagagtttattttacaatacaacaaaatagcctcggtaatgtttgtggtcttgcagccgggtctgcgcgaaccctcacggtctgatcaggaagtacgggctcatgtgctgcaggcagtgctttcgcagcaacgccaaggacattggtttcatcaagtaccgttgaagaggccactgtgctgctgcggagaacttcctacatcaaagaaatgggtccttcattagaaggcctaatttatgcgctttagctttttgttcagaacttgagactcatgtgttaaactcgacttgttaaagttttgatggctactttgtgcttgttggaccagctataatcagaagattgaaattttctcactcatgatgtttgttcttatcctgcgtgtatgctcagttttctttcttgagttactgtattagctgggcaactgttcctcgcttcatggatgattctgctgaagttg

SEQ ID NO: 110062 - DNA, 460 bp, Zea mays
  Clone ID: MRT4577_31873C.1
ccgtccgggagatttcccatctttttgttcctcgcgccgccgccgccgtgacggaaggaagaggaggagcaaggagcacgacgcgatgggccactccaacgtttggaactcgcaccctaagaactacggccctggctcccgcgtctgccgggtctgcgcgaaccctcacggtctgatcaggaagtacgggctcatgtgctgcaggcagtgcttccgcagcaacgccaaggacattggtttcatcaagtaccgttgaagaggccactgtgctgctgtggagaacttcctacatcaaagaaatgggtccttcattagaaggcctaatttatgtgctttagctttagaacttgagactcttgtgttaaactcgacttgttaaagttttgatggctacttgttggaccagctatattcagaagattgaaattttctcactaaaaaaaaaaaaaaaaaagcggcc

SEQ ID NO: 110063 - DNA, 488 bp, Zea mays
  Clone ID: MRT4577_31874C.1
gccggccgggcccgggagattccaactttttgttcctcgcgccgccgccgccgccgtgacggaaggaagaggaggagcaaggagcacgacgcgatgggccactccaacgtgtggaactcgcaccctaagaactacggccctggctcccgcgtctgccgggtctgcgcgaaccctcacggtctgatcaggaagtacgggctcatgtgctgcaggcagtgcttccgcagcaacgccaaggacattggtttcatcaagtaccgttgaagaggccactgtgctgctgtggagaacttcctacatcaaagaaatgggtccttcattagaaggcctaatttatgcgctttagctttttgttcagaacttgagactcatgtgttaaactcgacttgttaaagttttgatggctactttgcgcttgttggaccagctataatcagaagattgaaattttctcatgaaaaaaaaaaaaaaaaaaggcccctagggcc

SEQ ID NO: 110064 - DNA, 379 bp, Zea mays
  Clone ID: MRT4577_31875C.1
caagggcgtccaaagcccctgtgctcggcgtccttcttccacctccggccgacctccaccttcctgctccatgggtgcccagcagcagcgcccctcccctgctccacagcagcagcagctcgaccctcctctcctcgctggcgcaaacctctcccatggcgcgctgcagcagacgccctggagcatccccgccatggctcgcgacccggcttcctccctgcttgcgtgctgctgcgcagtgccccgtcggtgcttgctatgtgctcgacgaaatgcgcagcaagccacgcgtcgtcgatttcctgcagcagccccagcgtctccacgctctacgggctcgctgttttataaagcgcagtgaacagcacgccgtcgacac

SEQ ID NO: 110065 - DNA, 274 bp, Zea mays
  unsure (1)..(274): unsure at all n locations
  Clone ID: MRT4577_31876C.1
cccacgcgtccgtttatggaggcataaatgggcggtgcatacaattagacagattccgctggcacaagtgttcgctgttaagctatacattgaactagctcaggctcagcgtatagagctctagacctgagggtaatggacaggagaacaagagtggggtaaatgcactagcagagagtcaggatctgtagatggaggcgagagatactccggtgtactccgtgcatggntctaaaaaatcgggcagaaactggatcgtccacaccgttcatat

SEQ ID NO: 110066 - DNA, 587 bp, Zea mays
  unsure (1)..(587): unsure at all n locations
  Clone ID: MRT4577_31877C.1
cattgggtacctcgaggccggccgggagatttcccatctttttgttcctcgcgccgccgccgccgtgacggaaggaagaggaggagcaaggagcacgacgcgatgggccactccaacgtttggaactcgcaccctaagaactacggccctggctcccgcgtctgccgggtctgcgcgaaccctcacggtctgatcaggaagtacgggctcatgtgctgcaggcagtgcttccgcagcaacgccaaggacattggtttcatcaagtaccgttgaagaggccactgtgctgctgtggagaacttcctacatcaaagaaatgggtccttcattagaaggcctaatttatgtgctttagctttttgttcagaacttgagactcttgtgttaaactcgacttgttaaagttttgatggctacttgttggaccagctatattcagaagattgaaattttctcactcatgatgtttgtccttaaaaaaaaaaaaaaaaaaaaaaaaaaaaaaaaaaaaaaaaaaaaaaaaaaaaaaaaaaaaaaaaaataaaaaaaaanaataaaataacaattaaaaaaggcccctaagggcc

SEQ ID NO: 110067 - DNA, 336 bp, Zea mays
  unsure (1)..(336): unsure at all n locations
  Clone ID: MRT4577_31878C.1
aaaagcaagaccggggaccnaaacaancgaaagggaggggaanccagggaaaggaaaggaaagaaaaaaaagggaaanaccacggggggggggccangcagaannacanaaaaaagggcgcaaggaaagagaaannacaaagccaaaaacgcccagcnagcgnaaagancacngggncgggcacaggacgcncanangcgagagcngacaggggaccaacncncacaagcccgaggcagccancgaaaaacgaancnaaaggccnccaaaaaggccaaaaaacaggcgaaggggcacaagaacacggnngaccaccccnacaaaagncaggcccaa

SEQ ID NO: 110068 - DNA, 603 bp, Zea mays
  unsure (1)..(603): unsure at all n locations
  Clone ID: MRT4577_31879C.1
actcctatgggcgattgggtacctcgaggccggccgggaactttttgttcctcgcgccgccgccgccgccgccgtgacggaaggaagaggaggagcaaggagcacgacgcgatgggccactccaacgtgtggaactcgcaccctaagaactacggccctggctcccgcgtctgccgggtctgcgcgaaccctcacggtctgatcaggaagtacgggctcatgtgctgcaggcagtgcttccgcagcaacgccaaggacattggtttcatcaagtaccgttgaagaggccactgtgctgctgtggagaacttcctacatcaaagaaatgggtccttcattagaaggcctaatttatgcgctttagctttttgttcagaacttgagactcatgtgttaaactcgacttgttaaagttttgatggctactttgtgcttgttggaccagctataatcagaagattgaaattttctcactaaaaaaaaaaaaaaaaaaaaaaaaaaaaaaaaaaaaaaaaaaaaaaataaaaaaaanaaaaattaaaaaaaaaaaaaaaaaaaaaaaaaaaaatgggggcgggccgttttaaaaggatccaagtttac

SEQ ID NO: 110069 - DNA, 309 bp, Zea mays
  Clone ID: MRT4577_3187C.1
atggagaatcagacgcaaagggaatcttctattagaagactctcaatcagtgtcatcaaagaggagtcttcatatggtatcaacaaaagatcacaagtaaagttgaaggataatgaatatgtggaacttgatgtgcttaacctggagacaactgatcgaagtaaggacaaaggcaagaagaacttcgagggaccgattgcacgtgagaaggtcaagaagactgaggtacctaaagccaggggtgaagaagatggcttgcaagaagtcaagggtgttggagctcaagggtgtcttatgagatcaagttag

SEQ ID NO: 110070 - DNA, 321 bp, Zea mays
  Clone ID: MRT4577_31880C.1
agcatgacgctgcgcgttgcgtgccgccgcggcttcgccgaccagcacgctaagatcgactcgatcatggacctgtgggacaacgtgttcgacacgcactgccggttcgacgtgcacgtcatgctggtgctcatccaggtcagcatctgcgtcagctaccgcatctgcatctccatcatcatggcgcacatcaatccgcatgccgcgtcgtctgcctccgcgctcttctccgcgatcgtgctcgtcatcggggtcatgatgcctttcaagctggggctcaactcgatgatcacgctgacgctgctcgcgccgctcagcatc

SEQ ID NO: 110071 - DNA, 1293 bp, Zea mays
  Clone ID: MRT4577_31881C.1
ccggccggatatagtatccaccttcggccgcaccttagatttcccatctttttgttcctcgcgccgccgccgccgccgccgtgacggaaggaagaggaggagcaaggagcacgacgcgatgggccactccaacgtttggaactcgcaccctaagaactacggccctggctcccgcgtctgccgggtctgcgcgaaccctcacggtctgatcaggaagtacgggctcatgtgctgcaggcagtgcttccgcagcaacgccaaggacattggtttcatcaagtaccgttgaagaggccactgtgctgctgtggagaacttcctacatcaaagaaatgggtccttcattagaaggcctaatttatgtgctttagctttttgttcagaacttgagactcttgtgttaaactcgacttgttaaagttttgatggctacttgttggaccagctatattcagaagattgaaattttctcactcaaaaaaaaaaaaaaaaaaaaaaaaaaatatatatatcgacatgggaaactgcctggtgattcaacaagcagacgacaggaaggagatcaagatcgtgagcgtcgtggacgacggcggcgtcctggacacgccatcgtcgtccccggcgggcgcgcgcagcctgacgaaggtcccggcggccggagccgccgccctctgcgagcccctgctgccggctgctggcggcgccgcctccgtcagggtgaagctggtgatcagcaagcaggagctcaggaagatgctcgacaaggagggcgtgtcgctggacgacatggtgtcgtctctcgtgcgcaaggaagcgagcggtggtggccgggaacaggagctgcaggagctctgttgcggagggtggcggcctgcgctggagagcataccggaaggcagcgatctctagcacgtacttcctgctgggcatcgttcgtcgtcgttcaggtgtcttgtggaagtcacaggatcagtgtcagtggtcgtgcctacactgcatgcatgcaagaagctagttacgcatgatactttttttgggggaatgagcgtataattaagcaaaacatgcgtgctctgggtatagcatatacacacacatgtagagtagactattatatacatacccatacacatacacagagagagagtatagatacagatggtaggagttttgatatagggattctcttcatcttttctttctgcctgcctgcatgcttgtaaagaagaggtaaagatgatcctggaaatcaagcaaaggttttatacaaaaaaaaaaaaaaaaaggccccta

SEQ ID NO: 110072 - DNA, 627 bp, Zea mays
  Clone ID: MRT4577_31882C.1
cattgggtacctcgaggccggccgggaagctttaccatctttttgttcctcgcgccgccgccgccgccgtgacggaaggaagaggaggagcaaggagcacgacgcgatgggccactccaacgtttggaactcgcaccctaagaactacggccctggctcccgcgtctgccgggtctgcgcgaaccctcacggtctgatcaggaagtacgggctcatgtgctgcaggcagtgctttcgcagcaacgccaaggacattggtttcatcaagtaccgttgaagaggccactgtgctgctgcggagaacttcctacatcaaagaaatgggtccttcattagaaggcctaatttatgcgctttagctttttgttcagaacttgagactcatgtgttaaactcgacttgttaaagttttgatggctactttgtgcttgttggaccagctataatcagaagattgaaattttctcactcatgatgtttgttcttatcctgcgtgtatgctcagttttctttcttgagttactgtattagctgggcaactgttcctcgcttcatggatgattctgctgaagttgaatgatgactattgtactcaaagtgtatatgctgagattgaaaatttctgct

SEQ ID NO: 110073 - DNA, 372 bp, Zea mays
  Clone ID: MRT4577_31883C.1
accgaccacagccaggccattaccctaaacccccaattggccgaagcctacaaagctagggggaaaatttattggcaattaggagagcaagcccaagccattgctgacctagaagcggccctagcccttttctctgaccaggaaaatcttgtgagccaacgggaagcctgggaacaactgcaaacatggcatggtaatccttaagagcctgtttggaaagttttattccgccccctaaatcgacccactaaagctccggcaatactggaggactttcactcatttccccccaaatttggagggccaggggggcttttcaaacacgttcttaaataggccccaatatttcttctcaacttctccgacagtttc

SEQ ID NO: 110074 - DNA, 713 bp, Zea mays
  Clone ID: MRT4577_31884C.1
gggtacctcgaggccggccgggccgggagatttcccaactttttgttcctcgcgccgccgccgccgccgccgtgacggaaggaagaggaggagcaaggagcacgacgcgatgggccactccaacgtgtggaactcgcaccctaagaactacggccctggctcccgcgtctgccgggtctgcgcgaaccctcacggtctgatcaggaagtacgggctcatgtgctgcaggcagtgcttccgcagcaacgccaaggacattggtttcatcaagtaccgttgaagaggccactgtgctgctgtggagaacttcctacatcaaagaaatgggtccttcattagaaggcctaatttatgcgctttagctttttgttcagaacttgagactcatgtgttaaactcgacttgttaaagttttgatggctactttgtgcttgttggaccagctataatcagaagattgaaattttctcactcatgatgtttgttcttatcctgcgtgtatgctcagttttctttcttgagttactgtattacctgggtaactgttcctcacttcatggatgattctgctgaagttgaatgatgactattgtactcaagtgtatatgctgagattgaaaatttctgctacatacatagttttacctttgataaaagttttcctcttaaaaaatcaagaaaggaacacctcccctgaaggggtccctagggac

SEQ ID NO: 110075 - DNA, 948 bp, Zea mays
  Clone ID: MRT4577_31885C.1
agtcctccacctcgctcctcgcagaaaggaatcgaaaaggagcaggaacaattgtatcctctcatggcacaactcatgagaagttgcatcacagaatttatagccgctcctctcttggttcttttgatcatggcttcaacgtccccgtcctttcaagtgcatgtgaagggcgacgatggccgtcaacatggatcgccggcgcttcggcagcgactggcggcggcgacgtgcttcgagaccactgccggcttctgttgggtgaagcaatgccagagtttctgcgcatcaaaaggcttcaacgccgagagtgctttctgctataaacggcctggttctggccgtcttcatctctggcagtgctgctgccaaccataagagtacgtagtgcaaatgtatgcatcgatccatatatggttgacatgcaattgtaaactgaataaggtttcgctgttctaaaaaaaaaaaaaaaaaaaaaaaaaaaaaaaaaaaaaaaaaaaaaaaaaaaaaaaaaaaaaaaaaaaaaaaaaaaaaaaaaaaaaaaaaaaaaaaaaaaaaaaaaaaaaacccccttcggcctcaacccctcccccgttaagccaaaaaccctaaaatttaatccccctccccccccttttttttcggggggggggaaaaaaacagaaaagggcgccaccgggggccgccctttggggaagggcaacccccttcttaaaatttccccccggggggaataccccctccctacaaaagtttaacataagcctaaaaaagccctttttcgttgggaaaaaccccttccctttttataacaagtggcttacaaaaacaaatgttaaatttttgcccgggggacccccccaaacctttttaggggtgcccaaagggtgcctaaaacccccggggccacaaggttcctgggaatccatggaaaggaccagttttgggggg

SEQ ID NO: 110076 - DNA, 569 bp, Zea mays
  Clone ID: MRT4577_31886C.1
aaacaacacccccccaaaagggggggtgggaaaaaaagggattcccaacaaagggaaattgtataagtctttttttggtgcccagtttatataccggcccaacccgccccaggtcccctgaagcctgggggaaaagagcacaaaattttttcctaaaaaaaacctctttaaaatgggaaacgaaacccaaaagcgggagggggacacccccccccttatttaaaatactttcccccaaaacccttttgttttttaaaaaattcgttgggggctaaattccggaaaggttggggtttggttaaaaaatttgcccattttggttggaaaatttttttggcccttttccaccagaacgggggggggtttatttgcctcccaaaaaacagggtccccctttgaaaaaaaagggcccctcccccaaaactgaaaaatgttttcaattgggaggtcaaacccattaaccacccttttaacggggtcaaaaaaggccccaaccgggtgggccccaccaagggggcctaaaaagggccttttggaaaaccttggacccggcttccaaattttttggg

SEQ ID NO: 110077 - DNA, 253 bp, Zea mays
  Clone ID: MRT4577_31887C.1
ctctctcacacacacattgtcgatgtcgcctgccttcccttccttgcccaggtgagttccccccgcttttccggcccccggtccccttccaccgacccaccatgtctacgatgaggtgaggtcgaggccaagtctactctccgcgaccgtctccgacgccatcgccaactaacagtatgctacatcttggccatcttgcacacgaatacaatacactacttctggtaaaaatataagaccggggcaaggcgcc

SEQ ID NO: 110078 - DNA, 1040 bp, Zea mays
  Clone ID: MRT4577_31888C.1
ctccgctttggatcttgaaaaagtgaaggaaaaaaacttgcagcgtcttgtccatttgtcttccgacctagctaggcatgttgccatggttctggagaatgttcagacatctgaagagaataggaaacttggaagtgtaccttctataaacacaagctcatgtggtcgtccatcaaccaaagaggagatcaatgaagtccatcaagcgaagcaaaagtttgttgaaggagcaaagaaagaagtccgagaccgccgtgcccgtcgtatgcagtcatgtgaagtaaccattcatccaatcacaccggccacacttctggattcaatctgctggacaatctctgagccaacttcatctgcgtcaatttatatggactcttcgtggtccgatgatgccaatgagcagcaaagcaccacttactttgatgcaaatggggacgtgagggatccagatcaacctaatgacaatttttcccgtccactgacgcgtccggagcgaagtgagctgatcttcaagaatcacttccttaccatactcttccctgttgatcgttttggagaacttggaccttcctcaaagacgttctataacaatggtggctttacgtgtatacaagtactgaatcacatttacaacttctaccaggagaacatgtcaaccaacgagatagacatggccttgcacacagattcccgccatgctgaccgacttcgatctttgtattcgagtgctgaatcagcagagaaaggacttgtagctttcaaaagaatagacttcttaggaagcagaagaagttttgaggcactaaagcgcatcaacagggaaaatagtagtaatgtatatgagcttgtgattagggcatgaacgcaccacactcaggtgcctttttgtcaaaatttgtgttgacttatatctagcgaggatgtagcatcttttgcagaacaaagatgtactgtagaaaataactccactttctttcaggagcatatagtgtaccgataagcctgaatgtttacttattaaacgatccattttgaaggct

SEQ ID NO: 110079 - DNA, 989 bp, Zea mays
  unsure (1)..(989): unsure at all n locations
  Clone ID: MRT4577_31889C.1
ctctctcgcaaacgcagcagcagcagcagccgcggcacggcccgaggtcggaggtcgggtcgccccgcgaaatcccctcgcgcaccacagaaaatcctccagccacctccaccgccggcgctacgctctctctccgctcgccgcactttggccggcttcgcgctcgcggtagggggatacagagggagatctgggccccgcgacttggatttccgcccctcccctgcccgcccgccgcgctggattccgcggcctccgcctcgatcccgccgcagggcccccactctggtattatggtcatgaagatggagcttgaggacgatggtgccttgggaggaactgctggcacgtggacagaggaggaccgaggtctcggcgctgccgtgcttggagccgatgcctttgcatatctaacgaaaggaggtggtgccatatccgagggccttgtctccgcgtctttgccggatgacttgcagaacaaactccaggagcttgtcgaatctgagagccctggtaccggttggaactatgccatcttctggcagctctcgcgcacaaagtctggtgatctcgtccttggatggggggacggctgctgccgtgagccccgaggtggggaggtgggagctgctgcttctgcaggcagcgatgataccaagcagaggatgcgcaagcgtgtgctgcagcggttgcacatagcattcggggttgctgacgaggaagattatgcccatggtattgatcaggtcactgacactgagatgttcttcctagcatctatgtactttgcttttccccgttgtgctggtggccctggccaagcatttgcagcagggatccccctctgggttcccaatagtgagcgcaaggtatttccggccaactactgttaccgggggttcctcgcanatgcggcaggatttaggactattgttttggtgccatttgagagtggtgtccttgaactggggtcaatgcagcacatagct

SEQ ID NO: 110080 - DNA, 727 bp, Zea mays
  unsure (1)..(727): unsure at all n locations
  Clone ID: MRT4577_3188C.1
gatttcgacaatcggaactcacatgagtgtacactcatattacccagcaagtaccatgccgacttgcttgcaacacaacttattgctcggatggagaaagaaggctatgataaggcagatgatcaagttgtgcccagcaaccctcctggtaacctcagtggactatcaggcatgttagcagacaatacagccaatgaagtgaaacaagagggaggtataacccagcaacttaatgctgcagcccatgcaaatatggtatctggaagccctttgcaacaactttctgccaataggatgcttccatctgggagtagcaaccaggcagtaccaatgcagcaagagtatatgcagggtgcaaccatgtctccaaggagtcaacaactcgaccaaaatttaatccagcagcaacaacatcagcagccacagctgcagcagaatgcacaatcacagcttcagcaacaaacatctcttcctctcaaccagatgcagagaccccaactgctaccagcaagcccattatctcagatgctggggcctggctcaaatctcccaatgggctcgaaccacacgagtaacaccaaggctactcctgcttccttgcagcttcatatgatgcagcaagtacagcagcaacagccagtgcagatgtcaagaaaagtgatgatggggcctggctcatctgtgaactgggcaacatggttaacaatgagaagngcctcagcggtct

SEQ ID NO: 110081 - DNA, 331 bp, Zea mays
  Clone ID: MRT4577_31890C.1
gttcggtatcgcgttgtcttcggtacacctttcctatccgatcgctacgagaccccaccccgagcggacctattctgaccccaacgaccactctctccgtcacaagtaatggcatacggcgaccgcattaccacctacgaagactgacacaacgatatcgagcaacgctatccgcactatgcctatggacctctagttgtagctgatcaactgggtgctgctcccatgtatgaacttgatcgtcaccaacatgatagcttcatcgaacaaaccatccgtcttgagcacgattcacatacaatccacgttcatcaggaaacacttcaactga

SEQ ID NO: 110082 - DNA, 267 bp, Zea mays
  Clone ID: MRT4577_31891C.1
aaaaaaaaagggcccttttttccctgtttatattaaaaattttgacaggactgcaaattttgcaaaatttaaattggcccggttgagggaaaaatttaacaacttttgtttaccaaacaaataaattttccaaaaaaccctttataattttacttttttggcccatttatttacaagccttaattaaggccttaattaaaaaaaaaaggggtaaatttaaaaccctttaacttgaaaaaattgtttacccaaagaaaagtttttttt

SEQ ID NO: 110083 - DNA, 305 bp, Zea mays
  unsure (1)..(305): unsure at all n locations
  Clone ID: MRT4577_31892C.1
cggtaccgaattccaattgcgggcgcgctcgccctttttttttttttttttttttttttnggagcgggggacaaaacttcaattacacacgacacatttctgaatggcattgactgagttccatttacacatttactcgcgaaccccatttaacttgattcatagtttaagctggggcataatttaaactttccttacttttttttgtctagagtttgtttttttatcacaatttaaatttttggatcgttggttttttggaggccaaaaaataaaaactttctttacttttatagttaaccttt

SEQ ID NO: 110084 - DNA, 325 bp, Zea mays
  Clone ID: MRT4577_31893C.1
aaaaaaaaaaaaaaaaaaaaaaaaaaggacaaaaaaaaaaaaaaaaaacaaactaacaagggcggggcgtataaagaaataggtggtagtatcctgacacctaaataatgattcgggggccgtcgttttgggggcgtcgtgtctggggtcccctttgcgttccccaacttttttctctttgcgccccttttaatctttcgcctggtcccattttatccgccgtggctttctcccatcccccttgggaacccctccgcattccccatggtaatcggcccgctccctgtcccggttttttaacctcgggggtctgtccggttgcccc

SEQ ID NO: 110085 - DNA, 1037 bp, Zea mays
  unsure (1)..(1037): unsure at all n locations
  Clone ID: MRT4577_31894C.1
ccgtgccacccgtccccgccccgatccgtcaacttagatttcctcctctccgagagtcccccaccgcacacagagatttcctcctccccaattcgcccccaccgtcgtgtccgtcatgcagatatttcctcctccccaagacgtcccaccccacatgcccgagtcgtcgaggcatactcttgcctggctccgacatccacgcacatctccacctcgcctcggcgttgtcctctcgccatgccgcagcacacgtccgcagcgacgtccatctcggtgccggcctcgcgcaccgtctacaactcccttccaggagttgtctcaccggcgatggctcccgactctgctcctcctctcagttctccctccacgtttcaccttctctcccttcctctttgggcatcgtcctcctcgcctagatccggcagtcacgccacacactgtctctctgtctgtacatttggatctgttagatctgtgaatagaatattgccgtttctttttctatggtttcctcgcagatgaaggagcagatgaaggatgtgattcttcctctttgttgggtccccacatttcctaccccacctaatatcgctccttaaaatttgcaccatctgttgctgatcctaattgccaccgctgctggttggttggttgcaagcagggaggggctgggagagcgcgacgcgcagtcgtctaccataacttcctgatggaggcggatacagtcacgatatgtgaatagaatatatgtctggcgagtaacaaaaccccacccacttacaagcattgatattctattttttttttacatttactggatgcgaagaaacaaatgtgctacatgctcagtagatccttgaaactcacgtgacatgaatgcgtctgcattctatagtcgtcaaagaaatttttagttatttgcacttatttgttttaaaagcaatgccaccaccacgacctctccgtctatgcacgcttnctcttctgtttaatgttcttcgcgtcatctcattcttatgactgagtttgatagaatc

SEQ ID NO: 110086 - DNA, 238 bp, Zea mays
  Clone ID: MRT4577_31895C.1
cccacgcgtccggttgaagcattggaaggatgaatttatttctacactgcagcattattggttgggcactaagctactctgggcagatgttagaatctcatcaaggctgttagttaaacttgctagtggaaagagcctcacaagacgagagaggcagcagctcacacgcacaacagcagatctattcaggctagtaccttttgcagtttttattatcgttccattcatggagctcttg

SEQ ID NO: 110087 - DNA, 340 bp, Zea mays
  Clone ID: MRT4577_31896C.1
agggaaagcacgacgaaacagatgcatcgctcaggctgcgggtatgcgcctactacacccaacggaccgtctgccacgcaccaggaccaaccacaagctccaccaagctgcgcacgcatctcaagcagaggaaacatacatagccgactttctcgcatgagcttaccttcggacacgtcccacatgagatgacatgttcttaacacctgatctaattaggcttttacaacagcacagagagatctgcaaatgctggttagctgcacggttattggatctatctttgccaaatacctgtaatactgttgcaaccaggggattgcaccttgtatttttatga

SEQ ID NO: 110088 - DNA, 457 bp, Zea mays
  unsure (1)..(457): unsure at all n locations
  Clone ID: MRT4577_31897C.1
gtggagctggtcatactcccgctgggcgtcctcaagtccaactctgtcgcgttctcgccccctttgcctgagcggaaacagacagccattcaccggctcgggttcggcaccatggtcaagattgtcctgtacttcccgacctgcttctggcccgaggacaagcacttcatcaactttttacccatacccaacagtatacccaatcctaaactctgtcgccacctcaacaggcgacagatggcggccttgaaaacatacatgaatgatctcgccaactatacgtcgctcatgcccatccacggggcacccattctgattgcatacgcagccaacgactcggccgaggtatttggaaagttgacggaccaggaggctatggaggtacttgtttgccagctgtcgcattattttgacgtccttgtcaagggagntggcgccacaaggcccactcgcacgt

SEQ ID NO: 110089 - DNA, 627 bp, Zea mays
  unsure (1)..(627): unsure at all n locations
  Clone ID: MRT4577_31898C.1
atcactagttcaataggttcnnnaaattaaaaaaaaaaaaaaaaaaaaaaaaaaaaaaaaaaaaaaaaaaaaaaaaaaaaaaaaaaaaataaaaaaaaaaaaaaaaagggggcctcttctcgccctcgttccgccgccgccgcggcagcggaataaagcacccgccccgcggacccctgaggaatacccaatcccgccgcaagggggggaatgaacagccggggaaaaccctcccggcctcggccccgaaacacgggggttatggtttcaaggggggcaaatctgggtgctaatggcggttgcgggcccccgagacgcagaaaggaaattttactggtttggcggccgaacaaaaggaggcctcctaccggtttcaaaaccgctgcctccgagggggaggaaatgatcacaagggtagggaaaaaggaataaatgccgtcgaaaaagggggtcctgttccgggaccagcacggtatcccccttgtcaagagcgtcaccggaaaaaaaaacctccggatcctcaaggcccaggggttggcgccaaaaatccccaaggaccggcacctccccatcaaaaaggaggggcggaaaagaaaccactttggaaggaaccggaaggaaaaagac

SEQ ID NO: 110090 - DNA, 289 bp, Zea mays
  Clone ID: MRT4577_31899C.1
ctataaaaactccgatttttcgtttaacaaattcaccttttattacgctttccgcaaatttttataatgcctactcaatatcacacttttaacacctataaaattcaatcatcaccacataataattttatacatacttccaatttcccatcatttactcctctccttattcatattcacacaaattacttcaacactcttatactttaacaactatccatatatatccattatcatttaaattacaatattcattcaactttttactcaactataaattaaccatcac

SEQ ID NO: 110091 - DNA, 695 bp, Zea mays
  Clone ID: MRT4577_3189C.1
cccccggtacatcacttagcaaatctagcctcttatcatctccagctgagctcagcaccattactactgcaaactcgatagggatggctcgcgctgcagctattccgctcgtgctggtcgccttggtggccgctatgctcctcgtagccaccgacgcggccatctcctgcggtcaggtgagctccgccttgagcccctgcatctcctatgcccgcggcaatggcgccaacccgactgcggcctgctgcagcggtgtcaggagtctggccggcgcagcccggagcaccgctgacaagcaagcggcgtgcaagtgcatcaagagcgctgccggtgggctcaacgctggcaaggccgccggcatcccctccaagtgcggcgtcagcgtcccatatgcaatcagcgcttccgtcgactgctctaagattcgctgatcaaccactgcccaccatggctgccgtccatagcgccatccatcaccgcttagtatgctgaggtctctaatacatatgaataaatgctctgatctgatctccatgtgagggagaaaggagtgcgtacgccgagctagctctgcatggccggcaactattgtactactactatggttgtttttactttcactacctttgaggagaaccgagactttattgtacgttttttcgcgtacacttccagtatatatatggattatgctt

SEQ ID NO: 110092 - DNA, 1801 bp, Zea mays
  Clone ID: MRT4577_318C.1
ccggaattgagtcatcgtagagataggcgtcttggtagctgcgctctacacttcgaggctcaaacctttccaccttctcccaattcccgacgccgctccatcccgtaacgcgacaccgtgagggagtgcatttggatccacatacggccagtgccggtatccaggtcggaaacgcgtgctgggagctgtactgacttgagcatggaattcaggctgacggtcagatgcgcggtgacaagaccattgggggaggtgatgatgctttcaacaccttcttgcagtgagactggtgctgggaagcacgtgccccgtgctgtttttgctgaccttgaacccactgtcatagatgaggcgaggactggcacctaccgccagctcttccaccctgagcagctcatcagtgggaaggaggatgcagtcaacaactttgcccgtggtcactacaccattggcaaggagattgttgacctatgccttgatcgcatcaggaagcttgccgacaactgcactgggctccagggcttactcgtcttcaacgctgaaggtgggggaacaggctctggccttggttccctcctactagagcgcctgtctgttgactacggcaagaagtccaagcttgggttcactgtgtacccttccccccaagtttctacttcggtagttgagccatacaacagtgtactgtccacccactccctcctcgagcacactgatgtggctatactgctggacaatgaggccatctacgacatttgccgccgatcccttgacattgagcgcccaacctacaccaacctcaacaggcttgtgtcccaggttatctcatcccttactgcctccctgaggttcgatggtgctctgaacgtggatgttaacgagttccagaccaacctggtaccctacccgaggatccacttcatgctttcttcgtacgctccagtcatctctgctgagaaggcctaccacgagcagctctctgtggctgagatcaccaacagcgccttcgagccatcttccatgatggccaagtgcgacccacgccatggcaagtacatggcctgctgcctcatgtaccgtggtgatgtggtccccaaggatgtgaatgctgctgtggccaccatcaagaccaaacgcaccatccagttcgtggattggtgcccgactggcttcaagtgcggcatcaactaccagcctcctagcgttgtgcctggtggcgacctggccaaggtgcagcgtgccgtgtgcatgatctccaactccaccagtgtcgtggaggtgttctcccgcatcgaccacaagttcgacctcatgtacgccaagcgtgccttcgtgcactggtacgtcggtgagggtatggaggaaggtgagttctctgaggcccgtgaggacctggcggcgctcgagaaggactacgaggaggtcggcgctgagttcgatgagggcgaggatggcgacgagggtgacgagtactagagaagtttgctgatgacgcagcatcaggccagtgtgctgcccttatcccgtgatctgccgtgagttgctcctgctatcgtgttatgtgtgtctgttatgaagtattgtgtggtttacaacacctgatgttgtaagagtcgttaattcccctgcattgctaccgggttattgagaataattatggctgtttacgttgttgcttcatctcggggatgctttacatttaccaccttgttcatcttttgtcatcagtaaaatcgagtcggcggatgtttttcttgcgtcttgtcatgagtattgagtagtatggattgtttgatgtttt

SEQ ID NO: 110093 - DNA, 658 bp, Zea mays
  Clone ID: MRT4577_31900C.1
atgtgggtacgcgcggccccccctcgagtttttttttttttttttttttttttttttttttttttttttttttttttttttttttttttttttaaaggccccacatttattttttcccaaaggcatcacaattataaaatctttcccaactagatcttttacggaggggtggttaaatctttcacaaagcccccagagaggatcagccaaaaaggccccacggggacttccttccggttggaggcagttaaaagccccacaacaccctaataagggtttaaaacccccccagttttggttaaaagccccacaaccccataattatttttgggggggcctaaggtttaattttcccccgaaaacatccataagaagtttggggggggttatccgggggggtttcaccaaagctttaggggtcctcagaaaaattggggttaaagggggaaaaagcccatggtttaaaaaaaaactaccccctccagaggggtaaaatttttcgggggcgcacgggaaaaaacccccttcccccattttggcaggggtcttattttaaaacccagtcctattttccggggggcaaaaattatttttttttgttcaacagggcccccgttttttgttccccaataacccttgaaaaagggcccccccccaa

SEQ ID NO: 110094 - DNA, 387 bp, Zea mays
  Clone ID: MRT4577_31901C.1
gagaaattccccatcgatctcggtcttcttttttcttccttttttggggcatggatcgcgccggcgcattggcggccggcgtggaggaacccgtcagggccaccttcgttcttgacaggcttggcgcggaggtgcttgcggtcatgtccccggtcttcatctgcatggccctcgtcgtgctccttattttccttcttttgccggcggtctacgggttcgcggcgggttcgcccccgtcagttatcggtgtcacaattgtttaccttgtggtcccttacctactcctggtcctaaagcttctttttgagcttttttgtctccttcttatatttttccttttttactgtttaacctttcattcattttattgttttaatttttctgcta

SEQ ID NO: 110095 - DNA, 300 bp, Zea mays
  Clone ID: MRT4577_31902C.1
aatgagcgtcacggtcgaaaccgatgggttcgtgcattctcttcctcacggacatggaggatataacagctgcgccaaggatagtgtcttcttccgcggtgaaaaccgtgggtgcagcaccggttacggggacttcatcctgtagtggtactcgcagatgctgctggagcacggctacatcatcctgtcgggcaccacttccgtgttcggatccgcgcccgtggacgtctccgtgaatgtgggaggcatccactgggactaaggcagacggtcgcagaccccatgtctcatcgctggcta

SEQ ID NO: 110096 - DNA, 286 bp, Zea mays
  Clone ID: MRT4577_31903C.1
ggggggggttctgtagccgggggtgcctttcgttttcttgctgagcattgtgcatggggattgtgaaaacaaaagcgccgtctggcgggcggtttttgaagaacatggcgggggccgagattcaaaaaggcggccccccaaatgcgggggggggcccaacccgggcgggcactgaatgtggccggggccccgagttttctgggagcaaccaggggggaaagagggggaccccgggctaccacaggccccggcgcggaaattcacccactggaagggccggggggaa

SEQ ID NO: 110097 - DNA, 172 bp, Zea mays
  Clone ID: MRT4577_31904C.1
aagagtatgacgacgacgcccgcggacgtaatgctcggaatccggctcgagcgggaacacaatttttccacccgccgtacaggccgatcccagggggggatttaaaagggttatctggttcttccccctcgaaaagcagttcagacaggatagcccaagtcagaagaggagg

SEQ ID NO: 110098 - DNA, 834 bp, Zea mays
  Clone ID: MRT4577_31905C.1
ccggccgggagcccctcattgtggtcctccctccgtgcaggaggtcctgccggcgggtccgccaaacacagcgttacggtggacccacatgtcatccatggtgcgtagcttgcaggcgggttcgaatccccaaatcacagtcagacgcggagcaccgtagtgactcgcggtcgtgcaggtctgggcttttttcgcggaagcggtaagcgcgtagggaggacgggagagagagataggcgtgccttcgtcgtccgtgccggtgcgtggcgtggtggccgtgccgaccgtccgtccaccccctctcctcttcccggcgccggcgacagcgggagggactccctgggaggaatggccgtggtgagggctccgctcggcgcggtggcggtggccgctctcgtcgtcgccatcttcatgccggccgccgcagcggcgcaggcaccggcgcccgcgcccaccagcgacggcacatcaatcgacctggggatcgcgtacatccttatgctggtggccctggtgctcacctacctgatccacccgctggacgcgtcctccccctacaagctcttttaatctctgctccttttcgtttggtcatgcggttatgggtgctataggaattttaggtgcgcgagatgtttaggtgaggttgggaggtttagaatgatgatgattgcaatcatttgatcttggtatgtatccaaggctccaagccgttggtgttctgattggtttgtaattgtatcggattccattatctttgtgctcagtccctgatttgctcctgctgaaaaaaaaaaaaaaaaaaaaaaaaaaaaaaaaaaaaaaaaaaaactc

SEQ ID NO: 110099 - DNA, 274 bp, Zea mays
  Clone ID: MRT4577_31906C.1
atgccattgtaggtgtatgaacgttctacagcattcatgatactagacatgtgtaacactcagcagacatctgatctgggctctcggttggtactgcatgcatcccttcatttaaataacctgtaaataacatcactttgtggcagctaagcgaatattttaataagccatgagatgcatgatataagacatctgtactttcaggtgtttggggataaacattgtaccttccatatattaaagtggagttgccgtttgaaatttctttccctta

SEQ ID NO: 110100 - DNA, 116 bp, Zea mays
  Clone ID: MRT4577_31907C.1
ccaccatccacacgctagagacgcactatgcgagcttagctacagatcatcgtcaagcagtcgggcacgatctctcgaaggcagcagctgctagcgacaaacagcgcaattaatgg

SEQ ID NO: 110101 - DNA, 742 bp, Zea mays
  Clone ID: MRT4577_31908C.1
ccggccgggaagccatcagcgctccctccgccgagcaggagaatcccctccaccgccatcagcgctcgcctgaggccggaggggaccctttcgtggctgccggtatcctgtcctccacgcaggacacgcacccgccgcagcccccgccgccaccggatctctcgccaaggacaggctggtgcaggaggccactcccagatcccgtcatccgccgccattaacgccctcctgctagatcccgtcattcgctgcgaatctccattcagctccccctcgcgctttcatcgtcgccgtggaccgctcgctggcgctgacctctcccaagcgcggcacagtggtgcgggtgccgtacaaggtctcgatcccgctgggcagggtgaagacgaccacgccgggtgggaacaaggaccggccggagcagaagtacgtgcaggcttcgagttctggttcatgggcttcgtcaggtaccaggtgtccctgcacgaactggagaaggccatcgagcaggcgaacgttcggggccagatccaccgactcccgtttgacggcctcgcgttgtgcttttgtgtggctattcgttcactggagaaggccattgaactattgagaatcttggagcagttggctttgttgttgctgtggagaaatttacccaggaataaaatttgaccctgtaccagtcagcatccctagaattctcatcacagatgtcagcaaaaacggaggatcttatagactacta

SEQ ID NO: 110102 - DNA, 1106 bp, Zea mays
  unsure (1)..(1106): unsure at all n locations
  Clone ID: MRT4577_31909C.1
tataatccccaagccatcagcgatccctccgccgagcaggagaatcccctccaggcctccaccgccatcagcgctcgcccgcgcagatctcgctctcagcgctcgcccgccatccgctctccatgcttagggtccgccatcagcgctcgacacattcgcctggctgctcgacgcattcgccagcgccaccttcaaccagatcgactccgcctaccgtgaggccggaggggatcctttcgtggctgccagtatcctgtcctccacgcaggacacgcacccgccgcagcccctgccgccaccggatctctcgccaaggacaggctggtgcaggaggccactcctagaacctgtcatccgccgccatcaacgccctcctcctagatcccatcatccgctgcgaatctccgttcagctccccctcgcgctttcgtcgtcgccgtggaccgctcgctggcgctggcctctcccaagcgcgacacagtggtgcgggtgccgtacaaggtctcgatcccgctgggcagggtgaagacgaccacgccgggtgggaacaaggaccggccggagcagaagtacgtgcaggcttcgagttctggttcatgggcttcgtcaggtaccaggtgtccctgcacgaactggagaaggccatcgagcaggcgaacgttcggggccagatccaccgactcccgtttgacggcctcgcgttgtgcttttgtgtggctattcgttcactggagaaggccattgaactattgagtaagaggaaagttcaggggagaattcttttgtgtggctattcgttcaattacatttctgggacagcatcaataaagaaagtatctcacacgaccaggaatcttggagcagttggctttgttgttgctgtggagaatatttacccaggaataaaatttgaccctgtaccagtcagcatccctagaattctcatcacagatgtcagcaaaaacggaggatcttatagactactacaattcttccaccataatagattggngctgggaagggctacaaccttcaaagcaacagcagacatacttgctcctggcaatctcatatgggctgcatgggcgcctaatggacagatgatc

SEQ ID NO: 110103 - DNA, 183 bp, Zea mays
  Clone ID: MRT4577_3190C.1
cgcgtccttagtacatttgaactttgttcgtttgcattgtactattgcttgttgtttaagtatctgttaggtgagggagtcttacgctgtgctaccataattgaagtactcctgtcctgtcctgtctctgtgttagccttatgtacaagcaattataatgtcttttaattttacaagactaaa

SEQ ID NO: 110104 - DNA, 586 bp, Zea mays
  unsure (1)..(586): unsure at all n locations
  Clone ID: MRT4577_31910C.1
cgaaaaaagtggccactctgctggccctcaacctcctcttgttggccttcgccgacgcatgcggctgcaggtgcggcggatcctgccctagtccaggcggcggtggcggtggaggatctggtggtggtggtggtggaagcggtgggggtgggagtggagggggtggatcgggtggtgggagctgtgggggggggggggggggcggaggatctggtgggggcggcatctgtggtggaggcggagacaatcttggtggaggcggatgaggatctgctgagtggccggctaagcactctgtggaacgagcattcgttgccccgtggacgccctgcaactgactatgagcatccaattgctgaacggcctcatcaacgctaccatgttgaccacgnccaacacgccttgctcacgctgatccagggctggtggacctggatgatgttatgtacctttgcaccgtcctaagggccgacgtcctgtgcatcaagatcaacctgaccatcaacctcatgctacttgataactactgcttaaggcgcgttccatagaacttacagggcttctgataaatatggcgtgactttaa

SEQ ID NO: 110105 - DNA, 1577 bp, Zea mays
  Clone ID: MRT4577_31911C.1
gtagctttgaagccgcagactctgtctccacaacctgaagcccaagcacctcatgatcctcaaacaccagagcaacaacaaagcgggactggtgtaggtgtgtagctggtgagccgggtagtgaaggaggtgtgtaccaggcctccagtgagcaaatgggcatggtgccagatgcatctgcggccggtggcaggaaggtcgagctggatggggacatgcgatggacatcacaggttggcccctccagtgatccatctcaaacactagccaggggatgaatgaggctgctcatggtggacagaacagaagacgaaatgaatcgcaaggggaaactaacatgcgagagaggaggaggtagccacaaccaaagagcttggttcaatacttcaatggctagaataatgaacgatatgaagatcaggtagcattatatatgtcaataagaagcagaggagagaagcagcccgcatcgcaggagacaaggacttcacttgtttggccagttcaggacttcaggatgctgtcgatgatgtccatgctatattccctcgcttcatgcttaacaatgagggagagactaagtgaggggctgaaggccgttggtgctgtcagaatgtttttttggagttttggtggatgatgctcagtgactgcaatgcaaaggatccttctgttttgtatattgaatgagattacatcactgttttttcttagcgatatgttgagctcatgtgctcgtttatgttagtcgatctctggctcttgtagtaacttggaaagcttgctgctttttttaagggcatacatgcctgtgatatgtggtcatgatcatttttctctcctgttattttagttgtcgtatcataaatgccatgtttgcattggtgttccaacatgtcaatattattgaataaatgtttgcattagcggcagcggggacgacgctaagtcgagcaatggcgaagcggcccgtggtggcagtaacggtggagagaagcagggggatgaatccaacggtggcgggatacttagcgttgtggcttccaggattggcgtggccgtgtccggcgccaacggggaccgcagcggcagcgctgaggatggtgccaagacgagcgctggcgaccctggtcacggtagcaagggcgaggagaaggggcgtggtgtgaacggtggtagaatagtcgagcagatcatttccaatctgccctcagatgatcaggcgcctgatgccgatgaagcttccttgctcatcgccattatcgaagattagctccatgttccgaaggctctctaggtcgtcctcaatgccaggatcaaatcatcagctgagccggagactgaaaacaataaagaaaagcaagcagctggtcatagtaaacatcatgtagcgaggcttagcagattgcttttttcacgttagaatcagtccacatgtcctcgacacgggctagatttgttctaggattatttttccagtagtaagccatgtatccatggacagtccacagcgcgacgtctaatgtaacatcatcaaggttcttttgactatcccataagaaaccattccttaagac

SEQ ID NO: 110106 - DNA, 326 bp, Zea mays
  unsure (1)..(326): unsure at all n locations
  Clone ID: MRT4577_31912C.1
gggtggggggtttnggggggaagaaaaaaaatcggttctttcacttccaaaatatacatgttttcgggctttttttttggagagttaagataaatcccatgtgaagggggggggggtctaccaagggaaccctgggggccttacccaccctggggccctttaacggctaaaatatcctacaaaataatttttggcccggttttgtccaccgcgaaggggggcggctaataaagggctccctgtttttttacaaaattgggcttacttgccacccggttaataaccaataatggtcctggcgaaaattatcccttccttttattttg

SEQ ID NO: 110107 - DNA, 626 bp, Zea mays
  Clone ID: MRT4577_31913C.1
ctcggccgggtcgtgatattccagccccgccgccgccgtccccgcccccatccgtgacaccccaccatcaccgccgcgccacgcgcgacaactccatcccccgtccgcacccctaccccgagcatcgcagcgcctcccgcacgaggtcgttgcgcttgtcgatctgatggcggcccatggcaaaggagcaggtagaaaatggccgatgccgaggatatccagcccctcgtctgcgacaacggaactggcatggtcaaggctgggttcgctggcgacgacgccccgagggccgtcttccccagcatcgtggggcgcccgcgccacattggtgtcatggtcgggatggggcagaaggacgcctacgtcggtgacgaggtgcagtccaagaggggtatcctgaccctcaagtacctcagcttacacatcacattattccccacattacagcaatcagtgcaacaatcagagcatttatttaggtatcctgcaagtagtagtagtggtatgcgtgttctaatattctatggcacaaatgtaaatcattttattaattgggcacaaaattatttaacattgctgcactgattgttgttcctgaatttaagaaaatctttatgtgatacaag

SEQ ID NO: 110108 - DNA, 2608 bp, Zea mays
  unsure (1)..(2608): unsure at all n locations
  Clone ID: MRT4577_31914C.1
gctcgtgatattccagccccgccgccgccgtccccgcccccatccgtgacaccccaccatcaccgccgcgccacgcgcgacaactccatcccccgtccgcacccctaccccgagcatcgcagcgcctcccgcacgaggtcgttgcgcttgtcgatctgatggcggcccatggcaaaggagcaggcggtgatggcagccacagcagaaagccgacgctcggcgtgattcccacccgtcgcgagccaagaggttcgaggtcatttttgagccaagaggttcgcggccacgggagcaaccctacagaaccatcaccaccaccgctctctcttcctctgctcttctctgcctgcctgagctcaccgcacctcgcctcctcaccgcggatcctccgttaatccggtagaaaatggccgatgccgaggatatccagcccctcgtctgcgacaacggaactggcatggtcaaggctgggttcgctggcgacgacgccccgagggccgtcttccccagcatcgtggggcgcccgcgccacattggtgtcatggtcgggatggggcagaaggacgcctacgtcggtgacgaggttctgcaaaccgatcatgacaaaaccaaaggtagctttgaagccgcagactctgtctccacaacctgaagcccaagcacctcatgatcctcaaacaccagagcaacaacaaagcgggactggtgtaggcgtgtagctggtgagccgggtagtgaaggaggtgtgtaccaggcctccagtgagcaaatgggcatggtgccggatgcatctgcggccggtggcaggaaggtcgagctggatggggacatgcgatggacatcacaggttggcccctccagtgatccatctcaaacactagccaggtttcctcctttgccaccctcctttggcagttctcttcctaacgtcgccgtaggttcccttccctgctgtttttgtctcccatagctcttaaaattttaagttccctgtttgcataaaggccataggaaaaacgttgaatcaaagcaaacttgatgcttaccgaaagcatgttcgatgagttactcagattcatggcccaggaattgaatctacacggtttaataactatttgcatggctctaaatgcttaattaggtttgctcatcgttcctcagtgctacttcatcttgattttctgctgagtatacaagggatgaatgaggctgctcatggtggacagaacagaagacgaaatgaatcgcaaggggaaactaacatgcgagagaggaggagctagccacaaccaaagagcttggttcaatacttcaatggctagaataatgaacgatatgaagatcaggtagcattatatatgtcaataagaagcagaggagagaagcagcccacatcgcaggagacaaggacttcacttgtttggccagttcaggacttcaggatgttgtcgatgatgtccatgctatattccctcgcttcatgcttaacaatgagggagagactaagtgaggggctgaaggccgttggtgctgtcagaatgtttttttggagttttggtggatgatgctcagtgactgcaatgcaaaggatccttctgttttgtatattgaatgagattacatcactgtttttttcttagcgatatgttgagctcatgtgctcgtttatgttagtcgatctctggctcttgtagtaacttggaaagcttgctgctttttttaagggcatacatgcctgtgatgtgtggtcatgatcatttttttctcctgttattttagttgtcgtatcataaatgccatgtttgcattggtgttccaacatgtcaatattattgaataaatgtttgcattggcggcagcggggacgacgctaagtcgagcaatggcgaagcggcccgtggtggcagtaacggtggagagaagcagggggatgaatccaacggtggcgggatacttagcgctgtggcttccaggattggcgtggtcgtgtccagcgccaacggggaccgcagcggcagcgctgaggatggtgccaagacgagcgctggcgacgctggtcacggtagcaagggcgaggagaaggggcgtggtgtgaacggtggtagaatagtcgagcagatcatttccaatctgccctcagatgatcaggcgcctgatgccgatgaagcttccttgctcatcgccattatcgaagattagctccatgttccgaaggctctctaggtcgtcctcaacgccaggatcaaatcatcagctgagccggagactgaaaacaataaagaaaagcaagcagctggtcatagtaaacatcatgtagcgaggcttagcagattgcttttttttcccgttagaatcagtccacatgtcctcgacacgggctagatttgttctaggattatttttccagtagtaagccatgtatccatggacagtccacagcgcgacgtctaatgtaacaacatcatcaaggttcttttgactatcccataagaaaccattccttaagacaaccgatattgtgagttgataccccaaaaaaaaaaaaaaaaaaaaaaaaaaaaaaaaaaaaaaaaaaaaaaaaaaaactcgaggggggggncccgggtac

SEQ ID NO: 110109 - DNA, 563 bp, Zea mays
  Clone ID: MRT4577_31915C.1
ccgtccgaaaaaaaaaaaaaaaaaaaaaaaaaaaaaaaaaaaaaaaaaaaaaaaaaaaaaaaaaaaaaaaaaaaaaaaaaaaaaaaaaagggcgggcgcccttttaaaggacccaggctttcctaccgcggggcttgcaaactagggggcctcgcctttgggggcccaccaactttatttcccgggccctggttttacaccgtctttgttggggaaccccttggtttccctccacctaaacccctttttacaccttcccctttggacaaccgggggtttccccaaaggggcccgcccggatcccctttcccatttgcccggttgcgttattgccaatggggcccccccttttgcccctccctaaggggcggggggcggggtgtttaccgcaatggcccctgttctattgcccaaccccttggggccggttcttttccctttttccccttcctttttcttaaccggggcctttttccccggaaaggtttttattgggggccccttttggggcctccggggcgtttttcccgggaaccttttacctgggggtctcttttgggggg

SEQ ID NO: 110110 - DNA, 195 bp, Zea mays
  unsure (1)..(195): unsure at all n locations
  Clone ID: MRT4577_31916C.1
gcctgaggactagcgcacattcggttgagtattgctttccttaaccagngcattttccagaggggagagtattgtggatgccgggtgctaggccacaaccncangaactccccgtcatcgctcatgtcgacatggactgctactatgttcaagacgagcagcagaggaaccccgcgctcaggcgacagccgaccg

SEQ ID NO: 110111 - DNA, 721 bp, Zea mays
  Clone ID: MRT4577_31917C.1
cgcccggaccgctggctcacgggcgccggcggttcctttgtccccgagagcctgtacaagtatccggtgttccaggcgggcctccgcgtgtgcctcggcaaggagctcgccatcacggagatgaaggcggtcggggtggccgtggtgagggcgttccacgtccacgtcgtcggggacagtggcagcaccgcctgcgcgccaaagttcgtgtcggggctcaccgcgtccattagcggcgggctcccagtgaggattagtagaagagttcgaagctagagcgaggttcttgttttcgttcgtaaattaaaaaacaagtagagactactagatcgatagagctgtttcgcggataatgtacatagactaattaaaacaaattgcaagttgtaattccatatatatatttcgtatatatgggattttcttatgctgcaagcatgcaacagaaagccaactgttatcaccggaaaaattttggctgcagccggtgtaagttagggcttgtttagcacacggactaaagaatagttcatatatttaagttttatatagtctttaaatttctaaacactggataaactaaggccatgttttgtttctttagtctatgagctaaaatttagttaggggactaaaatttagtccctaacatgtttggttgtagagactaaaattagtaagaatatactaaatgattcataagaagactaaaatggtcttt

SEQ ID NO: 110112 - DNA, 195 bp, Zea mays
  Clone ID: MRT4577_31918C.1
gcgcggggaagccaagtttaatcagcgatattcacttgtcagcaagaccaataacgtgcggagggcgaaagatgacggtcttaacagagaagtcagcgttaaaggagtgaaggtaatgatgacagacccggctcttaagactaacagctagcgatttgcagctgatggcaaatcattagctggttacacgggctg

SEQ ID NO: 110113 - DNA, 225 bp, Zea mays
  Clone ID: MRT4577_31919C.1
ctggcttttctttcttatattgaataattgctcattctttattttttgtttttttattttgcttttctttttttttcttttttttttttaaaaaaaagtccgttttataaagacttagagaaatcttttcttccaaactttgaggggcccaaggtatcacctgacaataataacctctttttttcacctattttatcagttttagatggggcccccggggatacc

SEQ ID NO: 110114 - DNA, 447 bp, Zea mays
  unsure (1)..(447): unsure at all n locations
  Clone ID: MRT4577_3191C.1
gccgngccgggttcgatccatatatattctgatttttataacaccccaagaaaagcagctctaaacaacctataaacactgtgtataccaatatattatctcttcttgctctttgtgcttttattgagagcaacacatgtgctcattatatcacacagtgctctctttcttatagtcataatatcacacatcctctcacaacatacacttatgtggtcttaacatacacacgtgcgaaactatatactatacctaaagctagtgcggagagcgttacaccaccaactagtgcactagtgacaccactattcgtgacatatataactatacaaaatatcaacacgacaccgacaccattgtctgtactaactgtgacacatataagcgtggagaactgtggcctatacgtgacacaagatgtgtgtgtataaaacactcttgctgtag

SEQ ID NO: 110115 - DNA, 478 bp, Zea mays
  Clone ID: MRT4577_31920C.1
ccggccggaatttcaagtgatgattagtactacagaacagtaaggtgtgtgcaactgcaacaagctgtgaggccggtgaatacacgaagaaatgtactggaggaatttcttcaatagaaagagaagagagatgacgaagaaatggagattgtttaaaagtggttagatggaatggaaatccttctcatgagcggacacacccatacacacttccatcctttcaggaaaaaaacatgttgaagaaattccccaaggtcataagatacgagctaggcgagaatttcacatggagaagtttgaaggaatggttgggctaggtgtactcatttttgtccgcgatcatctacaacaaatttgttctcagtttttcatgacttctctgaaaatcttcaaaaaaaaaaaaaaaaaaaaaaaaaaaaaaaaaaaaaaaaaaaaaaaaaaaaaaaaaaaaagaaaaaaaaaaaaaaaaaaagcggcc

SEQ ID NO: 110116 - DNA, 325 bp, Zea mays
  unsure (1)..(325): unsure at all n locations
  Clone ID: MRT4577_31921C.1
ggagcctctccacgagacggtgctgcacatgatccggcggcggccgtggacgacgcgcctggagaactcgatccgcctgctctcgcccaccctcgacgcgccgctggtccacggcgtcatctccggggccgcatccgcggggcgcgccgacctcgcgctccagttcttccgcttcgcataccgccggggcgggttcagcccggagggcgccacgttcgcgctcctcgtgcccgcgctcgcgtcgcgccgcatgctcaaccacgcgcgctgnctcgtnctcgacaccatgccgtccttctccgtcgcgcccgacgagcccacgctc

SEQ ID NO: 110117 - DNA, 305 bp, Zea mays
  Clone ID: MRT4577_31922C.1
tcggttgtttaccattcctcccaaaacgggtgggcgatcctagaagcctccgccgagcatcgatcatgtgtgcctactgtggcaagtgcgcggatgaactcatgaagaatgctgcctacatcggcacccctggtaagggtatccttgctgctgatgagtcaactggcaccattggcaagcgcctttccagcatcaatgtcgagaacgtggaggagaaccggggggctctccgtgaagctctggtctgcttccctggtgccctccatttcattagcggtgtgatactcttttaggagaccctttac

SEQ ID NO: 110118 - DNA, 589 bp, Zea mays
  unsure (1)..(589): unsure at all n locations
  Clone ID: MRT4577_31923C.1
agaacaccacctaacctgcttcatgcacaaacacttatcaatcacaatactataggacaatatgatgttgcaaagatggggcaaaaccatgtttcacaaagttgttattataattatcgacacaaggcctcattgattgatcatccttgtcataatggccatttggatcaccaccatcaccaatgaccttgagcatggttagcgtagatgtaactccttcgccaccagatcagccaactgttctcttgttattgtaggattcaatcatagtcggttcctccatggttagcatagatgtaactccttcgccaccagatcagccaattgttctcttgttattgtaggattcatagttggttcctccgggtggatgggctgtgcagagaagctgttgcagccgatggtgacggtgacctccccggtgccatgcaggaacatcacctagccaacgtccttcatggactcttattctttgagacgttgctcggcgtggcttgaccatcgggtagctgcgcggagacaaaagcagcgagctgggcgtcctgagcgcctccgacgactgatgcggtcngctgttgcgactcttgcg

SEQ ID NO: 110119 - DNA, 314 bp, Zea mays
  Clone ID: MRT4577_31924C.1
atcctctacaccgttcgccctttttttttttctttctttcttacccaaaaaaagggtgtccttcggactatctgttattcctccaaaaacaccataaaacattttcttgttttacaacatgtcaacaacacactgttagcacgaagagactactccaacgcgactacatactcacactacaagcgcggccacgcatgcacaggcattggcactgatgccaaccacacaaactaccttcttctggaaagcctacattcaccgacaacttaataaaaacaacatgggccacacttaagttgacaattttgcctact

SEQ ID NO: 110120 - DNA, 448 bp, Zea mays
  Clone ID: MRT4577_31925C.1
gggaactaaaaaaaggggggggtttgtttttaattcacagcatttgaaaacaagggaccaaattccatacatgccgggggagctcggtttaaaagaaattattggcaggggcaaacaaccggggggagcagcggcatgttgagagggggcccccccaaattggggagcaccaggtcccccatggccttgggggtttaatgcgtcccgctgcccatggggggggccaggaccacgttgtcaagcgccatgagcgcctggggaacgtccggtttggcctggaacacgtccagccccgcgccgccgagggggccattggggagcgccgcaacaagctcgggcttgttaacgggcgccccgcgcccaacgttgacaagcacccccggggggccgagcgcctcgatcacctcgggggtaaagatgccggggttttgtttgttcagggagcagg

SEQ ID NO: 110121 - DNA, 215 bp, Zea mays
  Clone ID: MRT4577_31926C.1
ctcagacccttccgtccgggcggcggcggtttccagggccgtatgcgtccagatgccgggctccaaatgcttgagggacagggaagcgacctccttcgtccgccgatcggtcgtggcgccgaggccccgggacgccaaagctcgccggcgtcatcctgatccgactgcggcgcgggactggagcacgaactgctcgcctgttggggccaacattg

SEQ ID NO: 110122 - DNA, 1103 bp, Zea mays
  Clone ID: MRT4577_31927C.1
gacccccgaggctggccgggacatcctctctctagatccactctccccccaccacgccgaccagacaccgactctccatggaaggcgcccagatccactctctctccgccgaccacgcaccaactctccatggaagggtgcgaaccacgccgaccccaacctcggctctccatggaagggcgcggtccacgccgaccccgacctcggctctccagggaagggtgtggtccacgccgaccccgacccggccaccacgtggctctccatggaaggcgctcagatccactctctcgatccaaccaccgtgcgcgccccaacctcggcgctccatggaagggcgtggtccacgccgaccccgacccggctaccacatcaacggtccacggcgacatggagaggccgacaccggtgagaaagtcccacacatcaacggtggacctgctcatctggacggagggggcatcgcaagagtcgcaacagccgaccgcatcagtcgtcggaggcgctcaggacgcccagctcgctgcttttgtctccgcgcagctacccgatggtcaagccacgccgagcaacgtctcaaagaataagagtccatgaaggacgttggctaggtgatgttcctgcatggcaccgacgttttcaccgtcaccatcggctgcaacagcttctctgcacagcccatccacccggtatgcccctacatcttgatgacatccatatctattctttgtgctttgagattgtacatttgttaattttgaatgtgttgcttgcaggagggaactcctacgattcctacaataacaagagaacaattggctgatctggtggcgaaggagttacatctatgctaaccatggaggaaccgactatgattgaatcctacaataacaagagaacagttggctgatctggtggcgaaggagttacatctacgctaaccatgctcaaggtcattggtgatggtggtgacccaaatggccattatgacaaggatgatcaatcaatgaggccttgtgtcgataattataataacaactttgtgaaacatggttttgccccatctttgcaacatcatattgtcctatagtattgtgattgat

SEQ ID NO: 110123 - DNA, 1154 bp, Zea mays
  unsure (1)..(1154): unsure at all n locations
  Clone ID: MRT4577_31928C.1
aaaccaaaaagtttgactattttttggcattgaccccggccgggacgccgaccccgacccggccaccacgtggctctccatggaaggcgctcagatccactctctcgatccaaccaccgcgcgcgccccaacctcggcgctccatggaagggcgtggtccacgccgacctcgacccggctaccacatcaacggtccacggcgacatggagaggccgacaccggtgagaaagtcccacacatcaacggtggacctgctcatctagacggagggggcatcgcaagagtcgcaacagccgaccgcatcagtcgtcggaggcgctcaggacgccccagctcgctgcttttgtctccgcgcagctacccgatggtcaagccacgccgagcaacgtctcaaagaataagagtccatgaaggacgttggctaggtgatgttcctgcatggcaccggtcaccgtcaccatcggctgcaacagcttctctgcacagcccctccaccctgacctgattctccaagggaagattctacatggacctcccgtggccctcgatactaaaggttgtgatttagtgactctagggatcacccaggaggaaccaactatgaatcctacaataacaagagaacaattggctgatctggtggcgaaggagttacatctatgctaaccatggaggaaccgactatgattgaatcctacaataacaagagaacagttggctgatctggtggcgaaggagttacatctacgctaaccatgctcaaggtcattggtgatggtggtgatccaaatggccactatgacaaggatgatcatcaatgaggccttgtgtcgataattataataacaactttgtgaaacatggttttgccccatctttgcagcatcatattgtcctatagtattgtaattgataagtgtttgagcatgaagcaggttaggtggtgttctacaccttcgaattacgcaatcacatatagattgtttctatgggtttttagccatgtactgtagtgaatctttattactggcatacaacatctcacaacagttttaataatgagcaataaactgatatgtattaaaaaaaaaaaaaaaaaaaaaaaaaaaaaaaaaaaaaaaaaaaaaaactcgagggtgggngccggtacccc

SEQ ID NO: 110124 - DNA, 429 bp, Zea mays
  unsure (1)..(429): unsure at all n locations
  Clone ID: MRT4577_31929C.1
gggggggggtttttaatttaaaatcatacaggctggtctcatagcggtataaaatgaactactttatgaacacaaataacatctccaacttgttaccctctcatgataaacaacacatttgcaatgttatcacaaaaaactttcatgggttntgcttcggggttttcttctttttacaaanngnngcncngaancggnananagggcgcaacgnngccacacaccccaaaancagcaggggccanagcgcnnncncnaangaagnnangaagggnaacaagaccnnanannncancnncaacacgccaaacggangcncggngacgnngngaagagacgagngacaaaagnngaanaacnccnncccanngggcgagggccccnncaaaacncnggcacanganacnnagnncccnnggaaggagcnag

SEQ ID NO: 110125 - DNA, 1117 bp, Zea mays
  Clone ID: MRT4577_3192C.1
cattgggtacctcgaggccggccgggaaaataaaacacagcctcacgatccccggctccccgcactgcccggtgccccgcgagctgctcctctacacacgccagcgagaaccagcccaccccacctgctcgatcggcgcaccgtcccgcaggccgcagggccgtcgtcagccatgatccagctcctgttctcgctgctggccgcggaggcggcgctggtgctggcgctgctcttccccacgcccgtgcgccgcctggctctgctcgccatcgatcgcgccaagagggggcgcggacccgtcatggccaagaccatcgcgggcaccatgctcctcgtactagtctctgctttctacagcgtcgctaagatccgccgccgcgagggggagctcggacagctcacgcccaccgaccaggtgctcgccagtcgccacctcctcgaggcgtcgctcatgggatactctctgtttcttggattaattattgaccgattacatcactatattagagagttgagaatgttgaggaaagacatggaggctgtaacagagcagggccggacactagaagcagcaaaatccggaagcactgacgagattcaaggataccagaaagaggttgcgagtttgaaggaacaagtgcaagagctccagaaccaatcacaaaagaaaacagagcgactaaaaaccgccgaagcaaattctgtagctttacagaaacaatcggaaggtttactcgctgaatatgaccgtctcattgcggagaacagggatttgagggaccaactgcagtcaattgacctccgcctgtcccattctggcggaaagaagaactcgtgaagcaagttctgcaattttgaagagcatgattttctgtagattttcttccaataggttaactgtactcggttttctctattatcataatcgcccatgtaattcagtagatggatttgcctatgtaattcagtagatgcgtgcgtgtatgtatgagtggaccatttaatgctttatggactgggtggcatggactcagacccggcatttggccatagtttatggcctaacgtcttggttcagtgagatcaaataagaacctgcatcttcaaaggcagaatc

SEQ ID NO: 110126 - DNA, 108 bp, Zea mays
  Clone ID: MRT4577_31930C.1
aaaacctccccgcaataggacacccgcagaaattttcaatacattgggactagagctcaatcgcttttaaaaaacagtgttctaatcaggactgaaaaccggccccgg

SEQ ID NO: 110127 - DNA, 249 bp, Zea mays
  Clone ID: MRT4577_31931C.1
attcggctcgagtacaaaaacaatatatttaaaaacaaaaaaaaaaaaaaaaaaggggaagaaaaactaaagataatgctcctagcaaaaaaaaaaccgggggctgacgccgctgcgcgtgctgagtcgtccgtgtatttagtctcaccccagtaacctacggccacctcgttacgcgtataatgagttattttaatgtcggggtaaaatgggacagaagatacactccgggagaaattgttatccatt

SEQ ID NO: 110128 - DNA, 132 bp, Zea mays
  Clone ID: MRT4577_31932C.1
taactcggtgtcctcgttcaccccgggttccggtcggtccattgagccaacacgccagtagctgctgacgcctaaaacaccgggaaagacccggcttcctttctgggggcagccaggtccaacgcccgtagt

SEQ ID NO: 110129 - DNA, 149 bp, Zea mays
  Clone ID: MRT4577_31933C.1
gcggtaagatcacattaaagggggtcctatgggcaccaatcagatatatcgtgcacgagaaaattggtgattatgcgatgaccgcatggaagtgatggactgagccaacataaacgaatagaagcttgctgagatctaaggattttttt

SEQ ID NO: 110130 - DNA, 172 bp, Zea mays
  Clone ID: MRT4577_31934C.1
accgggccgggatccacgcgtcggcccactactgtatcgagcaaggtagtggctactgtagtgcctcacgatcatgtatgagcactggggatgaagaggaatcgtacacattgacaaggcttgaccctcgtaccactgttaaaaacacaatatgttctggtgaccaaaacac

SEQ ID NO: 110131 - DNA, 173 bp, Zea mays
  Clone ID: MRT4577_31935C.1
tgcacgcatacgggggtttgatcctctgagcggccccttgtgatattttttttgaaaaaaactatcggggtcctctatattaacccaatctctctgaatttacactgtaaagtacagatgctcttagtccggggtataaggataagggggggtttgtctacatcaactggttc

SEQ ID NO: 110132 - DNA, 212 bp, Zea mays
  unsure (1)..(212): unsure at all n locations
  Clone ID: MRT4577_31936C.1
cccacgcgtccgcccacgcgtccgtttccattgcattacatgctgctggataatcaatcttagcatccaatactatggaaacactacttgttcataaagatcttaacaagagtgagggacttgatgatctattagtggaacttgaaaaggaaggagtagttatttatggtggacctgttgcacatgacaagntgaaagtaccaaangtagac

SEQ ID NO: 110133 - DNA, 699 bp, Zea mays
  unsure (1)..(699): unsure at all n locations
  Clone ID: MRT4577_31937C.1
tttttnnnntgaccacagaaatctgatccacactgatgggatagtgaggagtctgcagtgtaaatatattttctatcagtattaagttatttataaatagaatgtttcatgcattaatctacatcattatgaactgaagtcataaacatctacagaaaaaaacatatatgctaaaaaaaccaacaaaaattgacctggctactttaaatgtgaggccttgaccaactactaaatagttaaagtagcaccatagatccagtggcaattgcaaatgaattcaaaaagatacattcctcaagtagatactgatttctaaaagttcaggataacaacattattgaaagacatgtcaccaaagacggaaaaacaatgatttcaaacaaattggatttagcctactaggtaactgtaaatatacatgtctacaaagcatgtgactttattaagtgatgacaaaaccttgggcatatggacatgtagtgaaaaacaggtagtggctatgttggacaagttccctacaagctacaaacaggaaaaaaaagaaatatcaatgtatcccaaatcagatatccattgaacagctaaaagtaggcctaatggagctaggcatcaaaccaggtaatctggtaccatgaattgcaaattcttgcatctcgtcaagtagatactgattcctaaaagttgggatatcaacattac

SEQ ID NO: 110134 - DNA, 369 bp, Zea mays
  Clone ID: MRT4577_31938C.1
caaaccaaaaaccttttttttggaccttaaccccaaaaaaaatcaaaagggggccccccccaagggggggttgtgggaaaacccctgcggggtttgaaaaaccaagtgggttaaagggcaccatttgtggcatttgaaaaaggggcccacctttaggcccaccggcctggaaaaacggcaacaccgggggttgtataaaaaagggaccggggccccccccacctaccgggctaaagggaaaaagttgtggctgctgaaaaaaaccgggaaagtccaaggctcccattgggtaaaaggaaaaaaattgcggggggaaggcaccaggaaccgggctaaagggaatttgttgttgtcccaaataaaaaccaa

SEQ ID NO: 110135 - DNA, 587 bp, Zea mays
  unsure (1)..(587): unsure at all n locations
  Clone ID: MRT4577_31939C.1
gccggccgggccaggacggttgatgtggatctgtttcctcgtggttgtttgctcctccatatntggaggagatttttccatataaatctttgtgtctatttcatttcctaacaaatggtatcggggctagggttagacatattgtgtgatatcctggcccctgggatgttgatttccttgcccaaggcttaatagaattaatagagtatccatatcaacaaggtgcatcttctttttcggaagtctatctcgaaagaatctccaagttaagcgtgcttggcttggagcaatatgggataggtgaccgaccggtaagttttctcgggtgcgcatgagtgaggacaaatggcgcacaaaagactcgtgttggtctgtggggacgatatatgattctagagagctgctaggagtaaatatcgtcggtccagggattggacaggtacacattgtttttatccatattgtggtcgtcgccgccgcctggtcttaaggtttctcatggcaatcgtattatcttgaagggcaaccgtttgaataatatctattatttgcaatttttacaaaaaaaaaaaaaaaaaaggccccta

SEQ ID NO: 110136 - DNA, 579 bp, Zea mays
  Clone ID: MRT4577_3193C.1
actccttagggcgattgggttcctcgaggccggccgcgactcgcgtctccagatcaagctccttgctccccgaccaatccctacctgtacccgccgacgccgacgcaacataccatgccgcccatattgcacccctctcacgtggtggaaggcttcgaccgcatgacgcgaggccaaggccgcgcggccaacgcactggcccccaagatcggcccgctcggtctctctcccgaataacatcggtgaggacatcgccatagtataccgacaaggactgaaagggcctccgcgtcaccgtcaagctcaccgtgcataaccggtaggccaaagtactctcgtcgtctcctccgccgcagctctccgtcatctgcgggctcaaagaacccgagaggtacagttattaacgtcacgaacatctatgacagatgcgaacatcacgactcgactacgtacatctgatatcgccaagaccctatcgaacacgtccatgtgctacgcaatagtccgccagcgtctagtgacatcctggagacctgcgacagcgtccagtgcaccgaccatggaaacgaccccaacgac

SEQ ID NO: 110137 - DNA, 374 bp, Zea mays
  Clone ID: MRT4577_31940C.1
aaccacttgtgaccaggccaactacatgcatgcatcaactactagcaacgatactctcggctaggactaaacgaactcacgcatgaacagctagtccaacaaacagaacgaccggccggttcacccgacccaatttgatgcagtccatcacggctccagcctctgatacgtcttgccgcttctcacgcagcaccatcggcatctcgccgtgctcgccgcctcacacggcatcctggcatctcacctccttggcgcgctcacctgaagccttcgtcggacgaacaccacactagactagactacatgcaaaactcaaacatgctaatacaaatatcaagattagctctaacattcaccctcctaatcttgatatc

SEQ ID NO: 110138 - DNA, 1381 bp, Zea mays
  Clone ID: MRT4577_31941C.1
cagcagccttggttttctcaacatcagctcttcaagcctctcaacactttggatgtcaggtctttgttcccttaccaaggcggtcatgaactgcccaaatctgaccgagctatcactggacttccccaaacagaataacgattccaccgacctggctgctctaattgatagtctgggccgcacgtgcccaaacttgagaaacatgcacgtctcgtcgatccgcttatgcaacgaagccgtgtttgctctagaaagcgccaatctcaggggcctatgcatgctgtctttggttctaggttcaaaaataacagatgcagctgttgcatctattgttcgttcttactcgagcttggagctgcttgatttaagtggatctggcattaccgacaacgggcttgggatgatcagcaaagcattccctgacaccctaacacgcctgctcctggctctgtgccccaacatcacgtcgtctggggtccaggtggctgcagcacagttgccgctcctccgtctcatggactgcggcaacatcatatgcgccaacccccagcctgaagctgggagatcctacttcggcgacctgaccggcgggatcaagttctgctctaagttacctgtccaaaagaagcagcagcagcagcaggctgcctgccagaagctgatcataaagcacggcgccctgaagaagctcagcctgtggggctgttcagcgatcgacgccttgtacgtgaactgcccggagctggtcgatctgaacctcaacgcgtgcacgaaccttcatccagagcggctgctgatccagtgccccaagctgaaggacgtgcacgtcagcgggtgccgcgacatgctgatcggcgccgtcaggaaccaggtcctgaacgagttcgcggccgccgagccccggctgccctgcaagcggctggccgacgggtcgaagcgcgtgcacgtgccccacttcatgatcgagcagctggaggagcaggagaaatggggcgggccgcggaagagccagtgcaccgtccacctcacataggcagataggctaggccggccgctgggcgctggcgagtgctactgctgcctgctggcctgtgaagtgaggccctggtagtcggcggcgcccgcgtcctcgccgtcgaggagctgctgcggcgtcgattcagcgagcctctagacccccctgtatgttccatccagactagagtgccatgatccttctgttcatgctgtgtgtgtgtgtgtttaatctgtggagtctgtaggataataacggggtgcaatgcaaacgtgcccgactcctgtactttgaaaccgtattttgctcttgttcatctaggacaataattgccttcggttttccccaaaaaaaaaaaaaaaaaaa

SEQ ID NO: 110139 - DNA, 211 bp, Zea mays
  Clone ID: MRT4577_31942C.1
cgcagtttatatccggggggccacgcgctctctagtcggggggcgcccttttttttttttttttcggtcaaacaaaccaaggtgatacagctgtaccaaaggcccgtatttccaaaccaggacccaagcagagggttgtccgacacacccaccagccgctgatgacattccgtttagaccaaccaacgaacttagccgcacatggaccgac

SEQ ID NO: 110140 - DNA, 531 bp, Zea mays
  Clone ID: MRT4577_31943C.1
agccaactaaatgttatctccagtgaattcaaacatcccctaacaaaagcacacaacacaaatacacgtcttatgacaaaataatattatcaaaaacatgagtgcgacttggaactactgatgaacattcagatcatcacgaaatctgcatgacacaccgataaaactcagtcatgatacacacatcgctaagaccaaaagcacttcggtcctactccattccagcatatttatacctcagcagcaggttcctcttttcctgctcgagcacacggagattgctcttttccacctccctggcgagcttctccagcttgctgagcatccctgcgtacatgtcatcaatctcggccgcctgccccgcagcagcgccgaggagctcctgcagccttccgatcccaaacccgtccaccatttcatccaccgccttctgctccacgagggtgtgagcgtgcccaggcgccggagccgacggcagccagggcatgggcgactcggcggtgaaggcgtggtactggtcccggaatccgg

SEQ ID NO: 110141 - DNA, 340 bp, Zea mays
  Clone ID: MRT4577_31944C.1
cacacgctgagctactgatcatggcgctgaatgcgggggatgacatgagtgacgtggaccgcttaaaatacgcatcgggtggcaccgctcttattagagcacgacgctgtgcctgctcaatgagtgccctctctggagctgggggaatggtctacatggtgtacagaactgtcaaaggaaactggcttcacaagcaacacactgacccgtcacagaggcatcatgtgttcaagaaacgctatgcgtatcctgttgtgctttgctagaaacgatttgggtcatgactacctcgttttggcatcaaaagcgttggtttacacacacaagcccatgttatgca

SEQ ID NO: 110142 - DNA, 245 bp, Zea mays
  unsure (1)..(245): unsure at all n locations
  Clone ID: MRT4577_31945C.1
tcctattttactttttctcattgaatctnaaagggcacagatncttaaatggttgttggataaactacanacaactatancatcaccccatcgtctantaatatccacatattctagaaaaggcataaacagcccattaaccaatgccttcaacaatgaattttagcacctaaaatttgttacacacctattttaaaaatttttcagaaaacgtttcattttcaaatttttgaaagaaaaccttt

SEQ ID NO: 110143 - DNA, 481 bp, Zea mays
  Clone ID: MRT4577_31946C.1
gttatgttaaggtgtagttcttggtttaaatttttttttttttttttttttttttttttttttttttttttttttttttttttttcagtttccaaagaaacaaaaaaaaaccctgggggttttacctgcagtttctaaaaatgtttttggaagcaagcccgtccccccaaaaaaaggtctagttcttcgcggggtcacggccgacgtggttccacccgacccaaaacatgtggacaagcagttttgtgccaacgtggttgccgaaaccggatcaggatcaggccccggcaaagttttactacgtggaaaaagcggcaaatagctcgtggttaaatttcccctttggctccggccccccggtccggcatggaatgttttttttcctgctttcatcggcagagcggtttttggaagcgcttggttgcagtgcgtcccaaggcatcccaggcacccctttttgtcgtttggaacagtgcgggtg

SEQ ID NO: 110144 - DNA, 542 bp, Zea mays
  Clone ID: MRT4577_31947C.1
ctttgctgtgcgccagcgattctccttgcgtatctttacccgtaatgcctgagtgccgatgcaatcgtccctcatcactccacaatgccgctcctctcctctcacgccttcttctatctctcggcgaaggatctcatccaagctgtgatgatgctactactagccgaccagaaggatctctttctccattcagagccgttggtgccctcaccatctgctgggccagatgtggagaggagatccaatgggaaagtagatctgagttcatgttttggcgcatatgactaccgagaagctctgcctcgacagatcacaaagttcctgggtacatcgatgtatgtatgttgatgtcccctggagatgtcgtgtatggagattacgatcaagcgcttccggacgcgagacagatgtcatcctatcgcgtcgatacattgttgaagcattcgtggatgtcgtatgagactatcatagagatcgtaatatgacatatcttagcattatgaaagggactctagcgcacagagatcatctgtcagatccta

SEQ ID NO: 110145 - DNA, 494 bp, Zea mays
  unsure (1)..(494): unsure at all n locations
  Clone ID: MRT4577_31948C.1
cgagccgatgaaagctaaacacactgagttgtgcagtcacaaactatcaactccctaatccttgcctcccctatgaactgatatctattctccaataacatattatccacatagatctcaaactagaaaccatttggtgagagcatcttcagtcatcatcttgaccagactgatcatcagggtcaccactcagaaatgagccaatggacttgcgaaggatgtggattgatttatcatcctgcttcatcttcttcagagattcttcagcatttgctatcttctctgaaaatgttttctcaagttcagatagagtagccttctccttcttcctttgcagttcatactgcacaagcaatttctctttatcatcttcaaactttgagaacaggtctttgaaattctgtatgtgtgcaactttatctttgcagaacttgtcatgtgttgctagaaatttagngtactcattcttcaacaaactttcgcactcttttgaa

SEQ ID NO: 110146 - DNA, 302 bp, Zea mays
  Clone ID: MRT4577_31949C.1
ccactcctcgccctctgtactgtcctgtctactcactatagcggtatcagcccaacaaccaggcccgtcggattacaaggtttcccgcgtgcggaggcgagcggggcagggacgtgccggggacggtggttgggttggattggattggatcggatcggtgccgcccgttgaccagagcgtataccagatatgggcaagggcggctgctgcgttcccagcaagaagcgccagccgccggccgtcgcgccttcttcgtcgtccgccgcggcggcggtgccgcgcgaggctcccgaggagggagc

SEQ ID NO: 110147 - DNA, 434 bp, Zea mays
  Clone ID: MRT4577_3194C.1
atcctaccaaacctagctaccaactcgatcgtcgtcatcacgctcgaccgcacaactgcaccgaggggggaggagacctaaaaactactacatcttttagctacacatctagctaaagatcgagaggggtaaataaggacgagcgggcgcgagctagaagagcagctgcaggtactaccatcatcgtcgtcgtgctggagcgacctcgagttctgcgagaaaaccaggaactggtactgctacggcaaggcggtggcggagcaggcggcgtgggaggcggcccggcggcggggcgtggacctggtggtggtgaaccccgtgctggtggtgggccccctgctgcaggcgacggtgaacgccagcatcgcgcacatcctcaagtacctggacggctcggcccgcaccttcgccaacgccgtgcaggcgtacgtgga

SEQ ID NO: 110148 - DNA, 121 bp, Zea mays
  Clone ID: MRT4577_31950C.1
gtgccgcccggatccgccgatggcgaaggaggtcgtgttgttagggccagcatctgttgggagtaaggcgtgttaggcgggcattaactcctccctcctggacctcgagcgcactgactac

SEQ ID NO: 110149 - DNA, 463 bp, Zea mays
  Clone ID: MRT4577_31951C.1
gcgacttcgcggaccttaagctgtcgaaccggattgacactttaatcatccccaagggcctgtgggccttgtcacagcagccagggtccattgtgcttgtttgccctgcttcccaaaaggggcaggttagggtggaacactataatacagggaagactaagtttataaatgcacacactttccgcgtggcgtgctttgcagttgtcacaaggatgggaggctcattgcgactgctaacaccaaggggactcttgctagaatctacaatgcacctgaaggcaatgtcttgcaggacgttaagagaggtgctgatagagcactaatttatagctcggctttcttgaatgattcgcagtatttggctgcctgcagtgataaaggaacaattcatgtctctatcttaaaaataaatgtgtgatcaactgcatatgacaagctctattccttctccgattctgaagtt

SEQ ID NO: 110150 - DNA, 350 bp, Zea mays
  Clone ID: MRT4577_31952C.1
aaaaaacaacaatgtgcggctagtgggcagccggcactcttaaattaagagtgtgtgtaaacggggcactccgacacttttaatacagataaaacccagacttttacaatattaagagtgtctgggccgacactcttaaatttaccgacaccccttcaacgttttcttgtagtgaaagagagtagatctggatcctattgttttaacaaggctacatatagccacaaagcacatggaaaggagacgaatggcactcacagatgtatcacaagatctgcgttgtactaggattcaacgagtgatggccattgaaataaatttgccgcaacaagaatgtaccgatgaacgaa

SEQ ID NO: 110151 - DNA, 621 bp, Zea mays
  Clone ID: MRT4577_31953C.1
aagtttcataccgagtcaagcaattttcgagcttcgtctccagcaagctctcgcccgcctttagccaaaatttgagtgataaatctatttccaatgcttcgagcttcaccaggaatattgactaagtctgatcgtgactggctgaagtttggcttgttcactattttagcatgcgtgcacccggccttcaaaaatgcagcagctgtgccacgagaagctaacagagcacagaaatccccgtgcccagttataacttcatcgagcacatcaacttcattttcaatatgctcgaaggttttcgggatatcttcagccgaaggggcaatttctttagagctagccgcaaccgagttgaatattccttttaatcgatgcacgcagtgggtggcgaaatccgagcatttattccaaaggtccttcagcgatgcttgcagattcgtgttcttctcagcttcggcttcggatttcgcttgtagttattttctttcttgctcgtagcgctctgatttctcctttaaggttgtttgagctttgaggagttcctcgtttaatttagcattttcatcttgtaattccgcaagggaacctttggttgcttgaagcgtgccttgattctttgtt

SEQ ID NO: 110152 - DNA, 650 bp, Zea mays
  Clone ID: MRT4577_31954C.1
ccggccgggactcatcatcgtttcataacgccacgaacataataagattacccactcaacctgtagccaaccagtagctcttcaaaaacaacgctgcaacaatggtcgcccactacaccgaagaagaaatcaaaaaagcccacgaaatcctcttcaacgagggcgtcaaaatgcgctaccaagtggcaggccaagactacgtcgatgccgccctcaagaagcgtaacgatccttttgcaggcgccatgcaagacttcgtcaccgaatcatgctggggctccatctggacacgaccgggcctcgagttgaagactcgctcgttcctcaatattgcgatgctgtgttgtcagaatcgcgggactgagcttgcgacgcatgtcaaaggggcgctgaataatggcggtactgaggaagagatcagggaggtgattttgcaggcagcttgttactgtggtatgccggcgggaattgaggggtttagagtggcgagtaaggcggttgaggagtggaaggcggagcaggttaggaagggacagagtcaggagggggatttggatttgggacatagggctgcgatggagtcttgagtattggactgtgtgaatgataatctattctatttctagttgaacgtaagcctatttcttgtt

SEQ ID NO: 110153 - DNA, 1133 bp, Zea mays
  Clone ID: MRT4577_31955C.1
ccggccgggacggggtattgaacatttcgattagcgaatcgctttctccacgaactcacgaatgcgttggccgctgggagaaggagcagttccgctctctcgtttgggtggacgacgaggaagaggaggccaacgcccacagcaacaggcgaccagcccgcgaagacgtggcaccaggataggtgctcctgtcctgagcttcaaatccccaccccgcggccaagctgttacttgcgctgcggccttagcatgaggtggccgctggcgatctcgactcgccgccgccccctcctccttttcgtccttctcgtcgtcctctacacgattcctgggacattttcatcgaggcaagtcacactcgatactgttgagatattttctactcatgaatggtttggcaaaccaacagtcgttttcgggtgcaatggagagaataaaacagatttgccagatgtgagggaggtgcacacgctatatacctttaagggtgaagaatcatggcagcccttaacagagcttccagaaaagaaatgcaagcgatgtggtttgtatgaggaggacacaattacacctgatgatgtctttgatgaatgggagatgtgttcgagtgatttcaagggtgggaaatacacccggtttaaggaaggccagttcaatgcaacattcctatgtccaaactgcactgcctcaactggacatggaaaccgtgaacctagcgaagatttggaaactaagaagacatctgttgtggtcatcataatagttagtgttcttgcatcagtccttctcaccattgccttgttcgggggctacaagtactggcagaagaagaagcgggagcaagaccaggcgcgattcctcaaactctttgaagagggagatgaccttgaagatgaactgggccttaccaatgaactctaaaacagtgctacagtcttacttcctatgttttcagatgtagtttccacgtatgatgtataggatgtttggttttcactgattttatagtgtatagcatccagtagtttatagagaaatgattccaacaaaactatgattcggttgaatatctgcacggaccgttcggtcgtgcagggctttgcctaaaaaaaaaaaaaaaaaaaaaaggtctt

SEQ ID NO: 110154 - DNA, 434 bp, Zea mays
  Clone ID: MRT4577_31956C.1
aaaattaattaaaacacctaccactacacacgacaagaaccacgaggaccaatggggggtcgcattactctttcagcgcaaagcgatggcacgggtcaccatgatggcttccttcgccgccgtggcggaggccgcacccttgggccgaggaaccttccccgtggtcaggtccgacaaggacaaccgttgtcaggagcccaccacgctagcatacaaccgtagccaggcccggcgccaactgacgccgcaccgttatgcttgcggctgctgcgaagatcgtggcagccatcggcggcgcctagcgccgccatggcgggccccaagaacgggacccctaatgcaaacaagaagtaccctgtcatctgtgtcacccatgcccaccggcaaggtctgccacaactgagcacgcccagcgttgcatcttcatggcctgg

SEQ ID NO: 110155 - DNA, 344 bp, Zea mays
  Clone ID: MRT4577_31957C.1
ggagaattattcatagacggggccttcggcagggggaccctctctcccccatgtggtccatactggctatcgatgtgctaggctatttaataaaggaggctcctaattatggttcgatggtgcctctgatagaaagttcacgaccataaccgcatttctatacatgctgattatgtgctgattttccttcacccccaggctattgatttactaatacaccatggacattatcaggatttttggagaggcatctgcgctcaaagttaatattgcaaagagcaccatcttcctaatccacagtactgctgaaaatatgcataccattcataatctgctgccatgcg

SEQ ID NO: 110156 - DNA, 1202 bp, Zea mays
  Clone ID: MRT4577_31958C.1
gaatcagttccatctctctgtctctcgcttgggaaattgggaggacgacgaggaagaggaggcgcgtgccggcacccgaccgtcgactaccacgctacgacgcggcaccgggataggtgctcctgagctacgaatccacaccccacgcccacggccaatccgctgcgtgcgccgcggccttagcatgaggtggccgctggcgatctcgactcgccgccgccccctccttttcgtccttctcgtcgccctctacacgattcctgggacattttcatcgaggcaagtcacactcgatactgttgagatatttactactcatgaatggtttggcaagccaacagtggctttccggtgcaatggagagaacaaaacagatttgccagatgtgaaggaggcgcacacgctatatacatttaagggtgaagaatcgtggcagagcttccagaaaagaaatgcaagcgatgtggtttgtatgaggaggacacatttaaaactgatgtctttgatgaatgggagatgtgttcgagtgatttcaagggtggaaaatacagccggattaaggaaggccagttcaatgcaacattcctatgtccaaactgcaccgcctcaactggtactgctgatatccaatacctattcctttctgtttgtttagacatttttcctatgagctagctggtttttttatagtctaataaggtaattcttggctgcttgttttattttggttgcatctttgatgatgaaatttccctgttaaatcagtagtacgtaaatgtcgaagaaatgccttgtgtctttgttctacattgcctttgctccagatgtttctttcgtgccaggacaaggaaacagtgaacctagcgaagatttggaatctaagaagacatcggttgtggtcatcataatagttagtgttcttgcgtcagtccttgtcatcattgccttgttcgggggctacaagtactggcagaagaagaagagggagcgagaccaggcgcgattcctcaagctctttgaagaaggagatgaccttgaagatgaactgggccttagcaatgaaatctaaaacagtgcgtacagtcgtacttccgatgtcttcagttgtagtttccatgtatgatgtatagaatgtgcaattttttcacttagaaattttgtagtgtatagcatccagtagtttatgaagaaacggttccaac

SEQ ID NO: 110157 - DNA, 267 bp, Zea mays
  Clone ID: MRT4577_31959C.1
ttctctttctttagctagagtaccgcgcggacggagatcgagctcgtatctactacgttatgagcagccatctgtctgcgaggtctcgctgacatggctgaattaggacatcctaagcatctgctcccgatgccgcggagctctcggctaaggactacacggaccctccggcggagcagctcatcgacgcggatgagctcaccaagtgcgccctctatagcgggagcatacggcgagctcatcggctcgatgctcttcctctacatc

SEQ ID NO: 110158 - DNA, 607 bp, Zea mays
  Clone ID: MRT4577_3195C.1
ctttccgaatcaactcccatacggacgttactctttctccagggatactcctaccactgaggaggaacccaatcccgtccccggaatggagtgtgtattggacgtgattgagcgtgactactcgctggtggaggacgacacctccgacgagcacaatattctcgctcacaagaacgacgaccacaaggtgctgcggctcgcacataccctaaggtgatggatgcttcagggaaccctggtgattccttgctgttcaccgagctgatacacaatcaacttctcgacctgtacaacatcacgataatctccatcccgctctcaaccgccgccgcagccaactacacacgccctcaactcactcacatcccttcgcgagaatccatatatgaccaacatcattctgtgctggttatgatgaaagatagctgatgcttccctctactacatcgactacattgcaaccgtggacaacattgacaaaggagctattgctgacgctattcatacttctgaatgtatcatatgctcgaagatgctcacccggacatgactgttgacgaataaggatatgttgacgacgagtggatccaggaaactattctgatga

SEQ ID NO: 110159 - DNA, 423 bp, Zea mays
  Clone ID: MRT4577_31960C.1
acggatctcgccaagcccgcaaatctcgatggcaccaacaaaagcatggacatctaggatcttcggaatcggatcatgagtatacaagaacacagtcaggacgaagcctgaacgagacgaaagatgattatgacgaaggtctagatgatcacgaagctgtgcgcagaaaagcttcggcatgatagcagaaaaggggaaccgacttaaagatgaaaaggcaaattagacctcgaagagttactatagagttattagcaaatataaagggcatgggtgtaattgtacatgggttgagtcccttgcctataaatagatgaacagtactcccgtactgttcacgctgacttggcattcgcttttgcatcacgcctgtacctttactttccgtcaaaccgaatgtacacttataatttgttattttga

SEQ ID NO: 110160 - DNA, 399 bp, Zea mays
  Clone ID: MRT4577_31961C.1
atctgttgctaaatacacgacactttcattatgcttactagatatagatatcactggtttggtggctctatacaagccttcagcccctcacatcgatcacggcatagacttacatataatgctcaagcttcacacaatgggtttaagagactaccgctatctaaatttcatactaaatcagtatatccatactgaatggatagattctccaagaagtcctcacaatcttccaaatagctccgtcattactgggaataacattccctttgataaataccctcataaatttgaccttgtagatgcagattatattagatattacggtatgcacaacttttaccacacaatgcaaaaccttgagggagaatactaattcatgacatctgatcactcatatgt

SEQ ID NO: 110161 - DNA, 683 bp, Zea mays
  Clone ID: MRT4577_31962C.1
gaagataatgataaatggattattgatatatagcaattattacccttactccttagtattcttctatattcctttactttcttatttatattcatgtttacatgataaaatgatgaaggtgtgaccttcatgtccttcgtctgaagatcattatatccgagatgaaataatgcttcgaaggacgaaggcctttaaccattaacaattgtgttgccttgttcttgatttatagcatttgagaacaagtgaataacactagactaacgagataacataatacctaaggaaaggcttcttgctataatcatcttggttcggttcaaatcatggagtcattgagaaagactctctagcttttgcaagccagtgaagccttttctagcattagacccatacaatcgagtcatcatggatttaataagagatttatgagccttggtttcttcttgagcaccttagactcgagattcccaggtaccaacttggtcttcaagtgactcgtaacctcgctcggattggggcgccagcatattgcccatgtagcggcgcggatcgcggttgtgtcacaggcacggtgagaaattccaattgccacggcgtgaccggttaagcgccgcggatctctgctcacatctccgacccccccttctctcgaccagagcacctcgacatccccggcggtc

SEQ ID NO: 110162 - DNA, 309 bp, Zea mays
  Clone ID: MRT4577_31963C.1
tttttcattgggctcctttgaactttttttcttttttctagcaattgatctattaaattgacacctgaggcgaattaaaaaggccactgctacaaacacggtgaaaaactgatgcccgatggcttgaggaaaaaaacaccgatagcagggtccaccctcattatgtttttaccctgcgcttgcacccgcgtttgcatccacccctgaagctttgattgggcccttccggtactcaattaagctctccgcctagtacatggcgttctatacctaaagaggcggtgtctataggtagcaggctattctagc

SEQ ID NO: 110163 - DNA, 542 bp, Zea mays
  Clone ID: MRT4577_31964C.1
tcactataggtgaagctcggtcccaggcatgctgcagacgcgttacgtatcggatccagaatccgtgattattgcagattagataaacggactggtaatggcggtgcttgctttgcttcaagcgactgtaactgcttatgggcttgcaaaatattcatcatttgtactcctttgagttcctatgaatacaccctattaagtgcataatctataagcccttaagaggttttatttggattatccaacaatcatgcaatcttgagctgaaagtatcatattcacttggaacccacatggcatgagtgccattagcccaacgtaatagtacggaacgtcgtaccttaaataaatcaccttcatgtaatccccgagcttcgtgcgctagtttattacaaggaattgcatgacgatatcctttccgataaacagcgcacatattcttaccgttccaaccttgacgtgacaacttattgccacttttcattaattcgagcgctcttccaaaattcattattgtagaccgtcctttcattcttcataac

SEQ ID NO: 110164 - DNA, 646 bp, Zea mays
  unsure (1)..(646): unsure at all n locations
  Clone ID: MRT4577_31965C.1
cctcgaggccggccgggttatagatagtttggtgatgacaaatataaagggaaaaaaagggctggaaagctgccttttgttgtttcactaagatgaaggttgtatgatctctgtctcttcatagtggaagttgttacaccagatgaaaaagaatatcggatgggaatcctcacgagcttgagttctctgcaagtttccagattggccggtatctcactgctaatgagcaatgttctggttcgagcttttcttttcttttcttttcttttcttttttttgatgggaaggacgagctgtcctattggcagcaaatgcggacgtttgtcgttggtaaggcctgctgctgctgcagtggcgctattgtttgatggcgcagtagacttgcccattgcaaggcggttgcagtgctattgttgtagcttagctaggtaggttgtgcctttctgatgaaccttgaactgtactgtcggcgagcaaacttctactcagttgcttatttgaggctggaaaaggcaactaaagtttgttttaaaaaaaaaaaaaaaaaaaaaaaaaaaaaaaaaaaaaaaaaaaaaaaaaaaaaaaaaaaaaaaaaaaanaanaannnaaaaaaaaaggaaaaaaaaaaaaaaaaaaggggccccca

SEQ ID NO: 110165 - DNA, 684 bp, Zea mays
  Clone ID: MRT4577_31966C.1
ggccgcttttttttttttttttttcctttttttttttttttttttttttttttttttttttttttttttttttttttttttttttttttttttttttttttttttttttttttttttttttttttttttttttttttttttttttttttttttttttttattttttttttctctttttctttttttttttattgtggtacaccgaagggattggtgaaggggcatgggggcggttgttttaggtcgttcatggcgggtaggtgatggggtatgtgggggggtttcttcttggggtcctggttggtggggggggtgttgttggggggggtaatggaggacctagccgaagtctgggtggtaggtttgctggggatcctcttgccttacatgttgtcaacactggtgttgttaagactgccaatttggggggcattaaggttctagtgggttgtttgacgttagtttttattaactctaggcagttgggccaggataggtttgctgccagggccgcagtttttctggtgttggaacgctttaggagggttttgttagaaaggatttggctgggggggttatgttggttatcctggttcttgaggttttttactttgttggttgggttattttttgtttttgttttcattgtgtgtttgttttaatatattggaaggggttgttttt

SEQ ID NO: 110166 - DNA, 1633 bp, Zea mays
  Clone ID: MRT4577_31967C.1
attcggctcgagatttccctagcactgcaagctttacagatcagatatggtattcctaacaaaagcaacctatataggcagttcttgactagcaaagttactcaagtgaattacttgggcttccgtctgtatcgtgctttaccattcttgtatgaattgcggtgtgtacttgattggtcttgcacaaccacatctttaacaatgtatgattggctgaagttggaggacatatatgcaagcttgtttcttgtgaaatgtgatacacttttgaacagagctaatcatcgtcagggagaaaaacaaacaaaaacgacgaaattctgcagtgggatatgcttattctttgtacttatttgtgttatttgggctcctatgttgatttatagtagtggtaaccctacaaatattgccaatcccattgttgatgtaagtgttaagattgatataaaggcacttggtgggagattaaacttgtttaagactactgcttgtgaaaaaataccttggaagtacttgaaggcctatgatgatgttgatcctctagattaccttggggcatacaatgtggatgacattcagctgatttgctgccagcctgatgcatcaacaatgtggttgatacctcctccagtccaaaacagattcatccagtcccttgaggagagagagatgctttttggaaagatggaacttattttaaattgggattttctcagagctagaccaaaagggaaggaattagtgcgatatgaatcccctattgaacactgcccgagtgtagatgatgttaaacgagtgcttaatggaactgcaaacagcttcagtataattgatgcttacccaaggtactttcgagttactggatcaggtgaagtccggcgattagaagcagcgatagattcagtaagtggcgaattgctattaaataatggcactccttggtggtcattctatgatacaaacccatcagatttggcaggctgtcaagggctgaatggtcccatggctatagttgtttctgaggagacacctcagggcattattggcgaaacactcagtaaatttagcatatggagtttatatattacttttgttctagctgttgcgagatttattaggcttcagtgctcagacttgagaatgagaataccatatgagaaccttccgtcatgtgacaggctacttgacatctgtgaaggaatatatgcagcaagagctgaaggagagttagaagtggaagaagttctgtattggacattggtaaacatctatagatcaccacatatgctgcttgaatacacaaagcctgactagggcacccgttctgctaaggaagccattctgcaaaaaaattccatgtaatgtagtaatgtacaagtagaacacttctttcctttgaggtcacaacgaagctaacttaatcctctcccccccttgtgtcaggacaaaaaacgtgcaaataggctttgtagttgtagttcgtttttgctaacatgtatacggttgaccattatttttggagaagtatacatcaaagtttcattgtgaaagttatctcatgctactaaaatgtgttaagaaagttgcgaatgaagatgtaatccatgtcatcctaatcaaaatgtcttccgat

SEQ ID NO: 110167 - DNA, 471 bp, Zea mays
  Clone ID: MRT4577_31968C.1
aacgttccatgcttcattgcttttttttttttacagttcttcttttaaaaaaaaaaagcgacgtttattcgttgggcatgatattacagggcattgcccggaaggaaacacacttccagtattattccgtgcacacttgacacaaacccaaactgagaccccgggtcgggggtttccatggccatggctacccccgggatctggaaagggtcggcgccctggttgagcttcttcttgagccttcccttcttgaaggggcggaagaggatcttcttggaacatgtgtcctgatgcggcgcggggcatgtaattaacacgcccttcccccccgggcataactggagctggcacagcatgtacttgtcaaaggggcccttgctgcacttgatcacctgggtctcattaatgcccttcttgaagaccttggggaacgcctttgggcccaaatgccccaaatccggcttgatccct

SEQ ID NO: 110168 - DNA, 946 bp, Zea mays
  Clone ID: MRT4577_31969C.1
cattctcatcccattgggtgcgccatccccgcgcacacacacacgtcgagggagacgaagggataggagggagaggcagcgattgcaaagatggctagggctgggagcatgcacgcggcggatccaacaggccggataagcacactgctcgcgctgcgctagctcctcgccatgctctagccgctggccctgctcctgcccttccagtggcgcactcaacgggggcgttcgatgtcgcggcctccacgttggggctagcgggaaaaggggaaggcaacgtcatcaatggtttacgggtgccggccgggtcgcccatggtcgccgtgcgaagggagatcgccacacgccgggcgcaggagaccgggcgggagtacgagctgatccccggcttcttggagatggaagcgaccttttgaagttttaaggtctgcagtgtcgtggtctcgctcctcgcggcgtcgcttgtttcctggatcctggatttctcctctccaaatctctaaccgagcaacatacattgttaagtgatatttttcattacagttaggttttatttggtcttagatttctatggttagtttttcatatgatgtttggccattccctacacagctagtcgttctttcatcaggcttgttctatagagcttgctagcctttttctaaagtgcagatttatatatattctcattgtgttgtgtgctgcctatgcataatattttttaaaaggagctaactgagtatagtagttgtaccaccaataatcattgccaaagtccaagcttgacttttgtttgattggaggagaatataggtggtgctagaggataatgggaaaacagcgggatggtatgctaactgcggaatgacctttggtggtggctggcgcatgggatagggccttgagttggggtgtgctggagtcacgttggttggcgggggtgctt

SEQ ID NO: 110169 - DNA, 374 bp, Zea mays
  Clone ID: MRT4577_3196C.1
aggcgttcgggacgcatggtgcgggagcatcggtgaagcacgcgccgtatgtcagagcagcagatgcgaaggcctgctctttcggaactgagtgatctctggatatgcacagcatggcctgacggaacattgcctatacttgccaagagaaatgaacgggcatataagccctgatgcgacatccatgctaggtgtgctctcataatgccgggatgcattcatcgaggcagaggtcccacggtgcttcaaggcaatgactgaacatggagtagtaccagagatagatcactacttacgtatggtgcatcatctagggcatgcatggctgctagatgaagcacgcgatcttattcagacgataccgatgccttcaa

SEQ ID NO: 110170 - DNA, 463 bp, Zea mays
  Clone ID: MRT4577_31970C.1
acaaatgcgtgcacgtgtaatgcacgcttattttttattgtgcaaatccaaatcagaattattcctgcaaaatttattttttttgcccatgcaaatgcagaggctattccggccgatcacgggcagaaggggacttggtagttgctgttgccgccacatgcatgggtcttcatgtcgggggggttgtggtacgcgttggggcattcagggttcgtgcacaccagccgtacgccggtgcttcaggagaaggccatggggaggttgtagccgtcgatgaccgagatgttgtaaaagttctggctgccgccgatggtgaacttggccagcgttaggggggggtgcccctacagtgtgcaggccaatgcgccgccgaagtcgcctgtttggcaactcccgctgttgccgttgaaggagcaggcggtgtgggcccaaacgcggccggagatggtgccagtcggcacgt

SEQ ID NO: 110171 - DNA, 373 bp, Zea mays
  Clone ID: MRT4577_31971C.1
gctgtgtctgagagcagtaaaacacctaagaggccagcatttctattattgcacaagcaatcaaacatactgtgtaaaaatagaaatgctgtgtctgaaagcagtaaaacacctaagaaaccagcctggctcaaccacattccgatcactgcctttgttagtgttaggatgtcagcacttctgcgcattggtgatactcatgtgctgtgtttaggttatgttcttgtgttctttttctgaatgatgaggataattaagtgattaataagggcagaccagtgctggaggctcccacatgagtggggtctgaagaaagatagcctttcgcccacaaatgcagagaggctgcttcgaaactgtgacatggtgactc

SEQ ID NO: 110172 - DNA, 135 bp, Zea mays
  Clone ID: MRT4577_31972C.1
gaaaagcgtactgtttcacaccttccatcgggtgtttacagactccagcgtccgggtgtttatcctcatcctattccgatactttatcgatacctagatatatttttacatcttcttcaatagcgataatctcta

SEQ ID NO: 110173 - DNA, 677 bp, Zea mays
  Clone ID: MRT4577_31973C.1
gaaggtacaacgagtcaggagcaggcacgaaagagagacacatctcgctcgctctcgccgccagtccccgccaccgctcgccgtcgccgtcgccggaggaggtgcaggagccatggcgccggagccagaggacgacttcctgaacgagaagaacccgaggccgctcgacgaggacgacatcgccctcctcaagacctacgggcttgggccgtactcgaacagcatcaagaaggtcgagaaggagataaaggagatggccaagaagataaacgacctgtgcgggataaaggagtctgatactgggttggctccaccaagtcagtgggatcttgtatcagataaacagatgatgcaagaggagcagccactgcaggtcgctcgatgcacgaagatcataagtccaaatactgatgatgccaaatatgtcatcaacgtcaagcaaatcgcaaagtttgtggttggcttaggggacaaagtttcccccactgatatcgaggaaggaatgagagttggggttgatcgaaacaaataccagattcaaattcctttgccgcccaagattgatccaagtgttacaatgatgacagttgaagaaaagccggatgtgacatataatgatgttggtggctgcaaggagcagattgagaagatgcgggagggtgtggagcttcctatgc

SEQ ID NO: 110174 - DNA, 849 bp, Zea mays
  Clone ID: MRT4577_31974C.1
aggccggcggcgggcaccaaggcggcactgcccaaaccacctctttggccacacacgcatactgccaccgctactgcttcatcagcagctagcagcaagcggccggtggtgcagcgctgcgcctgcgccgggtaatcgaacacatggctcagatgatctcaaccatgcccatgctagacgccgccccggcctcgtcagccattatgcccaagctgccgcccgccgcctgcctggacgcgccgccggcctcgggcatcaccgtcgtgtcgaggcagcacgttcgcccggacgccgcgtcggcggtcggcgacctcacgctgtccgtctccgacctgcccatgctgtcgtgccactacatccagaaggggctcttcttcccggcacccgacctgcccatgtcctcggtcgtgtcgctgctcctgtcctcgctgtcgcgggcgctcgccgtcgtcccggccctcgccggccgcttcgtcacgctgcccgacgaccgcatcgtcatccgctgcaacgacgcgggcgtggacttcctccacgccgtcgcacccggcctgtcgcttgacgactttctcgtccctgacgccgacgtgccgaccaagcacacaaaggacctgttccccatggaccggaccgtgagctacgaggggcaccgtcgcccgctcacgtcgttccaggtcaccgcactcggagacggcaccgtctttatcggcatcgtcgccaaccacgccgtcgtggacggcacctccttttggcaattcttcaatacctgggcggccatctgccgcggcgagtcccccaaactgccggacttccgccgaaacttctttggcgagtccactgccgtcctcc

SEQ ID NO: 110175 - DNA, 1895 bp, Zea mays
  Clone ID: MRT4577_31975C.1
cggactcaagatagcaatcttgctgcaccttcttctgcaaatgatcttgttccagctgctgttcctgttccttccactggaactggttcgttttcagcatttagtcccaacaatgcacctgcaccagctgtaaatcccccaagtaggccaccaacggcccccagtactaccgctggagaagttcaggaaaggaggtcaatgaaatggctttatttcattgtgctgccactggtcgtgcttcttattggcatcgcatgcatgcttttgctatgccgcaccaagtcagggacaacaataggtccatggaagacagggctcagtggtcagctccaaaaggcatttgtaacaggagtaccaaagttgcaacgctctgagctggaaggtgcgtgtgaagacttcagtaacattgtgtcaagctatccacagtacactgtctacaaggggaccttatcaagtggtgttgagatagctgttgtatcaaccatggttatctctagcaaagattggtcaaaacattcagaagggcgattcaggaagaagatagactcactctcgcgaatcaatcataagaactacatcaacctgcttggatactgtgaggaggaagaacctttcactaggatgatggtgatggaatatgctcccaatggaacactatatgaacacctccatgtcgagggatttgatcctattgattggaatggtaggatgaggataattatgggggtagcatactgcaccctacacatgcatgagcttagccctcctgtaacacacccagacataaagtcaagtgctatattgctatctgaggatggagctgcaaagatagtagacatgagcgtttggcatgaagtatatttcagaggaaacatgcccaaggatggcgacctagttgatcaccaggaacgagtagctgcagatccagctgggaatgtctacagttttggtctactcatgctggagatcatctcagggaagcctccgtactccgaagaaaagggttccctttcagacttggctttggagtgcattagggataaccggagcatgtcttgtttgcttgatcctagcttgaaggatcacaaggaaaaggacctagaaaccatatgtgatctggtccaggactgcatccaaagcgatccaaagaagagaccagccatgagggaggtcaccactagactgcgagaagtactgtcaatttcgcctgaggctgcgacgccccggttatctccactctggtgggcagagcttgagatcctttcagttgaagcaagctagcgaaaatgtgctttgtttgcagcaacaccgaggtacttgtgcatactgtaatgcaaccctgtacatccctgttgtatttttccatcctgtgttgtaactttggtggtgtctgcgtgctacatttccccctccccggtgaattcagctgcctggtttgtttttctcatctgtatactaaacatacatggtgtgagagcagaatgctttataccatcctaggactgattgtaatcaggaaatgtgtagtgttccatggttttacagaaataaacaaaaaaagaaaaaagcggccttgttttcagacactacacaaggtcttgtgcatactgtaatgcaaccctgtacatccccgttgtatttttccatcctgtgttgtaactttggtggtgtttgcgtgctacatatttccccctccccggtgaattcaactgcctggtttgtttttctcatctgtatactaaacatacatggtgtgaaagcagaatgctttataccatcctaggactgattgtaatcaggaaatgtgtagtgttccatggtttcacatcaacaatcaaagaatgtatatttctgtaaaaccatggaaccctacacattctttgattgttgatgtg

SEQ ID NO: 110176 - DNA, 607 bp, Zea mays
  unsure (1)..(607): unsure at all n locations
  Clone ID: MRT4577_31976C.1
gtttttgtagaactgctctgtacctgaatactttttgagagaattaagatgtatcaataatgctttgccatatgagttttttaaagtaacttgttcaatttactcacgtgttctaaacatctttccattacatgttctgtattttaatacattgcatattgacaactaggttctataatgtatgctttgaaatttacttttttatagtttacaggaattttattttttgtgcctatttctttttacacctatgtgaaccactatggaacaacttaaattttgtgccataaaaatatttttgtggtaaggtactatttttttagctctagggatatatcagcaaaaacacatcatgcaatttgagacacataattttgtgttgaatgagcacaacataatttgaagcattgcaaggagataaccagacagcagaattaaatggtcctgtctttttcatttttaatttattgtcatacatgggtttcatatttataacggcatcatgagctcattgcacttaatacctgcaatgtttgctactgtaccacaattgattttcaatactntattacgaaggatgaaactgtaatgttttattaacaatgct

SEQ ID NO: 110177 - DNA, 1022 bp, Zea mays
  unsure (1)..(1022): unsure at all n locations
  Clone ID: MRT4577_31977C.1
gggtacctcgaggccggccagccatcttatagtgactttatctcaaattcatgttatgctcgttttttgtcggggctatctgggactagcttattcaactcaattagcttgatggcttataacgttttctatacaagtttacccgtcatgactataatctttgacaaggatatctctgaaacaacggttatgcagtacccccagattttactgcattctcaagctgggaggcttttaaatctcactacattttgcggatggtttgggcgctcgctatatcacgcactcgtcgttttcttcattacgatatgcgcctactcagatgagaaaagtgagatgcaggaactgtcaatggtagcactgtccggttgcatttggttacaggcttttgttgtgacaatggatacaaactcattcacttgcccgcaaatccttctcatctggggaaactttgtggccttctacatgatcaacttaatactcagtaccgtcccaagtctccaactgtacacaatcacgttccgcctgtgtagccaaccttcctactggatctccatggctctgacggttgcagtaggaatgggaccggtggtggctttcaggtacttgaagaacctgtatcagcctagcgccgttaacatactccagcaggtcgagcagcgcaatggatctatcagaacttctgggaatctggagtcggcgggagccaatctcactaatctactgactggctcacgtaaaaacagggattctaattatcgccctctgctttcagagtctgcggagtctgtaagtgcaagcggcagctaagaattgtctaggctttccgtactagcatgacagtcatacactcatacagacggcagaacagtgaactgtaacagaatcatgcttgtactcaaaaatatttcgtcggggtcaaagccaataattgttttgttggcctaaatttgatcatttttctcaaaaaaaaaaaaaaaaaaaaaaaacaaaaaaaaaaaaaaaaaaanctcgaggagggg

SEQ ID NO: 110178 - DNA, 562 bp, Zea mays
  unsure (1)..(562): unsure at all n locations
  Clone ID: MRT4577_31978C.1
ggggatactccattgcgatacttgagacgcttcgctctctctcttgttcttctcgccttctgccggagtgatggccagcctcaccgacctcgtcaacctcgacctgagtgactgcaccgacaggatcatcgccgagtacatctggattggaggatccggcatagacctcaggagcaaagcgaggacggtgaaaggccccatcaccgacccgagccaagctcccggagaggacagcgaagtcatcctctaccctcaagccattttcaaggacccgttcaggaagggtaaccacatccttgtgatgtgtgactgctacacgccacaaggcgagccaatccccaccaacaagaggtacagcgccgccaaggttttcagccaccccgacgtcgcagctgaggtgccgtggtacggtattgagcaggagtacaccctccttcagaaggacgtgagctggcccctcggctggcctgttggtggataccctggtccccagggaccatactactgcgccgncggtgccgacaaggcctttgggcgcgacgtggntgacgcccactacaag

SEQ ID NO: 110179 - DNA, 1376 bp, Zea mays
  Clone ID: MRT4577_31979C.1
cccgggctgcaggaattcggcacgagagacgcttcgctctctctctctctctctctctctcgtgttcttctcgtcttctgcccgagtgatggccagcctcaccgacctcgtcaacctcgacctgagtgactgcaccgacaggatcatcgccgagtacatctggattggaggaaccggcatagacctcaggagcaaagcgaggacggtgaaaggccccatcaccgacccgagccagctgccgaaatggaactacgacggctccagcaccgggcaagctcccggagaggacagcgaagtcatcctctaccctcaagccattttcaaggacccgttcaggaagggtaaccacatccttgtgatgtgtgactgctacacgccacaaggcgagccaatccccaccaacaagaggtacagcgccgccaaggttttcagccaccccgacgtcgcagctgaggtgccgtggtacggtattgagcaggagtacaccctccttcagaaggacgtgagctggcccctcggctggcctgttggtggataccctggtccccagggaccatactactgcgccgccggtgccgacaaggcctttgggcgcgacgtggttgacgcccactacaaggcctgcctctacgccggcatcaacatcagcggcatcaacggcgaagtcatgcctggacagtgggagttccaagtggggccgtccgttgggatctctgccggcgacgagatatgggtcgcccgctacattctcgaaaggatcaccgagatggccggaattgtcctttccctcgacccgaaaccgatcaagggcgactggaacggggccggggccccccccaacttcagccccaagttgattagggaggccgggggaaaccaggtgatcaaggcggcgattgacaaactggggaaaaggcccaaggagcacatccccgcgtacggcgagggcgacgagcgccccctcacgggccgccacgagaccgccgacatcaacaccttcaaaaggggggtggggaaccgcggggcatccatccgggtcggccccgaccccgaaaaggagggcaaggggtactttgaggaccgcaggccggggtccaacaaggacccctaagttgtccccggcaagattgccgagacccccatcctgtggaaaggaaactgatcaagcatgtgcatttttgagggagccccctgttttttttttgcccaaagcaacccccggggggtcgctttggttttgaaaattaaaatccgttgtcctaaaaattatccctacggtttcccggtgtaatggtcgggaacaaagaaaaacgactgcgatgtttttttgttaaaaaaaaaaaaaaaaaaaactcaagactagcctgcagcccggg

SEQ ID NO: 110180 - DNA, 160 bp, Zea mays
  Clone ID: MRT4577_3197C.1
cggactcgggaccttcgccacccctggcacaccccgtgggacaacataccgacacgagcttacactgaaattgtcaccgaaacccacctcatgactcggcggagcagggacccaaccagtcccagacatggaccgagaggctcccactacaagctctaca

SEQ ID NO: 110181 - DNA, 608 bp, Zea mays
  Clone ID: MRT4577_31980C.1
aaaaaaaaacacccctttgtcctttttttaacccttttaaggtttttaaagggcccaaccggccaaatttttcggggcaaaaaaaaaaaaaaaaaaaaatttttgttggaaaagggggcccccccctttttaacaaattagggggccttttccatttaattttaaaaaacccacccccccagcacggggcccctttacgggggggggcaaaaacccaaactttttttgaaatggtttttaaaacccgggagttttggggggttttcccccacctcgggggcaaaataaagggcccaaaaaaaaggttgtttaaaaccccccgggggggggggaaaatcttttgacccgaaaccctttttttttttggaaaccaggggaaaaggggggttccttactggggggcgggaaagggccccccagggttaccttttgaaaatttggccttgtttggaccaccccttaaaaggccgaaggcaaaaattggccctccccccacccttttggcttaaaaagccctggggggggcttggggggaaaaaaatggttagcataaacccccctgcccagttaaaggatttttgagaaacctttggaaaatttgcccccct

SEQ ID NO: 110182 - DNA, 344 bp, Zea mays
  Clone ID: MRT4577_31981C.1
atttctttgttccatatcaacagacactccgtatcggagattcttatttcttatttttttgcagtaatatgaggtttgacatgacctctttccttgcatattgcacatagaacctacttatgttgcaacctgaaatgcttgctagtcttattaattcatcaaattcgtgtgtgatgcaaatgcactgagctgtaatgttgtatatatctgagtggaagttgagcgtgcgcactgcttatgtgaataacttatgacttgcctagattgatttctgtagaaatgttctataccttatgccatgcaatgcctgcactgcgtcgcgctacacaatgcattgtgcagta

SEQ ID NO: 110183 - DNA, 175 bp, Zea mays
  Clone ID: MRT4577_31982C.1
gatttctctgctttagatccatcgcggtcttccaggcgttacggacaatatatgaaaagaacgggtgcagctattttggcaacatgcgatgcgctagagagatagactgaaagctccagccatcccttccataagacacccaaaccaggcatttaggacatggctgctgatcctt

SEQ ID NO: 110184 - DNA, 411 bp, Zea mays
  Clone ID: MRT4577_31983C.1
ctttggtctagattatgtgcctgtaccctctagacgtaccgacaccgaatacgcactaaacacgcgttacagtaagggagtgccgtcccgcactgattgtatccccgttcgattcactaactacaaggtatcgatcccaggtgtcgattcagccacctacctcgtaataaagcataccgtcggatataatgacgccaccggaggacgtgctagcggtagaaacgagccggcccttaaagcttgcacccactattacgcggccggcggcgcctcaaatttgaacgtcgtgcattccacttcctgaggtacgaaaatatcctactcttgcgcgtaacgctagaacaatatcgtctccttgacggtttagcccccagaggaatactcaaagaccgtttgcgctcatcacttcgg

SEQ ID NO: 110185 - DNA, 354 bp, Zea mays
  Clone ID: MRT4577_31984C.1
gcaaaaaaaaaaccatcacacaaaaaaaacaaaaaacaaaaaaaatttttaaaaaaaaaaaaaacaaacaaaaaaaacgggaacttttaaaatcttgtggttacctaaaaacatacctacatttctatccatccaccgttttcatacaccaccttcccacattataatttttctatacactaacttcaactcatttcaaagccccctctctttaaaactcttactcttctaaaaaacctttccttttcccatctcaatcccctacatccacttccccttttccccaactgtctttctcccaaaacccctccctacattcccctttccatcatttttacactcctaatttccctt

SEQ ID NO: 110186 - DNA, 357 bp, Zea mays
  unsure (1)..(357): unsure at all n locations
  Clone ID: MRT4577_31985C.1
aagcagaaacgcgagcggcaccccccccccaccacaaacgacacagcagcaaacaaaccaaagggaaaacanacagcaacgaccaagacaagggccaaanaacancccgaccagaacaggcacaccggaaacagggcaaagcaacgaaaaccggaacggcgcaacaccgagcagagaggaacacgaaccaggacccccccgaggacagagaacgcaaaccagngncgcgcgggggagcggccgaaanagggcgccccaccctacgacgcgaaggcgcaaaacacccagnggacagaaccccaggggcnggaaggaaggccggagcaagccngagcagcgacccacgacactgcaaca

SEQ ID NO: 110187 - DNA, 197 bp, Zea mays
  Clone ID: MRT4577_31986C.1
aaattttatttttggaatagaaagcgtaacgggggggggaccgtttttgttcgattattgaccccaaaaggagagtcaatattagattattcaagtcgaaatccaagattattgttcatgataaaaacaatgttcggcaaaaaaaaaaaaaaaaaaaaaaaaaaagaaaaaaaaaaaaaataaaaaataatttaact

SEQ ID NO: 110188 - DNA, 313 bp, Zea mays
  Clone ID: MRT4577_31987C.1
accgggccggaaattccgggggaaggtcccgaccataaggatcctccggagttggaataacctcccgggttttttggggaggaatgggaatccgcctaaaacttttttagtaataaaagtgggaagggaaaacaactccaacccgtaactggggtttgtccagaatatatatgaataaccaattcttggttccatctttgaaggggaatctgtggggattttgggagggggctaaattaaaatgcggttaaagggccttggggttttacggggcaacaagggaggggagaaggaaaggaaagggaagggatgg

SEQ ID NO: 110189 - DNA, 280 bp, Zea mays
  unsure (1)..(280): unsure at all n locations
  Clone ID: MRT4577_31988C.1
taataataaaagcataaatatgtaaggatatatgcatttttcaaagcaaggatctttttgcagtatttttattagtggtaaaaaactggaaacaaggtgtgaaaagttgaatacatttgatacattttggccttgtaacatgcggtcattaaaaagaatgtagttctgtgtataccaattaatgtagatatattccactgtttgctatgagatgagataaataagatgtgaaggagcatatatggngacaacttcattcccatagaaacataatagaatt

SEQ ID NO: 110190 - DNA, 2157 bp, Zea mays
  Clone ID: MRT4577_31989C.1
cagacgccccctcgagcccggccgggaagccggctcccgtcccatcgctcgcttccccctcccgcgaatcattcgattcggcccgcctcgtctcgcccgcccgattcgatttggccgtcagggtgatcggaaccggcgctagggttagggttccggcgatccccatacctatggtgcagctgccgagctcggggaagcggcacgcggagccggccatggctccggcgcggcgcgcggcgacggtcaagctagaggtggaggagctcggggccgacgagcgctgcccgctcagcaagcgcgccaaggcagctctgccgatgcccccgacgcctccgcagccgcagcaggatatgtaccacaatgtactcgatgaacctagcccattgggtctgcggctgaaaaaaagtccatcactcttggatttgattcagatgagactttctcaagcatccaatgctggcgagtcatccatggacaacagcggttctgagccttccaagaagaaagacaataaatctggtgcttctgcagcaggcgaacgactaaaagcttcgaattttcctgcaagtatattgaagattggttcatgggagtatgtgtcacggtacgaaggtgatttggtggcaaagtgttactttgcaaagcataaacttgtgtgggaagttctggaaggtggccttaagagtaagatagagattcaatggtcagatattactgctttgaaggcaacttgccccgaaaatggccaaggaaccttggacgtggtgttggccagaccacctcttttctttaaagagacagatccgcagccaagaaaacacacactgtggcaggctacctcagatttcactggtggtcaagcgagtgtgcacaggcggcattttctgcagtgcccttcaaccttgttgagcaagaattttgagaagcttattcagtgtgatcagcggctatatcaattgagtcaacaaccggaaatcacattagactctgcgttgtttgaacctaggagctcaatatttgaggatccggttgaatcaaaatgtgctgggtttactaatttgaaagatgaacatgaggctctacctggcttttcaggcccggtgtcaccatgtgctggttcctccatatctgctaagaatgaaaacaatgattccattggaatgacagctgaatatctttctcagacagtaggaacaggagttggtgctgtaggtgtacaagctgttggcagaaatgtgaatggtgcagcaccagaattcagtattccccactggtggagtcaattgaaggtgcctgggcttagaccatcgatgtctgtggatgattttgtgaaccacctaggcaactgcatctcagagcagatcacttcaggcaatccggcgttggccaacaacgaggtgccgaccaaagagaactgaggctggattgctcagtaccttcttggtgacacacaaggcccaccggtttctgcttcagacgagagatcactgatggccagggtggactccctctgctgtttgattcagaaagacacagtgccggtcaccaaaccaaaacctgagccaaatgacagcgacagcatacggtgttgaagcctcggatggttccgacgaagaattcagctctgcaccaactgggaaacctacagatgccaccaatctaccagccatgtcaagaaaggattcgtttggggagctgctgactaacctcccccgcattgcctcgctaccacagttcctcttcaagataccagagggtacagagaactgaagctggaagtcaagacctcgcgcccttatgctgtaaagattgtacccaagcaataagaaatccggtaggttgtattctggtgcaccagttccccgccctgtaaatgtgacactcggtaggttgccccagctgtgtgtttcgcgactgaaatgggtagtggaaaaattgagatgttcgttggttcttttaactcaatcgtgtcccacgcaaaacttctgagcttaattttcaggcggcacctccactggtaccctgtatgttcctgattgacgtgtatataaaggttgtttcgatctgtcatgaacgtaaggttttcagattgacatgttccagattgacgcgaaaaaaaaaaaaaaaaagcggcctgttttcatctgtcataactcc

SEQ ID NO: 110191 - DNA, 1265 bp, Zea mays
  Clone ID: MRT4577_3198C.1
tcggctcgagatcctaccaaacctagctaccaactcgatcgtcgtcatcacgctcgaccgcacaactccaccgatgccggcgcccctgctgccgccgccaccgcggtaccggcggggaacgggcagaccgtgtgcgtgaccggcgcggccgggtacatcgcctcgtggttggtgaagctgctgctcgagaagggatacactgtgaagggcaccgtcaggaacccagatgacccgaagaacgcgcacctcaaggcgctggacggcgccgccgagcggctgatcctctgcaaggccgatctgctggactacgacgccatctgccgcgccgtgcagggctgccagggcgtcttccacaccgcctcccccgtcaccgacgacccggagcaaatggtggagccggcggtgcgcggcaccgagtacgtgatcaacgtggtcgacgagtcgtgctggagcgacctcgagttctgcgagaaaaccaggaactggtactgctacggcaaggcggtggcggagcaggcggcgtgggagacggcccggcggcggggcgtggacctggtggtggtgaaccccgtgctggtggtgggccccctgctgcaggcgacggtgaacgccagcatcgcgcacatcctcaagtacctggacggctcggcccgcaccttcgccaacgccgtgcaggcgtacgtggacgtgcgcgacgtggccgacgcgcacctccgcgtcttcgagagcccccgcgcgtccggccgccacctctgcgccgagcgcgtcctccaccgcgaggacgtcgtccgcatcctcgccaagctcttccccgagtaccccgtcccagccaggtgctccgacgaggtgaatccgcggaagcagccgtacaagttctccaaccagaagctccgggacctggggctgcagttccggccggtcagccagtcgctttacgacacggtgaagaacctccaggagaagggacacctgccggtgctcggagagcggacgacgacggaggccgccgacaaggatgcccccgcggccgagatgcagcagggagggatcgccatccgtgcctgagagggcgatgccacacatgaacacaaagcaatgttcatactgctgccctgcacctgctgtgtaaccaggcctgtgtttgttctggctgatagtgatgtaccctaagacttgtaacgtcatgttcgttcttgtgaactatagcgagtgaataaaaaaaaaaaaaaaaaaaaaataaaaactcgaggggggggcccgggtac

SEQ ID NO: 110192 - DNA, 2011 bp, Zea mays
  Clone ID: MRT4577_31990C.1
attagcccaagcaggcttctccggctgccgtcccccattccgtccgccaccgccttccctctccctcgaatcattcgattcgcctcccgtcgtctcgtccgcctgattctactcggccgtcacggtgatcggagccggctagggttagggttccgtacttccgttgatctccacgcccatggtgcagctgccgagctccggtaagcggcacgcggaaccggccgagcagacgatggctccggcgcggcgcgcggcggcggtcaagctggaggtggaggagctcggagccaacgagcgcggcccgctcagcaagcgcgccaggccagctcagccgatgcccccgacgcctccgcagccgcagcaggatatgtaccacaatgtacttgatgaacctagcccattgggtctgcggctgaaaaaaagcccatcactcttggatttgattcagatgagactttctcaagcatccaacgctggggagtcttccatggacaacagtggttctgagccttccaagaagaaagacagtaaatccggtgtgtcttcagcaggcgaacggctaaaagcttcgaattttcctgcaaatatattgaagattggttcatgggagtatgtctcacggtatgaaggtgatttggtggcgaagtgttactttgcaaagcataaacttgtgtgggaagttctggaaggtggccttaaaagtaagatagaaattcaatggtcagatattgctgctttgaaggcaatttgccccgaaaatggccaaggaaccttggacgtggtgttggccaggccacctcttttctttaaagagacagatccgcagccaaggaaacacacactgtggcaggctgcctcagatttcactggtgggcaagcaagtatgcacaggcggcattttctgcagtgcccttcaaccttgttaagcaagaattttgagaagcttattcagtgtgatcagcggttatatcaattgagtcaacagccagagatcacattagaccctacattgtttgaacctaggtgcacaatatttgaggatccggttgaatcaaaatgcgctggttttactaatttgaaagatgaacatcgggctttgcctggctattcagattcggtgtcaccatgtgccggttcctccatatctgctaagaaagaaaacaatgattccataagaatgccagcagaatatcctcctcagacagtaggaataggagttggtgctgtaggtgcacaagctgtcagcagaaatgtgaatggtgcagcaccagaattcaatatccccaactggtggagtcaattgaaggtgcctgggcttagaccatccatgtcagtggatgatctggtcaaccacctaggcaactgcatctcagagcagatcacttcaggcgatccggcattggccaacaacgaggtgccaaccaaagaaacactcgaggggattgctcagtaccttcttggtgacacacaaggcccgccggttactgctgcagtcgagagatcactgatggccagggtggactccctctgctgtttgattcagaaagacacagcaccagttgccaaaccaaagcccgagccaaatgacggggacagcatcggcgtggaagcctcagatggttccgacgaagaattcacctccgcgccaacagggaaacctacagatgccaccaacccgccagccatgtcaagaaaggattcgtttggggagctgctgacaaacctcccccgcatcgcctcgctaccacagttcctcttcaagataccagagggtactgagaactgaacgtggaagttaagatccctggaataggtagtttgctgtaagcctgtaaagattgtatccaagcaataagaaagccccttatcacctcctcggaggcgtgttccccgctctgtaaatttgacaccggtaggttgctccagttgtatgttttgcgaatcatgggtagtggaaaattgaaatgttcattggttcttttaaaataaaaaaaaaaaaaaaaaagcggcc

SEQ ID NO: 110193 - DNA, 476 bp, Zea mays
  Clone ID: MRT4577_31991C.1
atacctgcaaggtctctctaccacatctctaccaccgaatctgcgatgaaagccgagcgatacgattgctactggccccatgtgccgatgccaatgacgatgccggaaacccactagcagcattcgcgtttacgaagcaggtggccaggaaggcggcgctcctctctgacgccgggaccggggcagtgaactataggcccacatcttgctcctcgcgatctgctcgatgcgcgacgatctccaagtaactcaacagcacctacttgctggtcctcgacttggcgtaccagcacctggagcgtgagatcgcccacgacttcaagacccatcttatgttccagagctacaacgtagcggcactgaaggaggagatggacgcctacctcatcgatgtcttcgaggacaccaacctctgcgacattcacgtcgagggtgtctacatcatgctcagaggacattcatgtcgaccgccgcat

SEQ ID NO: 110194 - DNA, 516 bp, Zea mays
  Clone ID: MRT4577_31992C.1
agcaggcgtgacggcggagaggaaggctcgaagatcggtccgggaaccgactagcgacaccagacgatgccgacatgggagacccccatgggagcgaggtgattcccaggctggagtacgccatggaaggccgacaagaagggctcagcctgcgtctgttccggcccagaacccacaccgacctcgtcgccggcaacagagcccgtgtccgagctctcctcctagcagcggactgttgttccccgttgctgaccaccccgtagtagtggtcgccggcctcagcgccgacggccggggtctctcgcgcttcctccgtgtcgagtgcatgagccactccttcttctatgaggtaccgctgccccgatctgcaggttcgggctcaagctggccaccaaggagcacctttgcgcacagcggatatggaagaggccctatggtgttggactcctaactgctgggaatgtcctcagccaaggggtcagctgtacctactactgccccagtgggaactacttt

SEQ ID NO: 110195 - DNA, 139 bp, Zea mays
  unsure (1)..(139): unsure at all n locations
  Clone ID: MRT4577_31993C.1
cacatcacaaggttggcgatgcgaccaatgcggacttcctggagtccgcgtgtccacacgcctcgataactccaatgaatccacccgccgtgcatactacaaatgcgtnccatgcaatcgctctctaggcctttggccc

SEQ ID NO: 110196 - DNA, 194 bp, Zea mays
  Clone ID: MRT4577_31994C.1
gccggcgaagccgtcctgaaggctcatggcgtcctcaggtagcggatcgaacagctcgtacttggccccaagaagatgccacgtcgacggtgccggtaggactagatccccggcgcctggtggcaaacccagcgagtcgtagcagcgctggtccatgccgaacgccccaataagcgcatccgcacacgacgact

SEQ ID NO: 110197 - DNA, 157 bp, Zea mays
  unsure (1)..(157): unsure at all n locations
  Clone ID: MRT4577_31995C.1
gcgggggctggggcgctntcggnctctcgcctgtgtttngccttggccggngtttaccgcccgntttgggctgcnttcccnnncnnncccgtctcgtctgccggcgtcctcgtggtggcgcnngggtccgggccggtcggggtctctcnnccctccc

SEQ ID NO: 110198 - DNA, 582 bp, Zea mays
  Clone ID: MRT4577_31996C.1
cggacgcgtgggtaaaacgttaaaagtgcaggcccaagtttcagaagttaaaaatatcatgttaaacaacatagaaaagactttggaccgcggagaaaagttgagtgaactccaagacaagacttctgatctacatagtcaggcccaggagttcaagaaacagggggtgaagattcgtcggaagacatggctgcagaacgtgaaaattaagctggtgattcttggaatccttttgctccttgtgatcatagtctgggtatctgtttgtcaaggctttgactgcaccaagcatgaaacatagtagtaataagaatggtgcagcacgactgtggcagagctgcgatggatgtgagtttgtgctggtgaggtcaagtgtgtacccacatatgctttggctctcaagttcgattccaccagacaagtatcacggtacaaatgtaagtccgagctggtctttgttgcacgccggaggtaggtgtacttgcaatgcaagactagcatgatataaagtgatagcatggttccttctgtactagctgaattcgctagaatctagcataaaatgcatttcaattaccacta

SEQ ID NO: 110199 - DNA, 427 bp, Zea mays
  unsure (1)..(427): unsure at all n locations
  Clone ID: MRT4577_31997C.1
gcgnccaccagccncgncgnnaggacgnaagggaagacagccgggggncagccagngaggggggacngagnagcccgaagcccaaagcaagcgggngccaacngccaaggggggnganggcgccgncncgacgcaaggcggcncccgnccccgncccccngcnccnccgcgncgccacagagcnggggacgaccaaggnggcggaggcgaggcacngccngncgcagagccaccggnncaagggccngngcangagcagcaacaacngcgccaacgngngccagaccgagaacccccccggcggcgagggcaaggcggagggcgccacgcgcaagngcnncngcaagaagaaangcnagnagnagccaaggctttgcttgcnggcacaagcaggncgncggcacgcaacgcaanncaagcatatcgg

SEQ ID NO: 110200 - DNA, 535 bp, Zea mays
  unsure (1)..(535): unsure at all n locations
  Clone ID: MRT4577_31998C.1
tttttnntttttttgtttgttgtttgttgtttttgntttttttgtgttttttgtgtttttgttttttgtttatattttgtttttttgtttttntttttttttttttttttttttttttttttttttaaaatttggcccccgggggaccacaaaaggaggtggggcccccgggccaaaaggggtccagatttccccccccaccccaagaggggaaaaaaaaggggggtgccctttaacaacacaaggcctaaaggaattggtttggggaaaaaaagctggaaacggggctgcccccaagggggggaccccattggccactcctggggcccctaacctggggggaacgggtcaaccggggcccacaaaaatgtttttgatagggaaaaaaatgaactttacaaaaaagccggcgaatcccatgaccacaaaacccatcgcagtacccgcggggaacttggggaaccccttgcggcccggtttggggcaccccttgacgaggggggtgctgtccttgggaaactcccggggcgggggg

SEQ ID NO: 110201 - DNA, 394 bp, Zea mays
  Clone ID: MRT4577_31999C.1
tattccacacaccaatgacatgcagacggcgaaccgatctttatcctgattcctgacacacaagcacggccacggaaccctcgcgcatgcatgctgcctgctgacgcttaccttcgtttcgttttcatggctgatggtgctggttgcaagtgcatatgtgcaggctgcagcgggcacagtcctccagtcctcgggtgaggcgatcgtcgccggcgccatgggagggggagtccaccaccaccacccgtgcgtggctgctgatggagatggagccggggccgggcccgggccggccagcgtggaggccgcgttgaggcctcttgtcggcgtcgacgcctgggactactgcgtttactggaggctgtcttctgatcagaggttcttggagatggct

SEQ ID NO: 110202 - DNA, 394 bp, Zea mays
  Clone ID: MRT4577_3199C.1
caggaccggttcttaattcctgtgtttacccacgcgactggaaccctaccaaacctagctaccaacggggtcgttgtaatcacgctcgaccgcacaactgcaccgaggggggaggagacctaaaaactactacatcttttagctacacatctagctaaagatcgagaggggtaaataaggacgagcgggcgcgagctagaagagcagctgcaggtactaccatcatcgccgtgaccatggaccccaagcgcgggcccgacgtcgtggtcgacgagtcgtgctggagcgacctcgagttctgcgagaaaaccaggaactggtactgctacggcaaggcggtggcggagcatgcggcgtgggaagcggcccggcggcggggcgtgacctggtggtg

SEQ ID NO: 110203 - DNA, 1225 bp, Zea mays
  Clone ID: MRT4577_319C.1
ggccgggccgggatattggcctcgagccgacccatttccacgcgctcgccgcctgcgtctcggttcctctcctccaccgcacctccaagaatccacctccacgactgagttgacggctcggcggtgccatggcagttcaccggctccaaccttccccctccggcctacagtgctccatcgcccggtcgccagtgctcctccatgggccacggctgacgggtgcacgcaccggcaggagaggtggatttggtggacctagattcgatgtgcagagagcgacttggaggtggctgacatcttcaagcactgcaacatgcagttacaactactgttggccatacagggaaatgctgggcctattataccaattgttcaaagcatggaccttgtgtagttacatgtttttatcatagatagattaatttctgaaatgcccatagattggtatatttgtggaaatttgtggtataaaatttttctgttgatgtttgcaggttatttttccagcacttgacattcgagtgaaaaatgtcgcagggacatattctcttgaacataaaggagaaaatgatctcttcacacatcagacaaggcttctactctttcagaagaaagtcattttcaggagaatcttgaacaaaatgaccagatgtttaggtctggttggaaggacatttttcgaatgaatcagagtgagctcgaggctgagattcgaaaaggtctctcgagattctactcttgatccaaggaggaaggcctatctgatccaaatctcatgaccagccgttggatagctgctcagcagaaatccccccaaccaagcgtcgaaggacataatggatgtacccgacgacctggatgtgttccttcgtaccgagacccagggaaacaaatatttggctgtgagcattacaaaagaaactgcaagcttgttgctgcatgctgcaataagctattcacttgcagattctgtcatgataaagttagtgaccatacaatggacaagtattttcactacaaccattcattttatcgtccacacctttcctgctgagggatgctttcaaggatttcattttaacatcgaaccaatatcaattaagcatggcattttatttggaaataaaagtttgtggtggtgccatggacctgtgcgtcccttgtgaaatgaattgattttctgtcattgaattttctaactgaagctttttcattcgtttgattc

SEQ ID NO: 110204 - DNA, 750 bp, Zea mays
  unsure (1)..(750): unsure at all n locations
  Clone ID: MRT4577_31C.1
ctcgaggccggccgggccgggccgtctctctctctcctccgagtcccttctcccaccgccgcaagcgctcgcccgagccacctccctctctccctgtggcctgaccgtgatttgggcgtggcatcctaaggcggtcaagattcgagaggctggaggaaccaagcgtagggcctccgccaccacgtcgtcgtccgcgcgcgccgcccgccggcgcaaggaggcgccacagcctccgacgcctagggagatgggggccgattactacaaggtcctcggcgtcgaccgcggcgccggcgacgacgacctcaagaaggcctaccggaagctcgccatgcgatggcaccccgacaagaacaccaccaacaagaaggaggcagaaaccaagttcaaggatatctctgttgcatatgaggttgcccgcccctccctttcactctccatgtcttgccaggattattactgttcgattcgccggtttcgatccattcgctgcccctgcccctgtggtttatgatgacgaacaaaatcctcggggcgactccctgtctgttgtacgggccatctctttggaagtaaggtagtgaattcgatactgccaactggaccacgcccaccaatactgcaaaggatttaactttcttttctcagatgactctcttttgatccatattttagcttatcgatttgagtttccgattagctgctcagncgaattatacatttcactctatgattcgcttttttaatgct

SEQ ID NO: 110205 - DNA, 690 bp, Zea mays
  Clone ID: MRT4577_32000C.1
catattatattccataaagtagcgtttcctgcactttccagtcagcgcggaagcaaaacgatagaggcgtatccactatggcggcaacctactgcgcctaccccgccgcctccgccgccgccgccgcaaaccctaccagacgccgcctgcaaaccctaaccgcgccgggcgccctacctgctgctcggaaacccagccgccaacccccctccttcctctctttccggcgccccaatgcagcgctgccgccgctccgcgtcgctggcgctgacccgcaggttgtaaatggcgaagatttccctcctatgaatgacctaattcgactatacaagaaagcctttctagatggaaacgaagatgttgttagtgacatcgagaaggcaatcactagcatggaggaagagagaagtaaagcagcttctcagtttgaaagtatcacagctgaaatagcttcagggaagaataagtttcttcgcttaaatgctgatctagagaatttccggaagcagactgaaaaggaccgtgcaaagtttacatcgaatatacaagtggaacttgtacagagtctgttgcctctggttgacagctttgagaaaacaaatgtagaggtcaccctagagactgagaaagagcagaagattagcgcaagctatcaaggcatatacaagcaattagtagaaacactgaaaa

SEQ ID NO: 110206 - DNA, 587 bp, Zea mays
  Clone ID: MRT4577_32001C.1
cacacatccccgtcccctcccgcccacgcgtccgcggacgcccgggcgctcggtcactcctcattcctcagtcctcactaacaatccgcaccaggactcatcagggccgcgcgcgcgcgccggcagcgatgcggtgggacgcagccgaggccgaggcggccctcgagcggatctgggacctccacgaccgcctcagcgatgccatcctcgccgtctcccgcgcgcacctcctcctgcccgctcccccgccccctcccgtgccgtccgcgccctccgccaaaggggcccaccgcatcggcgtcggtaggaacgggtgcgtcttcgtcaagggcggcgccgccggcggcggaggtgaggcgctggccgccgccgcggaggccctggccgaggccaggagcctgcacgccattcgctccgcgctcgaggacgtcgaggaccacctcgagtttttacacactgttcaatcacaacagcgggctgagcgagatgctgcaattgctagactggagcaaagccgtctagtccttgctatgagggtagcagaacatcgaggaaagaagtataaagtaatcgatgaggccttggca

SEQ ID NO: 110207 - DNA, 343 bp, Zea mays
  Clone ID: MRT4577_32002C.1
gttacacatcacttagtacgatccaagcggtctagatcacgtgtcagcgtcgacgtaccgggaaggtaaggctctgagactgatgctgtggcatacatacgttcacgagcggctgatgagctagatctaaagacatcttataaactctgccgtcgttgtcattgactatcgaagcgcaaggccgcagtcctagagctatacatagctaaggctgatgaagttctcacttcatggagcactgatatgatcattgtactcgtggagcacctagctgaccttgttgacgtgcagcatgcatggatatacgaaggagaccgcaaggctgaagaccttgaaggcatgt

SEQ ID NO: 110208 - DNA, 251 bp, Zea mays
  Clone ID: MRT4577_32003C.1
gcgcatcctattgccctcgcgcgaccgtggacgccgccgtcgctgcagtgagccaccgacctgtcttcgtttgacgtagacaccaattaccgaggtggaccgtatgcacaggcacgggatgggtatctatttatcggcgctgtcgtacaagaggacttctcctatctggctgaagacagctaccaccgaggtggaggagatgattaccaacgcgtgtaatacggccagatgccatctagattcgtgtttgc

SEQ ID NO: 110209 - DNA, 862 bp, Zea mays
  unsure (1)..(862): unsure at all n locations
  Clone ID: MRT4577_32004C.1
aattccgccttgatagctactctactccagtggcaagtaccaaccagaagcgcaatggccgccacgccggaggagttcctggggcagcagggtttccttgcgcgcctcgagccgccctccccgtccctcttcctcgacctgccgccgacgccccgcgacgacgacggccactcctccttcgacgacatggtgctcccctacatctcgcgcctgctcatggaggagggcacggaagaccacctcttctacctctaccccaaccaccccgccgtccttcgcgcgcagcagcccttcgcgcagatcctcgtcgacgtcgccgacagcgccagcgccagcggctccacctcctcgccctcgccctcctcctcttccgacgccactgcctccaccacccccagcaccgcaactgcatcggcatcggcatcgcccgacgacgcaccagtccagatctcacggccgccctacaccgacgtcaacggccatgcctccgcctccccggacaatcacagctcggggctcctcaacggcgacgagatggccaaaaggccgagctctgacttcttcagtcacttgttgcccggcgaccaggacatgctcaacctggccttccgcaaaggcatggaggaggctagcaagttcttgccgcccgacatcagcctgccgccaatcaacgaggngacagtggtgggaggcgggaatgctgtcagcctcaagaaaaagagggccgcactgccactgggagcccggatgtgggcaggcccagcaaattgatgatgccggagcaggaggaacgcaagatgtttgacgaaatgatgttccaggaacacgagatatgcatgaaggggactcacaacctgatcgc

SEQ ID NO: 110210 - DNA, 291 bp, Zea mays
  Clone ID: MRT4577_32005C.1
tccgagggatcactcttcgtactctgacatgtttgaagaggcgatcgttgccctaaagcagatgatttcttcaagctgcgggggcatcatcaagtacgtcgatggcaaccatgacacgtagctacccaccaaattacttaagcacctcactgcgcaccttaagaagctagatgacgccctcaaactgactaaggtgaagaactccttaaagctgccggtcaccgacgccaatcccaaagccgacaagtccaaggcacccaaggtcgcgcccaatcccaatccctcttcgaa

SEQ ID NO: 110211 - DNA, 275 bp, Zea mays
  Clone ID: MRT4577_32006C.1
acggacactatcaagaccttgactgcacgcgcacgtcaacttaaaattcggatccagctaaactctcactacctgtagaagacgccccgggggcgacctaggggatgggttcggtcccccctcatgcgcccattcacaagcttctagaccttcctaggaggaggtgaggtactcgccgtcacagctatggcctcaattaatgttcatcgtattatgactgatcccaacaacctaatcttgcggatcctacagagcaaagcgcagcatccagatct

SEQ ID NO: 110212 - DNA, 463 bp, Zea mays
  Clone ID: MRT4577_32007C.1
aaaattaaaccaaaaaaacacaaaaaaaacaaaaaaacacaaaaaaagcacaaaagccaaaaccagggcaaaaagccaaaaaaaaaaaaaaaagccaaacccgaacggagccgcgggcccaccccggacacccgggccgaccccggaaagcgggaccggcccccgcagggggaccaacataacaaaaagggagaaaaaaaagaacaggggggaaccaggggaaaaagggatccccgggcaaaatcgcaaaccagatcaaaactcaaaaaaaaaaagaaaaccgaagcaaaaaaaaaaaaagcgggaaagcccaaaaaaggagcgaacccaaaagaaccgggttgagccaacaaacccgtttcccgacgggaaaaaaggaaaaccccccccctcaaagaaaggggcaacccccagggagaggccgggtgggttttctccccccaggggggacaggcaacaacca

SEQ ID NO: 110213 - DNA, 269 bp, Zea mays
  Clone ID: MRT4577_32008C.1
aaaaaaaaaaaaattttttttttcacacaaaataggggggggggggaaaacaaaaacggtttatttggaaacaaactggcagggggacaggagcaaaaaaacaaaaaccttagggggcgtttacattaccccaaagggttgcaaaagcataacaaacttgaaactccgggagagttgtaaaaccggggaatttaagggaggggggggggacatatttggggggcctttacttaactcacactatttttaaatcgagagggggtcttttc

SEQ ID NO: 110214 - DNA, 286 bp, Zea mays
  Clone ID: MRT4577_32009C.1
ttttacactttcggggagagggagaatgtgagggagcatgtgccgattcgtgggccctatagagggagctccggagggagcgacatggacagcgacctggacattggaacggctgtctgcactaccgtatttccgaccgaatccaggtacgagaccacagactggtacacagaccgggagtgcctgcaggagcggcaggctcaccctcacatcggagctgacataaaagctgatggcaaacaccatgactagctccacaagggtgtaaacaaggctccaggcattg

SEQ ID NO: 110215 - DNA, 1714 bp, Zea mays
  unsure (1)..(1714): unsure at all n locations
  Clone ID: MRT4577_3200C.1
cgcgccactccaacgcccacccttctcattggggccctcgaggccggccgggaggatgaatcggaagagagaatcctaccaaacctagctaccaactcgatcgtcgtcatcacgctcgaccgcacaactgcaccgaggggggaggagacctaaaaactactacatcttttatagctacacatctagctaaagatcgagaggggtaaataaggacacaagcgagcgctagccagaagagcagctgcaggtactattatcatcgtcgtcgtcgtcgccaggatgaccgtcgtcgacgccgtcgtctcctccaccgatgccggcgcccctgccgccgccgccgcaccggtaccggcggggaacgggcagaccgtgtgcgtcaccggcgcggccgggtacatcgcctcgtggttggtgaagctgctgctcgagaagggatacactgtgaagggcaccgtgaggaacccagatgacccgaagaacgcgcacctcagggcgctggacggcgccgccgagcggctgatcctctgcaaggccgatctgctggactacgacgccatctgccgcgccgtgcagggctgccagggcgtcttccacaccgcctcccccgtcaccgacgacccggagcaaatggtggagccggcggtgcgcggcaccgagtacgtgatcaacgcggcggcggaggccggcacggtgcggcgggtggtgttcacgtcgtccatcggcgccgtgaccatggaccccaagcgcgggcccgacgtcgtggtcgacgagtcgtgctggagcgacctcgagttctgcgagaaaaccaggaactggtactgctacggcaaggcggtggcggagcaggcggcgtgggagacggcccggcggcggggcgtggacctggtggtggtgaaccccgtgctggtggtgggccccctgctgcaggcgacggtgaacgccagcatcgcgcacatcctcaagtacctggacggctcggcccgcaccttcgccaacgccgtgcaggcgtacgtggacgtgcgcgacgtggccgacgcgcacctccgcgtcttcgagagcccccgcgcgtccggccgccacctctgcgccgagcgcgtcctccaccgcgaggacgtcgtccgcatcctcgccaagctcttccccgagtaccccgtcccagccaggtgctccgacgaggtgaatccgcggaagcagccgtacaagttctccaaccagaagctccgggacctggggctgcagttccggccggtcagccagtcgctttacgacacggtgaagaacctccaggagaagggacacctgccggtgctcggagagcggacgacgacggaggccgccgacaaggatgcccccgcggccgagatgcagcagggagggatcgccatccgtgcctgagagggcgatgccacacatgaacacaaagcaatgttcatactgctgccctgcacctgcacctgcttcttcccctgctgtgtaaacaggcctgtgtttgttctggctgatagtgatgtaccctaagacttgtaacgtcatgttcgttcttgtgaactatagcgagtgaataaaactggttaatgttggatgttcaaaaaaaaaaaaaaaaaaaaaaaaaaaaaaaaaaaaaaaaaaaaaaaaaaaaaaaaaaaaaaaaaaaaaaaacgaaaaaaaaaaaaaaaaaaaaaaaaaaaannncctttgggttgttaccactgtt

SEQ ID NO: 110216 - DNA, 719 bp, Zea mays
  Clone ID: MRT4577_32010C.1
tgttatacagatttgtactcatacaggctcataagaggcagatggatataagctccaaatgctggtaggtttgtgatgttatttcagccggtggatcactcatgtaagctttggattttgctgcgaagaacaggtagggaggttttgttctgtgttaggtttattagatttcgtgtacattagacgacatatcaaccaccaatcatagaacgttccatatccgtttctgcttctgggcactcagcttattttggtgaaagagccaatttttttatcaaggttgcagccccatcacttgtgccctaactcatcgtccccagcaacacgatatgacgtgtgttgaagtggtgatctataagtagaaaaggagctgaattgagtgaattgttgcttcatctgcccccgtgatgcctctcgaattgggactgggagctcgtgacttacagcacttgccacgaatgggaaaccctctgctccaaaggaagcagttcaagcatatcgacgtgcttgcagggtcatcgctaaaaataatgtctcgaccacatgctaagattggaggttgttgtccgattctatatgttacaaaatattacatatgtgatcaatccaaggggtgtaacagttttctcaaagggacacactccttgggatacgctccttcacttgtatataagtgtaatgatctctggaatacaatcagtggctgtcacattctctcc

SEQ ID NO: 110217 - DNA, 531 bp, Zea mays
  Clone ID: MRT4577_32011C.1
ctgagccgtctttcgcaggtaagggggaacgggttgcctacaggcgaaagaacacgccgccgatgacgagcgagcctctgcggccccatagccgcgcagatggatccacaatcggacaccctgaacacgcaagtcagagccgtacgactgcgagtgcctgaaggaatgcgatgtgcacaccatctactaaccacacagagcggggaacccgcagggaacatgacaggggaagcattctccacatgaaggtctccataagtcactgcacatgcatcacgagataacacggaggtatctgttggacccgcgagaatctacaagaatctgggctgtattgaccaaaggggtgcaggcagaagcactcactatgctgatggacagcataacactacttgggactgaatatccgacatcgaaaaactaaaagaacatcctggcatccataaaaggcagaggatgggcggctcatggagcaatcaccttgggacttgactacaggcaccatcaccatgcaaaggaaactgaaacttg

SEQ ID NO: 110218 - DNA, 460 bp, Zea mays
  Clone ID: MRT4577_32012C.1
ctttcgttcctttttatccgtcgtttaccgttcgcgctttcttggcgttcggaaaggtccgcccccccagggcctaggggacggagacatacgccttccaggcggagatcaaccagctgctctcgctgatatgaacaccttctacaagaaccttaagctgggcatccacgaggactccacaaacagaaccaagattgctgatctcctgaggtaccactcgaccaagaccggggatgacctgaccaacctcatggattatgtgaccaggatgaaggagggccagaactactcttgtaatgactggggagagcaataaggctgcggaaaactccccgttccttgagaagctgaacatgaggggctttaaagcgctgttcatggtggatgccattgacgagttttctattggacagttgagagatttgaaggcaagatgctcggctcttgcaccaaggagggc

SEQ ID NO: 110219 - DNA, 123 bp, Zea mays
  Clone ID: MRT4577_32013C.1
ccttacttctccttgacacgggcaagcatgtaagccaaggtattagattgctcttcctaacctaatcatgcagcgtggagttgaacagggaggacgttagctcataaagtacatttgttgctt

SEQ ID NO: 110220 - DNA, 669 bp, Zea mays
  Clone ID: MRT4577_32014C.1
ggactttttttttttttttccccggggggtttttttttttttttttttttgattaaatgacattctatgatttccatgttgcaaacatcttgaattgcaagccaagtggatcatagctgaagtaagcagcactattcaaccaactgatggtatcaatgtattacgacaaagaaaaggaacgcatgtgttcatctgccctgattattagcggcactcctagtgcctccccgtagttctttggacgaatagctggaggcggcagcgctaccgccgtcgccgtcgccgctgctggagctggaaaccatgtgcacgctcgccatgtacgtgaacggattgacgggccgcgcaatctcctcctctccttccagcatcctgacgacgctgctcatggacggcctcgcctccggctggtactgcacgcaccagagcgccaccttgcacatccgctccgccttctccccgtccttggcgtggatccccgacgctgccatgacgtcgccgaacttcccctggtcgaacctctgccacacccacctggggtaccactcctggctcacggtcacggcggggtgctgcagctccaggttgcgccgcctcccgaggatctcgaacaccagcatgccgaagctgtacacgtcgcacctgtgcgtgacgggcagcggcagccac

SEQ ID NO: 110221 - DNA, 305 bp, Zea mays
  Clone ID: MRT4577_32015C.1
aacacccggggtttaagacctaaattttccaaattcatatagtttttttttgcatccataaggggggggcttaaaaaaaaaatttaatcctggggggaggggttttttgacaaacaagtaggccggggcaaataagagcaaccccccgctttttggggggatttacccatcactgtgcgtggctacgaccccattttgcttacatgctttagtttggggcacccgggggctgaaaaacattgacgttgtcgtaaaaaacctggagcgtccccggttggatgaaatccgggatcccacccttccgg

SEQ ID NO: 110222 - DNA, 372 bp, Zea mays
  Clone ID: MRT4577_32016C.1
cagaattgcccaggcgacccacgcagacgcccaagcgtgcgacactcatgcgctgacgcgtgggcttaggataggcgcaccatgcactgggatctacaacggactcctcttacaggtaatggttgtaggcaccatctcctgcccgagttgtcttgtccataacggctctagagcaaaccctagtactcctgctatttcatcccctcgagaaggtgcttcatataccgcacctgctactgttagtactacacgatgggggagctcagcttactacccctgtgcgtcatactcatcagctggaggatccctctagaggtcctatagttcctcgagcgctctgtaaagggagtaaagcccttataactggtacac

SEQ ID NO: 110223 - DNA, 1514 bp, Zea mays
  Clone ID: MRT4577_32017C.1
acctttttctagaacgcttgtttgtctttgtcactttctgcaaccttggttctgatgttgcttgtcattcatttctcagcgtcgggcttgtaacttgtgtttcgtttgcttggtccatttattttggttgtctgtagggaagagacgacgacatggatgtagattccattctttgtgtgagcactaccgccatatagttgacaacgatgaccgacactgtagattccattctttgtgtgtacaccaaggtatcggtgtctacgttgatctggcgatgcgcttttcacggttactgcgaccgtgatgggcatctaggtgctcaaaccattagttggactgaggaacacggagcagcagcaacaatatcgtaaggagagtgcagaagttggacaaatggtatgccatatcttcagttctcttatgatgcttcagcgctacatcttcagttttctcggctaaaaagagatcatagtcaatagtatacctatgtgtgaaagcgctatgctatttgcttgtttgctgggagaaagaaaagatagatgaaggtaattatacaatttctaatacattgttcagcttttgttatttctgcgacgccaaagagaaggaaccagtcactaagtcggcctctgtacggtccatgaacacacatcaacggagcgtgatgtccgctccggttcagacttcacctccttgaatgtttccgacatgagcgccgagtcgataaggaggacacagtaccccagcttcactgaccgcccatctaacctgagggtgttctcctttgctgaattgaagagtgccacccgcaacttccgccggtctctcatggttggctagggtggctttggctgtgtgtacaggggtgtcatcaagacctccgacgatctgaacgaacgaatcgagatcgctgttaagcagttgaatcgtaaaggacttcagggtccaattttgtggaaggaatgcttttgctccccttgccttttcggttagaaatcttggtatttaaatcacccctttttggtttgtggttgtgccctctccccacatgagggaagagacgacgacatggatgtagattccattctttgtgtgagcactaccgccatatagttgacaacgatgaccgacactgtagattccatactttgtgtgtacaccaaggtctctcggcctacgttgatctggcgatgcgcttttcacggttactgcgaccgtgatgggcatctaggtgctcaaaccattagttgggatgaggaacacggagcagcaacaacaatatcataaggagagtgcagacgttggacaaatggtatgccatatcttcagttctcttatgatgcttcagcgctgcatcttcagttttctcggctaaaaagagatcatagtcaatagtatacctatgtgtgaaagcaccatgacttatcagttttgtgaacaaccctaacttatgtggtcctggcaccacaaaaccttgtcctaatgctcctcccttttctccacctcctccatac

SEQ ID NO: 110224 - DNA, 2178 bp, Zea mays
  Clone ID: MRT4577_32018C.1
tgggagtgtgccaacacgatccatagtgtctggaaatgcgccagtcaatcaagccttgggatcttcaaaagtcagtgctggcatggaaagccagtcacaacaattgagtgcgcctaagcctttagctgcaacaagcttaagtcagactcaatctcatggcattcaagaagagcctaaaattcaggggaagaaacaactattattcgagagtttgcctgcaaccgatctaaaggttagagcgagcggcatgtgatgcgggtatgtacatcgttgttccaaaattcatgtgtttgatgccggattgcctgtagctagctgttcatagtagggattagctctgaaaaaattgggggaaagcaaagtacactggtgacctcaagttcaatcgaatcaatatggcacatcggggcatggagctgcgtgagcactgccgccatatagttgacaacgatgaccgacactatagattccattctctgtgtgtacaccaaggtgctcgaaccattagttgggctaaggaacacggagcagcagcaacaatatcgtaaggagagtgcagacgttggacaaatggtatgccatatcttcagttctcttatgatgcttcagcgctgcatcttcagttttctcggctaaaaagagatcatagtcaatagtatacctatgtgtgaaatactgtcaaacttgcatggtatatggacctcagaaagtataggaaagcgctatgctatttgcatgtttgctgggagaaagaaaagatagatgaaggtaattatacagtttctaatacattgttcagcttttgttatttctgccatatgatacacactggtcatgaggacatgtcgattgtagttcactggtattgttttttttgaaaggaagcggcaaaagacttgcctcttcattgtattagattaggaaaaataagataatccacaggaccgaaacacacaccggaagagaaaaaacaaaatcaaaatacaaaaaaagttcactggtattgtaagctttgcagataagagcacaacttttccccctcttttctaaaagggaagctcatgttcatttcagcaattcagcttcaaccatttggcattcatgtaatatttcataggagttaaagtgcacatacctaatcaagtctgtgggtctccaattctgaaatagaaagataatttatgttctcatctttctgaaatgaacaagatgactggcttatgggttaaggtttttttatagagcaccatgacttatcaggtaaagttatagttgtgcacaaaatgtcattttttaatccttaatgtgtgtgctattcacacctgtcttcttttgcagttttgtgaacaaccctaacttatgtggtcctggcaccacaaaaccttgtcctgatgctcctcccttttctccacctcctccatacaaccctacaaccccgatgcaatcaccaggtgatttattcagattgtccaataaaatccttgagttcaataggacctttccttccttactctttcatctaaatgacatcctaattgggaaaatgtatacctccaaaacaagcataatgctatcaaggctggagagcggtaaggaataactgcatgttttcttgaaaattaagttgaaaataatttgtaatcaggagctagagtgttacatggtactatgattctgtgctgctattagtctgtggctcagcggtatgtgtgttgtactgctgttaatttgctatactggaatacaataggaagctactaacctatacctcgtgggattcaggaatgcagaccaagtcaataactaccttgtccttttggttttccctaccctacattagtatgggagtgattaagggtatggaacatatggctttgtcgttgacatcttttattttgtgcaggaagtagctcttccactactggagcaattgttggtggagtggctgctggcgcagccttgctatttgctgttcctgctatcagttttgcctattggcggcacaggaaaccacaagagcaagcatttttttcaatgtatctggcttcaaagttagtctttgattattatctttctcgcaacataagggcaaacaacgtttatatgtagcaaacaaatacggtttgcaaacgttttaggaacatgtttttacaataaagatatacttatagtttcacc

SEQ ID NO: 110225 - DNA, 620 bp, Zea mays
  Clone ID: MRT4577_32019C.1
tagctttcttcaaatcattggttcctctttggtgccgacagatcccatacaccatgatgaagttcgcatgcttcgaaaaaacagttgaacttctgtataagcatgtggtgcccaaaccacgttctgaatgcaccaaaggagaacagttggtggtaacgttcgccgccggatacattgccggtgtcttctgcgccatcgtctctcaccctgcggacaccgttgtatccaaactcaaccaagaaaaaggctcttctgccctagacgtcgccaaaaaggttggctttgccggtctctggaagggattgggtcctcgtatcatcatgatcggtacattaaccgccgcccagtggttcatctacgatttcgtcaaagtcgtcctcggcatccctagacctcctccattagaaatgcctgagtctctcaaggccaaacttaaggaaaactgatccgaatacaaaccccaaaaacttagaacacgatattaactagtttcaaattctgtaaaaaaatactccctgtaaattatttattgttttagcccgattgcattcctttcttcttatgcttaattttaatcaaatttcgttaaatatcatgtatctagacataccaacacgacg

SEQ ID NO: 110226 - DNA, 280 bp, Zea mays
  Clone ID: MRT4577_3201C.1
gaagccaaactttagctgaactggctctcccacgtcggcgaggacggccgcgtccttgtcgggaagatggcaatggggggcgcgtccgaaggcacgctgctccgcgcgctcgccggacttgctccggcggagatggctcacagctgccacgacgagctggcggctcagctagccagcaacttctcggggctcgcctgcgcccccgtctggaacaacttcgtgctccggtacgcccaggacaaggacaacttgctgcgggaggagctgtcgaccatgtaca

SEQ ID NO: 110227 - DNA, 704 bp, Zea mays
  Clone ID: MRT4577_32020C.1
cgggtctctgtgtgtacaccaaggtatcggtgtctcgtctcggaccacgccctttcccttcccttccttctccgcacacgcagaaccggctgattctctttcttttgctttcctcctctcggcctacgttgatctggcgatgcgcctttcatggttactgcgaccgtgatgggcatctaggtgctcgaaccattagttgggctaaggaacacggagcagcagcaacaatatcgtaaggagagtgcagacgttggacaaatggtatgccatatcttcagttctcttatgatgcttcagcgctgcatcttcagttttctcggctaaaaagagatcatagtcaatagtatacctatgtgtgaaatactgtcaaacttgcatggtatatggacctcagaaagtataggaaagcgctatgttatttgcatgtttgctgggagaaagaaaagatagatgaagttttgtgaacaaccctaacttatgtggtcctggcaccacaaaaccttgtcctgatgctcctcccttttctccacctcctccatacaaccctacaaccccgatgcaatcaccaggaagtagctcttccactactggagcaattgttgggggagtgggctggctggcgcagccttgctatttgctggtcctgctatcagttttgcctattggcgggacaggaaaccacaagagcaagcaattttttcaat

SEQ ID NO: 110228 - DNA, 1041 bp, Zea mays
  Clone ID: MRT4577_32021C.1
gggtttgcttggtccatttattttggttgtctgtagggaagagacgacgacatggatgtagattccattctttgtgtgagcactaccgccatatagttgacaacgatgaccgacactgtagattccattctttgtgtgtacaccaaggtatcggtgtctacgttgatctggcgatgcgcttttcacggttactgcgaccgtgatgggcatctaggtgctcaaaccattagttggactgaggaacacggagcagcagcaacaatatcgtaaggagagtgcagaagttggacaaatggtatgccatatcttcagttctcttatgatgcttcagcgctacatcttcagttttctcggctaaaaagagatcatagtcaatagtatacctatgtgtgaaagcgctatgctatttgcttgtttgctgggagaaagaaaagatagatgaaggagttaaagtgcacatacctaatcaagtttgtgggtttccaattttgaaatagaaagataatttatgttctcatctttttgaaatgaacaagatgactggcttttgggttaaggttttttatagagccccatgacttatcagttttgtgaacaaccctaacttatgtggtcctggcaccacaaaaccttgtcctgatgctcctcccttttctccacctcctccatacaaccctacaaccccgatgcaatcaccaggaagtagttcttccactactggagcaattgctggtggagtggttgctggcgcagccttgctatttgctgttcctgctatcagttttgcctattggcggcacaggaaaccacaagagcattttttcaatgtatatggcttcaaagttagtctttgattattatctttcttgcaacataagggcaaacaacgtttatatgtagcaaacaaatacagtttgcaaacgttttaggaacatgtttttacaataaagatatacttatagtttcccccaaaaaggggggggggggggggggggggggggggggggggggggggggggggggaactcgaggaggggggcc

SEQ ID NO: 110229 - DNA, 163 bp, Zea mays
  Clone ID: MRT4577_32022C.1
cgccttttcccccaccgcgcggcccgcgcgctccgatcccgcgcataaacaacatcccggcctgcgcgccgacccatcagcacaccaacaccaccaggacgccgagccgcagacaaaccatctcagagaccgagccccgatcgccgccggaaccggcacccgc

SEQ ID NO: 110230 - DNA, 1566 bp, Zea mays
  Clone ID: MRT4577_32023C.1
ttctttttgctaaatgttctttagcaatttgattagtcaaagaggttgcttgtttttttgtgggaacgagattcgggactcaggagctcacttgctcccactatgacattgtatatgtaccagacacttgcatatactaattgttttcttttaaatgcactttacttaattatactgacatatgtcattggagctgtgatgcctcatccatccctaaagatgtatagaattcatcgcttggatcaataagtgttgtttaacaggcagaaatgggtgcttaggatcttaccactgtttatttaaaatttagatagataaagagcactgaagattgttagttaattaggaccgacgctttgaatcattagaccaaggaatatgaatgcgcaaattcaaacgtactacaccttttttgtgctttctttttaggacaggagtaattgtccatcgtaacgggggtagaaagtgcagaacgctcattgttctctttttcgttgtctaaaacgttgagtttctgatctgtataagactacaagttgctcagagggccttttctggaaccatttccctcgaactgattttaattgtttccttcttttccttatccacaataccaaactatgttacataaaaactaaatgatacgctgactgctcagaataaaaaaagtggtgctacgatcctccgtctgacttatgatcgcttctcttttcttcagccacttttcttttttgttgtctagaaaacaaaaatatattgttagtgaccagattgtaatagaaaatattgtctgctttattttctcgtcattagataaattatatacccttaaattgcttttgccattgattctagcatatgtcattaactaatgtttttaccacctttttctagaacgcttgtttgtctttgtcactttctgcaaccttggttctgatgttgcttgtcattcatttctcagcgtcgggcttgtaacttgtgtttcgtttgcttggtccatttattttggttgtctgtagggaagagacgacgacatggatgtagattccattctttgtgtgagcactaccgccatatagttgacaacgatgaccgacactgtagattccattctttgtgtgtacaccaaggtatcggtgtctacgttgatctggcgatgcgcttttcatggttactgcgaccgtgatgggcatctaggtgcgcgaaccattagttgggctaaggaacacggaacagcagcaacaatatcgtaaggagagtgcagacgttggacaaatggaagtagctcttccactactggagcaattgttggtggagtggctgctggcgcagccttgctatttgctgttcctgctatcagttttgcctattggcggcataggaaaccacaagagcattttttcaatgtatctggcttcaaagttagtctttgattattatctttctcgcaacataagggcaaacaacgtttatatgtagcaaacaagtacggtttgcaaatgttttaggaacatgtttttacaataaagatatacttatagtttccccaaataaaataattagtaa

SEQ ID NO: 110231 - DNA, 302 bp, Zea mays
  Clone ID: MRT4577_32024C.1
gctaggaaactatattttgcaagggatctctattttgcctaggagggatgggctgggctttccaaactagcccataaagcatttcccatcctgtgtatcgggccgaaaaaaaaaaaaataaaaaaaaaaaaaaaaaaaaaaaaaaaaaacatatacaaaaataaaaaaatccaccaattaataaaatgaaaaaaaaataaaacttgattattaaataaaggttggggcccctcttttgaagatcaagaatttccaccccttatgtcataaatataaacttttgtgtggggggccctaaaata

SEQ ID NO: 110232 - DNA, 851 bp, Zea mays
  Clone ID: MRT4577_32025C.1
aatatttcataggagttaaagtgcacatacctaatcaagtctgtgggtctccaattctgagatagaaagataatttatgttctcatctttctgaaatgaacaagatgactggcttatgggttaaggtttttttatagagcaccatgacttatcagttttgtgaacaaccctaacttatgtggtcctggcaccacaaaaccttgtcctgatgctcctcccttttctccacctcctccatacaaccctacaaccccgatgcaatcaccaggaagtagctcttccactactggagcaattgttggtggaggagaaccacctttctttccgtttcagacaagctcccagctttgaccgccgccgctgtgtgtgtgtgctccctgactccctgtcgcgtcccagatcggagctcccctccgtgcacgggacaccgccggtccgggcgtctccactcccccccggatcgatcagctccgcctccgcaagataggcaagcaatgaggtgcctgcctttcttgcatggagacgccaaagagaaggatccagtcactaagtcggcctctgtacggtccatgagcacaacatcaacggagcgcgatgtccgctccggttcagacttcgcctccttgaatgtttccgacatgagcgccgagtcgataaggaggacgcagtaccccagcttcactgaccgcccgtctaacctgagggtgttctcctttgctgaattgaagagtgccacccgcaacttcagccggtctctcatggttggcgagggtggctttggctgtgtgtacaggggtgtcatcaagacctccgacgaaccgaacgaaccaattgacatcgctgctaaccag

SEQ ID NO: 110233 - DNA, 274 bp, Zea mays
  Clone ID: MRT4577_32026C.1
actaggggttaacagtttaatcggtggaagttacataaaattaaacttggggttcaaattattcatacattccgaactgggcgctgttcaacagccttgccgtagtaatacttgcagatcgatgttcaacagctagccttgcagttaaatttatttaaaggcattggtcgacatttggtgcttaatttgcactgaccaacttaaagaggcaggtagcttgcttgcttgacggaggttttgttttacggccttaaaaaagcccggtggggaccgc

SEQ ID NO: 110234 - DNA, 548 bp, Zea mays
  Clone ID: MRT4577_32027C.1
agcgaagccacaccacctagagagagagagtagggaagagtgacagtagctgattgatgttccaactcatctatcccgggggataggaaggtggtcactcatctgtccacaactagctgccctgcccccatagctggctggggccccgaggcgatcgcaactgagctgctcgacctgctgacgccggtcctgctgtgccatctgcacctgcaccgacgaataaaaggacttgcgaaccatgcacaccaaagggcttgccatccttgcacacctcctactctacttacagctaattaacatgttcctaatcctcattggggttcacatgtaccccgtgttacttagatatgtagtactccacaccctgttagcttctatctctcatcatttgcctcttgcttcctccgcatgtactactatggtactactactgctagtctacttctactactctgactctttgtgtggcggatactcggcagtatgtcgacattgatcatggcactcgtactagtgacctatgttcgccatgaataaaaaaaacaaaa

SEQ ID NO: 110235 - DNA, 559 bp, Zea mays
  Clone ID: MRT4577_32028C.1
aaaaaaaaaaaaaaaaaaaaaaaaaaaagggaaaggggaaaaaaaaaaaaaaaaaaaaaaaaaaaaaggaaaaaaaaaaaaaaaaaaaaaaaaaaggggcggccggaaaaaaagaaacacaactaacgaacgcgggcatgcaacgaaaaaactgttaaaaaggggaacaaaaacaaaataaggtcgccggggaaaaaaaacgtcgggacgggaaaaacccgggcgaaaccaaactaaacggccgggaaaaaaaaccccttttccccagggggggaaaaaggaaagagccccgaaccgacgccctaaccaaaaaggggccaatccaaaagggcaaagggaacgccccaggtagcggcgcaaaaaggccggggggtgggggggaaaccccaagcggaaccgaaacattggcaagcgcccaacggccggttcaaatcgggggctccccttcatggctcccaacgagcgccggattcccccgaaaagctaaaaaaggggggccccctgaaggggcccaaataagggcttaacggcaccagaccccaaaaaaacttaagaaggg

SEQ ID NO: 110236 - DNA, 707 bp, Zea mays
  unsure (1)..(707): unsure at all n locations
  Clone ID: MRT4577_32029C.1
acaccccacccctcttcttctttggctggcccgcccctctccctctcctctctcttcccctcctcttcccctcttccgccccacccccgcgtctccggcgagggctcaggccgcggccccgccgacccgcgcaccttccttgcgagagcgcctcctccacgggaacagcggcctcgcgggagctcccttctcccctccccaaggtctgcggcgccggattggcctcatcagctcgaagatctcgaacttgtttccaagcaaggaaggaaccctcgtcgcaaatctcgatctgtggattggtgggcagaaagactcgccttttatggggcagccccgtgagaaacccgtgccatgattggggcgtcaggggaggagaggcagtggtaggaggaggtgcagcaggaggcaggagaaaaagagcaggcaaggataggcaggaccaaggacaaggagaggagggagctctccatgggaggagagcccctcctcacctccctctccatggagaacagcaacagccatccctgcaccctcctctccatggacccggcggggtcgcacccggcctcagccgagtcatccggcggtggcggcgccgtcaacggggttggcgccagtgctgacaggnaactcttcatcattccgcggcacgagtctgtgcgtcaaggcccgccggacatcaacgtcccgctggcagcagacccctc

SEQ ID NO: 110237 - DNA, 191 bp, Zea mays
  Clone ID: MRT4577_3202C.1
ataaggtaaggggcgacgaaaatggctccaacgaccgacaccaacgacgacagtggctacggcggctagcgcctacgcaagctgcacgcgatcgacgacactaaacttgaggtgaaaggtctggtggactccggagttaaatccatactgttcatcttacaacacccaccggaagccctgagcgaaataat

SEQ ID NO: 110238 - DNA, 450 bp, Zea mays
  Clone ID: MRT4577_32030C.1
ggaccacgggcaaaattttggggccccccatccccaaaaaaacagggtatgaccgcccaaaactggggagggggaccaaaaaccccccggctcgattcaaccttttccttccgggccaggaaagggcacaaaacaaacaaccccccaggggagtctcaaaccacccacaaaaacttgaaactttacaggctaaaaaaagcggggcccagggcacccgggttaaaccccaacccaaaggggcaacaacttccacggaacaaacggggacccttgttcacccgggcccaacgggggggggggggctttccccctcccacccccaaacaaactccgggacccccgggcggacgtcaacggcccaaaatttgtaaaagaccaccgcgcccccggggtggggcacaaactcaaccacgggcacgtccacggccaccttgagcaccttgggggggg

SEQ ID NO: 110239 - DNA, 201 bp, Zea mays
  Clone ID: MRT4577_32031C.1
gaaaccggcaagcccgggcggtccgtcgtccggatccgcggcgtcaccgacgacgccgccgccgccttcgtccgcctcctctactcccggcaggtgtcgcgaggatcagtatgacgaccttgaggagcacgccgtgcacgtgccggtgcctggcgcacgcgtatcaagtgccctggctgaaacgggcgttcgagggcgcca

SEQ ID NO: 110240 - DNA, 631 bp, Zea mays
  unsure (1)..(631): unsure at all n locations
  Clone ID: MRT4577_32032C.1
aattcggcacgaggctttgttgtgcactaatatttcatcgaagcatgtggatttggcagcagtggaactcctagagattgccactccaagaaaagagctgcaggtggtcaacgagagtgaaacccttgtctccctcgaggaggaggagaacggaactgttgctcaccctgcatcggggcctcatccaccttgttgcctatcaacttcggtggacttgtcatgaatggacccagcaaacaatgccacaaattctcaagcgatgttacacaattcatctggtcaggaatttcccactcaaccaccgttatggcctaggggcttcattcaccagcatcctatggattgtagcatgatgggaaacattaattttcctaatccatcacatggtccaacaacaatgtgggctcccattcagacatgcaatacaagttccgaatcaaccatgcttctagcctcacaatctactgtatattggaaccattacatgaaactttgtcaggaatcctctaggttcagttcaaggaaatccttttgcagatttgnttcccaggttcaaatactagtacaccattgcagggttcaaataccgtaccttccttaacttgtgaccttggagatccgatgctgaaca

SEQ ID NO: 110241 - DNA, 628 bp, Zea mays
  Clone ID: MRT4577_32033C.1
attgggtacctcgaggccggccgggagcccggtggccctagggcaggcacagcggcagtgttgatgcgccaccgatccttgtcctgtactgtgtagtgggtagcctccatgggtagcggcaacggcaaggtgtacgccacggtggtgctcatcaggctcatctacgcggggatgcacatcctcaccaaggcggccttcaacgaaggcacgagcaccaccgtcttcgtcttctaccggcacgccgtcgcggccgtcttcctgctgcctttcgccttccttgagatcaggaagcgaccggcgccacctctgaacttgaggctctgcatgaagatctttgctcacggcttctacgggatggctggaacgatcaacctgtactgcattggcctgaaatatgcttcggccacctcttcgtcggctatcttcaacatcgtgccggtggtcgccttcctcttggccgtcatgttcaggatggagaccctgaagctcaggagcgtccatggcatagccaaagcctgcgggatactcctctgcgtcgccggcgtcatcgtggctggcgctgtaccagggcccccagctcaagtcgccgaaccaccagcagctgctgaagcagcacgcgggcgcggcc

SEQ ID NO: 110242 - DNA, 220 bp, Zea mays
  Clone ID: MRT4577_32034C.1
ccgacacatgtgacaagcctcatgttatccgtgcatgaccaattagcttagcttcactgcggcatgggatgcatttccatacatcagaattctcactctccacagtaacaaggcgcacgagcagcaacaccagctgccaggaacaaaagacacatcacccatggccgttcgtccagtgtgcgtgcattgcgggacgcggagcaacccgtgccggggcaag

SEQ ID NO: 110243 - DNA, 420 bp, Zea mays
  Clone ID: MRT4577_32035C.1
cgccgggccacccagcgcgccggagcgccggaaccgctcgccgccgttctggacctggacgccgtccttctggcacttcgggtcgtagcgccgcacggtcacgcccgccgtgcggtgaggcgtgtgtgcgcgcgcgcgcgctcgccggccggctaccgtacgcgccagcgtacgcggtagatgatgatgactaggcagtgtctgtgtgggcctctggggcttatatactgtcactgtcagtttaatttggctaggaaatgggtgctggtgtgacattgtgtgctatgcatgtgtgtgactgtgctgtctgtgcacggtgcacctttactgcgcgttgtgcagagagagagagagaagaaaacgcacataaaaaaatcaactcaaaaacagctctaattccccaaaaaaaaaaaaaaaaaa

SEQ ID NO: 110244 - DNA, 293 bp, Zea mays
  Clone ID: MRT4577_32036C.1
attggacgacctttctagagaactaaaacagattattacacaataatgcttgttgctgaccaggcgagttattcgcttccctacaatccaagagcaaggggtggtttgcccaaaacactgtgcctattatctcattaattgggccaacaacacaacgtttacggtgaaggttgccgaaaatcagctccgacacttccccgggtcttttttttaaccccggtgtagttccaggccactgggaagctacacccagggctgcttggggagcccccacccattgccaggaacctggg

SEQ ID NO: 110245 - DNA, 117 bp, Zea mays
  Clone ID: MRT4577_32037C.1
ctcttgtagaggaaatcacatacagaccggatgtgatggtcgtacatgtcaccaaggtaaactgtcacctccttctgccagatatcgtgacgtgcgtgcagagcagcaggctgtgaa

SEQ ID NO: 110246 - DNA, 476 bp, Zea mays
  Clone ID: MRT4577_32038C.1
gccggccggtccgggttggcagaagatgaaagaaacataacctcatcttctctccttttgctcggaacgcacacaccgcccggtctccgatctccgatccccgatcccctcgtcgatccaagatgcagatcttcgtcaagactctcactggaaagactatcaccctcgaggtggagtcctctgacaccattgacaacgtcaaggccaagatccaggacaaggaaggcattcccccggaccagcagcggctcatcttcgctggcaagcagctcgaggacgggcgcacacttgccgactacaacatccagaaggagagcaccctccaccttggtctccgttttttgttttgcccgccccccctcgccaagattctcactggaaagactatcaccctcgagggggagaaatactgaaccatccacaacgtcaagggcaagatccaggacaaaggaggggatcccctccgggaccaacag

SEQ ID NO: 110247 - DNA, 111 bp, Zea mays
  unsure (1)..(111): unsure at all n locations
  Clone ID: MRT4577_32039C.1
ctccttgtcaactgaaaatgaccaanagcatctcttcagaacattcaaaggaatgaataccacaacctcttcaatttcattcaatggaaagaacatttaaaataatgaacc

SEQ ID NO: 110248 - DNA, 140 bp, Zea mays
  Clone ID: MRT4577_3203C.1
aacaaaaaaaatgggccatgggcacagggtattagtttattgtctaaaaaacaaggttggtattaaaactcctaacgcttaaaagaggaatctatggtttaaaaaacatttgtggcctcctttattagggatatgaaaaa

SEQ ID NO: 110249 - DNA, 804 bp, Zea mays
  unsure (1)..(804): unsure at all n locations
  Clone ID: MRT4577_32040C.1
aacctcatcttctctccttttgctcggaacgcacacaccgcccagtctccgatctccgatccccgatcccctcttctgatctcaagatcgcagatctatcgacaagactctcactgcgaaagactatcaccctccaggtggagtcctctgacaccattgacaacgtcaatgccaatatccaggacacaggaaagcattcccccgcaccaatagcggctcatcttccctgataagcagttcgaggacgggcgcacacttgccgactacaacatccagaaagagagcaccctccaccttgttctccgcctctggggaggcatgcagatcttccataagaccctcactggaaagactatcaccctccacgtggaatcttctgacaccatcgacaacgttaaggccaagatccaagacaaggagggcatccctccggaccagcagcggctcatttttgctggcaagcagctcgaggacgggcgcacgctggacgactacaacattcacaaggagagcaccctccacttggtgatgcgtctcatgcgcggcatgcacatcttcatgaagactctgactggcaagactatcacccttgaggccaagtcttctgataccattgacaatgtcaaggccaacatccacgacaatgagggcatccctccggaccatcagagtctcgttcttgccggtaagcagctataggacggtcgcactcttgccgactacaacattcataatgagagcacccatcacttgacgctgcgtctcangagtggcatgcagatcatcgtgaagacacttactggt

SEQ ID NO: 110250 - DNA, 317 bp, Zea mays
  Clone ID: MRT4577_32041C.1
tcttcctaaaaaaaaaaaaaaaaaaaaaataaaaaaaaaaaaaaaaaaaaaaaaaaaaaaagggaaaggaatataaaaaaatccaaacaaaacaaacacatactttcaacttcaattactcttctataatatcacctaaattcaattctctgtccttcattttacaacatcttttcttttaaaacccttcctttacccaacttaatcccctttcaacacatccccctttcaccagctttctttattcccaatattccctcacctatctccctttccaacattttctcatccttaatctctatttcaactctcccttt

SEQ ID NO: 110251 - DNA, 297 bp, Zea mays
  Clone ID: MRT4577_32042C.1
aacaccaaaacgctaaaacgtggttttaacctctaattagcgttttgacgtttaaacgtggttttaataacactgactctgggtctgccctttcttttaatagttttgtgacttaggtaaatgtgtttgttcttcaacaagtcattccatacaggggaatttttgtcgcttttcttaagttgagtaatgtcaccattcttcaaatatttcttgtttatttcctgccaaatgacagttccatttttccaccttccaccatcatttgcataacatgctgatattcaatcttctcagatc

SEQ ID NO: 110252 - DNA, 732 bp, Zea mays
  Clone ID: MRT4577_32043C.1
gaggacccatgatccattagaactgcatatgttaagtttatgcagctgtgcatgaccaactgtagttggagagataatatgtttgttcagttgacataatatggcctatgaagctgagcatacaaggagatcactggacgagtctgacccatcgctttctacagtgggagtggcattatccaccaaaacagatttatagacagtggactgagaaagtaacaaacgagttttggtactaggcttcatgcctagatttagcatgtctctgatcaatgcaacagcagagtcgatgcgctttgacttaattaggagcactgctactgtgttgaatgatatactgtccatttttgcatccgcacattccatttctgttaacaactgcttgacagcatggagatccctggtcctacaaagcccacaaagcatcacattgtatgtacaagtgttgggtgctaatcctgaatttttcatctggtcgaacaacctgaaagcctcttccaccagatgcacacggaaaagaccatgtaaaaccacagtgtagcacacagaatcaacagcataatttttccgtacagcctctcttaaaatccttaaggccgcaaggctctggccctgtctaacaagaccacggaggattgctgcatgaacatatgcattcaattcaggagcactggcaatgatattggtggtagacatcaattgcatggtttacccttcctaactggcacaaac

SEQ ID NO: 110253 - DNA, 564 bp, Zea mays
  Clone ID: MRT4577_32044C.1
cggctcgagggacgaggtgtgagtgtcttccttcgatccaggccgcagcgctcctctctcaaacggcccaagcccaacaaggctgagatctcagagtagagcccactcgtcgggcgcgcacgcccggccggggtgaagacgacgacagagcccaagtcgaagcgagcggttttgccggcggcggcggcgaccggaggatggggatgggaggccggggcgtggtgggagacaggtggtcgcaacgcattctctggatctgcgccctgggcagcgccgtgagcatctactttgtggcggtggagaggcaggcgcagaaccgcgcgcgggcggtagcggagggcctcaagggcctcgacggcgcaggggatgacgtgtgacagagctggacgctgccgttgcagaggggcctcctttgtttaggttattaaaatgagccactttttttttctgcttcacatgttcacagaacttcgtagcgttgcaataataatgtactaaacatctgtgcccggtctttgtagaaaggaatgttgatctaaaaaaaaaaaaaactaatttgcggcc

SEQ ID NO: 110254 - DNA, 450 bp, Zea mays
  Clone ID: MRT4577_32045C.1
gggcccccgcccgattcacaaaatcaattttctaacagggggatatcccccaggtagattacaaacccgatctaggggcaggttcataaaacccatttgctgggggcaacaagggccaaggggggggggaaaaaacaatatagccccccattatatttaaaaaaatttaggccggggcagaaaaaaaatgacgggttattcatttcacccctcccaggaaaaagctcagttccggggcccccccggggcctcccccgcccccgtttttatcggggccggtccccccccccttgggggggatcatgtaaaaggccccccaggccttggatcccacaacccccccaacgcgggcgccccacgtacgtgagctccccggggggccccccgggccccccccccccctttttgggggggggcgggagccccccggcgcccatggacacccccccc

SEQ ID NO: 110255 - DNA, 354 bp, Zea mays
  Clone ID: MRT4577_32046C.1
tttccagcatgccaataaaataatatctgtgggatattctaaccacaactgggatattccttaaatagccaactgatgtccttcaacttcctgccgctcatacttagaaatgactgttatggctacttccttactccacagttcgattgctaccaacaagacatataccattagcgtttccaaatacagaagcagcttgcatagaaagttcaactccccatgtaggaatttattctttaccttttctgggctgatatttccttcattaacctgctgaggtgccgtctgatttcatcacccatcttatccttcattctcattactttttcacttcctttactcctctttttccct

SEQ ID NO: 110256 - DNA, 742 bp, Zea mays
  Clone ID: MRT4577_32047C.1
gtaccgggcccctctctcgagttttttttttttttttttttttttttttttttttttttttttttttttttttttttttttttttttttggggctctcataggcggaagctttttttttttcaaagggcgggggactagagggaaacacagaaggggggctccgcccgaacaatcaaatttaaaaccttttttaagtctaaaccccctgaaggggggcgggaaaaaaccacccaggggtgggggggacaaacaagggaaaccctttcgaagcttcaactcatttgacctggtgctccggaagtttgaaagggaaaaaaaccaccttgaggctcttggggagggggcaacccctgatctctcccggagtttatccgagttaaaaaagttaaacctgccggtagttgattgacctgaaaaaatgcttttagtctttgaaccataaaaagttccccgggttgaatttggaccatcactagggcccctggggtcttcaagatcatcttccccttcggaaactaccggggggcttgcccacccgtaagcattggggccccccttgttttttcgagcaaactttaaaagccttttgaatcctttgggaaaatccttataaaaaactattggggggtgggttttcaacatttccccactcaataatttcgggttcattggtatcgggtggcagaatttgggacaacgaaagacccactcttgggcttgatgacggcaatggggcaattc

SEQ ID NO: 110257 - DNA, 292 bp, Zea mays
  Clone ID: MRT4577_32048C.1
gttctattgtttattttctacttttattgtgattttgttgtatgccttagtctacacaaacattaaggccaccaataaattaaaaactgcactctagcaaagactcacaagggaaagttataatggtagccagctattgcctgggaagaattggggaaaaagcaaaaaaaaggatacattcccgggttgcaaggccagggggggcatccgcttccaaattatgaaatcaccgactgtaaaagggtggaacccaacagggccacagggggccttggggaaaaagaagagcaac

SEQ ID NO: 110258 - DNA, 196 bp, Zea mays
  Clone ID: MRT4577_32049C.1
gcggttgttgtgttgcatggcagtcactatgaacgaggtggagccattgtacgagctgtacaagaagctaagttatcccatcgtcaaagacggactcatccacaaggtcgggatcgacccatcgatacattccctagtttattgcgccactgacaggttggagctgaagcagggttacaagctaaacacatcaaaa

SEQ ID NO: 110259 - DNA, 251 bp, Zea mays
  Clone ID: MRT4577_3204C.1
gtccgcgcgcgcgattatatctcaatcgttgcggggttcaagagatcctatgcgaattggccctgccgagacatagcgactattacactattggtgttataacacatacagtgggctgttggatgctttatttaatgaatccactgagccccacaaccacaagcaactgactcttatacatccatatatttagctttccatgctggggcatcagaggcatgtgacggggatgggcgagaatgatctgtaag

SEQ ID NO: 110260 - DNA, 701 bp, Zea mays
  unsure (1)..(701): unsure at all n locations
  Clone ID: MRT4577_32050C.1
gaggtcggccggggatcttcttgantctacttatttcaagtcgtccatagactctcaggtcgagcgaggtagatctctgccatgttgtgcagtgcagcggtgggatctatgcgcggcttcctcccccaccaacggcgctgcaatccaagccgaccccgacccatctctccatggaaggaagcgcgcggtccacttcgcgtcgaccccgacccggccaccacacggatccattctgctcgatgccgcaatccatggcgtgcgggcaacatgcgcggacgcacgggcttccttctacgcgcggcttcctccgccaccaacggcgccacaatccaagccgacgccatgccctcacccccctacccactggtaagcaaccgccctcggcccctcctcgctggtacgtacggtgggctccttgcgatgccatgccctcaccccctccccgcacccactgtaccccgcacatagtccttggcgctgctcacctcgcccctgacgcccgacgcccccgacgctgctcaccctgcccccgatgccttcgacaccctcgcatccttagcgatgctcaccccaccctcgacgcccgatttgggtgtgtgcgctaccctgacgcccgaatccttgctcccccgaccccctcggtggcggagaaggttcttggcgtcccttggcggtgagaggacgacgatgtnccccgtcct

SEQ ID NO: 110261 - DNA, 188 bp, Zea mays
  Clone ID: MRT4577_32051C.1
acgcgatctcccacgcgtccgcaataacaggtcagataaaggcatgaacacttgatggagcatttgtgggatctaacaggagggtctagtgtacagtaaggtctgtagatgcctgctggtccgagtatgacgactaatattgtgaagcgaccgtatgtctattgctctatctgtgtgtactgatatga

SEQ ID NO: 110262 - DNA, 395 bp, Zea mays
  Clone ID: MRT4577_32052C.1
agtatcaaatcatatcatcgtggaccaattaatatatggttacagcagatgcaatcggatcaaccaacatgcaggtagacacacgtacgtacatgagcacaaagactgacgccaaacatgcagagagagatagcaggggggggggggggtgtttctctctgttttacacacaccacacaatacctatgtatggcagccagctcggcctggtttattattgttgaaccaccatcacatgcttgatagttaataatcatattcatggttcgtgattgatgtgattagtagttgcaggggtcgctcttgtagttgctaccgtagctttagctgtgggctgttctttttgatttcgaggtggtctttttaacttaggtgctgtcttgttgtccttgggt

SEQ ID NO: 110263 - DNA, 744 bp, Zea mays
  Clone ID: MRT4577_32053C.1
agccgtggagcatagcaatccacatatctcccttggctgagtggttcccttgcggcgcccaggatccttcccagacgcgctcggctccatggtctgtaaccttgccggcgttcccctccacctagcatgcccatcaggccctctcttcgcctccctgccatggagctcgccccatgcccaatgccggccaacctcacttcccatggccgtcccttcctcctccctccctatggtcaacggcctcaccttccatggcttccaagatctgctaaacatccatcccagcgcgcacccctacttccgtgtactggtggccgacgcccctccctagagctcgcccttgctcatccactcgtcctcgtcttcgttgcgggcatcaacgcccttcgcctcctaccggtgagcagctcgccgccggtcgttacgactccatcccgcttgatcacgtttgtctcgctgctccttccagagagaaattggaggaatctggcgaagaagaaaagaaccctgtctgtcgcgtccaagccgcgtcgagccccttcgtctcgccctttccctgcatcttcactatccatggtcgcttctctcctttccctgattaatactaggcgcagcagcagcaacatgccagatctctgtagcttaggaaatttagatgagaagaaagctttagcgaggcgcttgccaagtgcttggtgaatcgcctcaaccggatgtggttgtcgatctcgcagagtcgagtcg

SEQ ID NO: 110264 - DNA, 346 bp, Zea mays
  Clone ID: MRT4577_32054C.1
acgggccaagccaagttagataaacacgtgcggggggccaaattttttacattggggggggcctttacatcactttacaacaacccattttgaccaacttggtcggttggtggggcctgcctcaattgggccccccgcaacacaattttgagcagcacttgaagcatcccaggcccccgaggggggggcaggcctgccccatgacaatgggccactggtcgttcattttgctgcaccccttgatgaaacacatgcagaaacagcagtcccccatgcgggtggaaaaaccaggggccttttccaacataaaaaactttttgggtggtttaatgtttccaaatcctgt

SEQ ID NO: 110265 - DNA, 377 bp, Zea mays
  Clone ID: MRT4577_32055C.1
cttctccacgccgctcagcctcctctctgtttcagccgtggagcatcagcaatccacatcatctcccttggccgagcggttcccttgcggcgcccaggatccttcccagacgcgctcggctccctggtctgtcaccttgccggcgttcccctccacctagcatgcccgtcaggccctctcttcgccaccctgccatggagctcgtcccatgcccaacgccggccaacctcacttcccatggtcgtcccttcctccttcctccctatggtcgacggcctcaccttccatggcttccaagatctgctcaacatccattctagcgcgcacccctgcttccgtttcctggtggccgacgccccctccctggaactcgcccc

SEQ ID NO: 110266 - DNA, 670 bp, Zea mays
  Clone ID: MRT4577_32056C.1
gcccctcctcgagttttttttttttttttttttttttttttttttttttttttttttttttttttttttttttttttttttttttttttttttcccccatgctgggcccggggttattttggtggttgggggggcaaaaaaacgaaaccgggttgatccatacttttttttcatgggggggaggtaaccggcaaaaaaaactttggaacaaggggccggaatgaaagtttgggtaacccccttatttttttttaaaacccttttaaaaatttatgggaggacggggggggcaaagcgcccagggtccttttgctttttggaaagcttgggcccaacatcaacccggggggcaggggcgtcctgggaatccctgccggttttaaaggggcccctttcgtcctggtcgatgaaaacccgggggggggccccaacaaaaccggttccagagggggggaacccccggcgggaaccctttccaaaaaggttttggatgccctggggcttggacccaaagccctaaacaggatccttggactcaaactcggggggtggaactacttaaaaaacataaaaccggttctccttgaccaacttgttaacatcaaaaaggggagacggcctgcttactagggtggccataagctccttaacagccccgggatcaacattt

SEQ ID NO: 110267 - DNA, 839 bp, Zea mays
  Clone ID: MRT4577_32057C.1
aagcattgtgaagcgtgttgcaaaccgcttcatctttgatcaggcggccaccacagattcggtccagctggaggcaatggtggtgatagagatggtggtcacggagccaacaactcatgggcggggggagcacgtcaagacaccgccctagcccaaacccgagacggattacttcgccgagaaaagaaatctgtggagctagagcttgaaaatatcgatgtcgtggggaggatgtttggagactggagcgtccatgcgctggggtcatcaaagtcgttggacaatacgtctaaggagtgttgtcttcccgttaatcttgcagcacatatatgcaagcagtcctacaatcattaaaaattaggagcagcgatatcatgggacgatgctctacgatcgggcatgagacgctttcagcacaagtactacaacctgttcacctgcaactggcacttgtttgtggcgagctgtctgaactggcttgcctacaatggctccctggagtggaatgtcttgaacgtggctgcccttgtccggattcatggctgatgggtggacagaatgagtactattctagcaaccgagcagatcatcagaaatccagaattatcaataattatctaacgtctgcatcccgaactagaatcaccacaccggtctgtcatgatcatgagaacctacaacaaagcagatctatgttttatacaaattttttactcccgtcgcaacgcacgggcactcacctagtaagcttatatgagtagaatagaccgcgacccattttatattaaattttggcatttgatgattaagataactatttaaagttacatttttttgtt

SEQ ID NO: 110268 - DNA, 594 bp, Zea mays
  unsure (1)..(594): unsure at all n locations
  Clone ID: MRT4577_32058C.1
ggggcgcggggacgagtanaccgtgtcgtcgtccatttgggttttgggcatcgatcgagtagtagcgatggcgctggaggccgtggtgttctcccagccccaggcggcggcgggccacttcggctacggccgcggggactcgacgacgtacgcggtgccgtggtgcgacctgctacagggaggcgtaggaggaggagggggagggtttggcgatctctgcgcggcgggcgagtgggacctcgacatcgacacctgggccgccgccgccgccgccgccgcgcccaccgtggagctggggggcgacgactgggactgggaggcgctctcccgggactaccagtcctcggacgcctccacggagtactaccacggcggcagcaggaaggcggcggcggcgcccgagcctgcggggaggaggaagcggaggcgcgccaaggccgtcaagaacaaggaggagatcgagagccagcgcatgacccacattgccgtcgagcgcaaccgccgccgccagatgaacgagtacctcgccgtgctccgctccctcatgccgccgtcctacgcgcacaggggtgaccaggcatccatcgtcggtgg

SEQ ID NO: 110269 - DNA, 393 bp, Zea mays
  Clone ID: MRT4577_32059C.1
tttcggcggccgccgacctttgttatatttgaagatggcttaagagcatctagacgacgaccatcaaggacgacacgatctgattacattgtaggggaacggagctagccaaatgttatgcacgggcccatcgcaggagctgctgaaacaaaatagaggcgactcggaaccaacgcacctgtacccaagcctgagacgcatgaaatgatcatcattcatgcttgctgacggtgcacatgaccgtaggtcaccgcgacattgctacacagacaagaccgactcatcacgctttggtgctgacggagcctacggccttgatggcgccagacgcatcgatgtgctgttcgtagaaggcatctatggcagcgcctactgggcggcccacctagaaga

SEQ ID NO: 110270 - DNA, 317 bp, Zea mays
  unsure (1)..(317): unsure at all n locations
  Clone ID: MRT4577_3205C.1
ccggccgggacccgtacttcctcgaagctctggctggtcatttgttgcttgtactttgtacccgtgatgcgcatttactgttgagatcccaggattcagactggtgccattcgatttgatttggcgcggggtactttcctatggccgcctccatcgcggcctcgcccttctttccagggtcgccggcgccggccgctcctaagaacggccttggagagcgcccagagagcctggacgnccgcggcgnngcggcgaagccgggagccccgncnaaggccgcgaggacggcccagacccacgcccccgccggcgcgccc

SEQ ID NO: 110271 - DNA, 163 bp, Zea mays
  Clone ID: MRT4577_32060C.1
cccagggatgaccccaagaaggctttgcattttactgccttccttgggtacaggcgctccatcacctatattgttcgtgaggttgataagccaggatccaaactccatatgaaggtaacttgtgaggcttgttaccataattgaaaccccttcttttagtcat

SEQ ID NO: 110272 - DNA, 1875 bp, Zea mays
  Clone ID: MRT4577_32061C.1
gggtgacgtcgatcgcgggcgagttctggttcggcttctcgtggctgctggaccagctgccgaagctgaacccgatcaaccgcgtgccggacctggcggcgctgcggcagcggttcgaccgcgcgggcggggggccggcggagggacgtcgctgctgccggggctggacgtgttcgtgacgacggcggacccgttcaaggagccgatcctgagcacggccaactccgtgctgtccatcctggccgccgactaccccgtggagcgcaacacgtgctacctctccgacgactcggggatgctgctcacctacgaggccatggcggaggccgccaagttcgccaccgtctgggtgcccttctgccgcaagcacggcatcgagccgcgcggccccgagagctacttcgacctcaagtcccacccttacatgggccgctcccaggaggacttcgtcaacgaccgccgccgcgtgcgcagggactacgacgagttcaaggcgcgcatcaacgggctggagaacgacatcaggcagcgctccgacgcgtacaacgccgccagggggctcaaggacggcgagcccagggccacgtggatggccgacggcacacagtgggagggcacctgggtcgagccgtccgagaaccaccgcaagggagaccatgccggcatcgtactggtgcttctgaaccacccgagccacagccgtcagctcggcccgccggcgagcgctgacaacccgctggacttgagcatggtggacgtgcggctcccgatgctggtgtacgtgtcccgcgagaagcggcccggtcacaaccaccagaagaaggccggcgccatgaacgcgctgacccggtgctccgcggtgctgtccaactcgcccttcatcctcaacctggactgcgaccactacatcaacaactcgcaggcgctgcgcgcgggcatctgcttcatgctcggccgcgacagcgacacggtggccttcgtgcagttcccgcagcgcttcgagggcgtggaccccacggacctgtacgccaaccacaaccgcatcttcttcgacggcacgctcagggcgctggacggcatgcagggccccatctacgtgggcacgggctgcctgttccgccgcatcacgctctacggcttcgacccgccgcggatcaacgtgggcgggccgtgcttcccggcgctgggcggcatgttcgccaaggccaagtacgagaagcccggactggagctcaccaccaaggccgccgtggccaagggcaagcacggcttcctgcccatgcctaagaagtcgtacggcaagtcggacgcgttcgcggacaccatcccgatggcgtcgcacccgtcgccgacgcgctgacccggtgctccgccgtgctctccaactcgcccttcatcctgaacctggactgcgaccactacatcaacaactcgcaggcgctgcgcgcgggcatctgcttcatgctcgggcgggacagcgacacggtggcgttcgtccagttcccgcagcgcttcgagggcgtggaccccacggacctgtacgccaaccacaaccgcatcttcttcgacggcacgctccgggcgctggacggcatgcagggccccatctacgtcggcacgggctgcctgttccgccgcatcacgctctacggcttcgacccgccgcggatcaacgtgggcgggccgtgcttcccgtcgctgggcggcatgttcgccaagaccaagtacgagaagcctgggctggagctcaccaccaaggccgccgtggccaagggcaagcacggcttcctgcccatgcccaagaagtcgtacggcaagtcggacgcgttcgcggacaccatcccgatggcgtcgcacccgtcgccgttcgcggcc

SEQ ID NO: 110273 - DNA, 457 bp, Zea mays
  Clone ID: MRT4577_32062C.1
ggggcacaaacccacagggtcacattttgttccaaaaactctcatccaggcccagggcagttttcaaataacataaaacccctatcacataatcattgggagcaaaaacaaaagagatgaggaaaagggggtcccacaaccatcaaatgaccgggaaaagtctagtccatctcctgaaaaaaggcccccggggcggccccaccaaggggggttgcagcaacctcgtcggaagaaaacttgcccttaaccttgtgggggggccggccccgggccttgcgggcgaggaaagccttacgggccttggcgagcttaaacttggggaccaacactttggagggggggatgcccaccttcacgggggaaccgttcaccttttcgcgggtgatcccctcgacgtggataacccaacggggggggtacacctgcaccaccttcccctcacgggccttggaggggc

SEQ ID NO: 110274 - DNA, 2310 bp, Zea mays
  Clone ID: MRT4577_32063C.1
atggccagggtgcgctcaacagctagggttactcgcgacggggaggaagctgaagctgctgaaactgcaccaatctccgaagttatgaggcggttgggattggttgtgactgaaggcgcttctgatgaagaagcacccgctgctgaagtcgagcaggcagatattgaagagggtgatgctaatgaaggagagattgattataacatcattatgccatcgaagccaagtcatttggattttgggaaattgactgtgtccgaagctaatatgactatgatgacgaagctaggctacttcagagaagccgagaaggggttggttcactttggcggagaagagactatcccaaaaccagaaaatgatgaagttgtagtttttaagagctttttcaaagcagggttgagatttcctctacacggaatggttgtagaagtcttggaaaaattcgggatttaccttcatcagctgacccctaacgccattgttagactcagcgtatacatctgggctctccgaagtcaaggggtagagccgctcgccgaagcattctgccgagtacatgaacttcactatcagacgaaggctagagaagacggattgcatgagaacttcggctgctataattttgcttatcgaaaggatatgaagacaccggtggtcagctatcgtactaaatggctgaccggttggaaatctgaatggttttatgttaaaattgatgagaaaaaggagaagctagttcagagcccattgaagctaatcttcgggatgactaggcctcagtgcaacatgacgtcggggatccatgccaagatgttgtccttcggctcccgaacgaagcgaagattgaatcgggtaatggatgctctacattttgaatattctgattatgaacaattgaacaagggcaccgaagggcaaaaaagaaaaagagttgtcagtgttatgggcagacaggccgctagaatggtaaaagaagatgaagaaaacctgaagaagaggaaattgagccctgagttgacgacaattgcttcgaagaagagaaaagttgcggctctgaagcagaaggcgactgatatagaagaagaaactcctgcaacaccttttgctaccgacgtggcagaaattctaaaggtaatgactgaatccttgcctatcaagctaagtccactggcgccacatctgacgaagctttttcagaagaagaaggagccttcgatagtgaagaaggcagctgggcccaaaaaacgaagaattattactgtgatagaagctattgaagagacaccacgaccagcttcggctccaaaggcaccagctgttgagagcgctacagctaccgaagctgcacctactgaagttgcaactgccgaagctgaaccgaccgaagatgcaaatctagaaagcacactttctaatattgataagatacttcttgacatggccgtagaagaaggtgctatagctgccgaagaggccgcggctacagtgcctgagaaagagaaggaaatagccgaagatgcttcggaagaagaaaatttcaattttcaaaacttaattggacaagaattgtcgaaggctgagaaagaagaattgagagactatgccatatcctgtgggtatgaaccaggggcgctactctttggcggtgtagacgatgaaagcttaggctgtctccgagaccgaaccggagcgaaggttatcggtactctgtcgaagagtattggtttcccgaagctggagactgacatcagccgctaccgacgacagcatatcgtcggtaatttattctattctaatttcaaggttgcttctgcacagagcatgctattgagtaaagctttgagaatgcaacaagatcttgaagataaaaagcatgaagttataattgagggtttagaaaacaaaataaaagatcaagtggctgctcttgaaaagaaggatttcgaacttcagacagcagagggtttattggcagaagatgaagctaaaattgcaaagttgaatatggagcttctctcaaagtcagaaagcttcgaacaagaaaaacagaaatttgatgcaaaatttgaggctgagataaaaaaagtcttcaattcggttggggccggctatgaaaaatttagtccttcgattgaagacctgtcaggggccttcgaacatatcgagggtgaaattgatgctcttgatgaaattatagctggacacgacgatttctatgccctggtagcatctcggggtacagctgttgccttcctaaaatctggttgcacacatgggaagattgtcaatagaccaaattttagctga

SEQ ID NO: 110275 - DNA, 488 bp, Zea mays
  unsure (1)..(488): unsure at all n locations
  Clone ID: MRT4577_32064C.1
aggtcaaaataataataaaaaagtaacaaacaaacaaacaaacaaattggctcatcagtcgacggccgtcaccctgcatcccatgtgaaagctggaacacctgagctcatctcagaattcggaccagcgttgctgccgatcttgctttgcttcccatctccctccgtgactgcattgtcattttgtcgcgtgggcgcatgtgcaggcggcaatggctggctccccatccgggtttgctttgcccgctcagcctgagacgactagggattagctttttgtttgttcctgacaaacgctttactcgncttcttcctttttttctgtgcgcaaaacatactactattagcgatagcgttaagactttggagcggagagacagtcgtcgcttaacaaaagttttccccaaccttcctccgataatgggttcgattcagtagctgtatacacgcctagctttaacccgcgacacagctgatagaaaccttcgt

SEQ ID NO: 110276 - DNA, 740 bp, Zea mays
  Clone ID: MRT4577_32065C.1
atttcgcctctccttctccctcctgtgtctgaccagctttgctcgccttcgtgctgctgcgatttcgcagggacgggcctggttggcggcgggggacgagtggaggggcggtgcatccggcgatggcacggccgccgatcctctccgttgcactgccgtctgacacggggcgcgtgctcagcatccagtcccacaccgtccagggctacgttggcaacaaatctgctgtctttccgttgcaactccttggttttgatgtggatccgataaactctgtacagttttctaatcatacaggatatccaaaatttagaggacaggttctcaatggcaatcagctgtgggatcttattgaaggactcgaggaaaatgaattattgcactatacacatttgttaacaggttacatcggctctgtttcctttttaaatacagtgctacaagtcgtcgacaaattacgatcagtcaatcctgatcttatatacgtttgcgacccggttctaggtgatgaaggcaaactatatgttcctcaggatttagtatctgtttatcaggagaaggtcgtcccagttgcttcaatgcttacaccaaaccaatttgaagttgaactactcacaggattaagaattacttctgaacaagatggcttgaaagcttgcaataccctgcacagtgctggaccacggaaggtgataataaccagtgcacttattgaagacaagctgctcctcatcggaagt

SEQ ID NO: 110277 - DNA, 473 bp, Zea mays
  Clone ID: MRT4577_32066C.1
cgggcaacagaacctgagacctcaccaaggacgacaatgttggtttgtcgactgagacgcctgaatcgggcgccgaggcgcagcaaaacagaaataggctcgaacactacccagaggcgactagcacacacgatgccgtcgtctataacacctccataatcccgtggggggcatggatgaagcggatgcaccttactgaaaccgataagctaatctttctatcctccatggattggcaagtgcagggcctacttcgctggacagccatgacgggcataaatccttcttccaccaccatgtggcagacttgtttctgcgaagatagctacctgttctctaaacatctgcggcgagctggcggtcaggaagaaccaggacgaggagtcaatcaagaagcgtgatcgactatgactaccgtcctacgatacggcagcggcaaggtaactggcaagatgacccatccgaagggccaa

SEQ ID NO: 110278 - DNA, 453 bp, Zea mays
  Clone ID: MRT4577_32067C.1
atcgctagggcggggcttgttttttttttttttgattccacaaaatgatcaatagatactgggtccatattcactacaagtaaacaagaattgcaaatacgttccacacattcacacgagcggattacgacaatctgcgtctacattaagcgaataaaagctacagatttacatgactagcacatgtgtatggtgaagtcgggtgatttcatttttccaccacaccaccactgacccctatgtacagcgaacacagaacgatggcatacataacggcggtagcaacctaggtatccaactcgtggcaggacgtacactacatcctttctatatatgcgtgaaccaacataaggcttcaaggcttcatctcctatatcaacggagattagtgtgagtattccaaaatgctgtccaatctgttttatcatgaataacacacttggaacttaccta

SEQ ID NO: 110279 - DNA, 1172 bp, Zea mays
  Clone ID: MRT4577_32068C.1
cattgggtacctcgaggccggccgggctcccgcagagcagccgacaactctctaccgtccgagaccccaagcaccagcgcggcggcggcggcggcggcgaccatggctgtcgggaagaacaagaggatctccaagggaaagaagggtggcaagaaaaagaccgtcgaccctttctctaagaaggattggtatgacatcaaggcaccgtcggtgttcagtgtgcgcaacatcgggaagactctcgtatccaggacacagggtaccaggattgcttctgagggtctgaagcacagagtctttgaggtttgcctagctgatcttcagggcgacgaggatcaagcttacaggaaaatcaggctccgtgctgaagatgtgcagggcaggaatgtgctcacaaacttttggggtatgaattttaccactgataaattgaggtccctagtgaagaagtggcagacattaatcgaagcccatgttgatgtcaagacaaccgacaactacatgttgcgtttgttctgcatcggcttcaccaagaggcgcccaaaccaggtcaagagaacctgctatgctcaggcatcccagatccgtcagatccgccgtaagatggttgagattatgatcaaccaggcttctacatgtgacctgaaagaacttgtttcgaagttcattccagaagttattggtaaggagattgagaagtctacctccagcatcttcccacttcaaaacgtcttcatccgcaaggtgaagatactcaaggcccccaagttcgatcttgggaagctcatggaggttcacggcgactacaaagaggatgttggtgtgaagcttgagaggcctgtcgagggagatgaggctgggcaggaggttgctgctgccgagtagtttgtttgctagttctatatctaggcgagtctggacatgaggttgcttatgacgtgaacttatagagttgtcttggctatgtgttttcgtctagccctaagattttgtcttgaaacaagtttaaaattaagattatttgtaacaagtgtttaggattactcgtggtgatattctgtgttcgattactgctgtactaagttccatcatcctcatttttgtttggtcatcgataatttactttctcattcgtatgagatgttctctgcttgaaaaaaaaaaaaaaaaaa

SEQ ID NO: 110280 - DNA, 559 bp, Zea mays
  Clone ID: MRT4577_32069C.1
aaaacacccatacgcgttcacggccacggcgctcgcgtgcgcaccctggtgggatggctaggcttaaagcgggcgcgctataccctgctgctgctcaagacgtgggcgacttggatgcctgctgtgcgcgccagaccagcgtaccgacgctgccacggtgacgaaccccgggccactcgacatgaacctgaacgctgccgtgcgcgagctcagagcggcccaccccattaccattaccgggggcacgcatgcgaggcctccccgagcagtcggactcactagcgcggtcctcgcccgcaagcccggtcgcaccttcttcgacgctgctagcagcctggccaccaatgtgatggcaccgacaactgttcgatggcgccgaggctgctctgctaccccgtactagtggctttactgtgagcagactacgagcacacagcgctagatcagccgacacggatcgacagcgatcaggacgagtcaagttgacctacgcggtgatgtaaaacgcacagcatgctctataatggctagtaattactatatattgactcggcgtttg

SEQ ID NO: 110281 - DNA, 361 bp, Zea mays
  unsure (1)..(361): unsure at all n locations
  Clone ID: MRT4577_3206C.1
gcaaaacaagaagcagccagctaccggagcactagtaaacagtaagcagcagagagcatggcgagatcagggcgggaagcggagcccggagagcagctgcgccacgacggcctgctccacacgcagtgcggcacccccgcgtacgtcgcgcccgaggtgctcaggaagcgcggctacgacggcgcccgcgccgacctctggtcctgcggcgtcgtgctctacgtcctcctctgcggcttcctcccgttccagcacgacaactacgtcaagttgtaccagaagatcttcaaggccgactaccaggtgccgccctgggtctccggcgacgcgcgccgnctaatcgcgcgcctgctcgtcgtcg

SEQ ID NO: 110282 - DNA, 392 bp, Zea mays
  Clone ID: MRT4577_32070C.1
tcgggttttctcgccgccggcgccgtcgtttcctcgtttccggcgcatcgatgcctcgccagggactttcggatcaagaggaagctggcgaagaagatgcgccagaaccgacccatcccctactggatccgcatgcgcaccgacaacaccatcaggtacaacgcctagcgcaagcactggcgccggaccaagctcagcttctgagcgctcagatcggtcggctactgcatcagaattctaaggtctctacctttgctttggttctatcaaagtctcttgaggttatgaaagctagcgatactcctcagaaagcttttgttaagattttgattacactaagaagattgatgcttctatgccgtgctcaagattccatgctgcattgggatact

SEQ ID NO: 110283 - DNA, 256 bp, Zea mays
  Clone ID: MRT4577_32071C.1
gttgatttatcttgatctgtcaaatgaagtctcaattattgcacgagtccactctgaagttctgttctttcctataaaatgtccattgttgcaggtttgaccgtcgaggaggtctgattggatacatggcaacgccgggttgaactacccaagcttctttatcagtagcagagcatgctactcatgtacttttggaacctaagctattagacctgtcagtgttggatgtgtggatcttgcatttttgtggagaaat

SEQ ID NO: 110284 - DNA, 869 bp, Zea mays
  unsure (1)..(869): unsure at all n locations
  Clone ID: MRT4577_32072C.1
ggccggccggggtgcttgtccgtcaccaccacctgtaccacgaccacattgttttacggataatcatgtcttcggcagcagcgagagcagaagctagacggaaagctatccaagctcgaggcaatgaacgactcgcgaaactcacgacttcggcgcgaggtgaagaagctgctaccactttcgcgaatgacgatccgccattagcacctctgccagataaaggtcttcgcgagtttgttggagagcaaacacccattccgactcctccgagacgcgttccgtcgaatccccaagcggggttcggttccaatgcgccagatccctccgcgtggtcggaagagcagcagcgacaaattatggctgccctcatgggcggtgcaccatttggtgcccaaccaccacaaacccaaggtcgactaccgccaattgctggtgacgcgtctgctgaagacccttttgcggctcttatgtctgccatgggacccatgaatgcgggtggacaagctcctacattcgacttttcctctgcagcagccgctccgccaaaaccgaagacaatgctggagagatacatgccgctgatccacatcgttgctgcgtggatgcttcttgtgtacttcgtgatttggagagagcctgccgtttatagcgagaaggctttgtcgtctgtcaatggggagggcgcgaattggtggcagagatgggccgagctgggatggaaaagtccagcagatggatggggcgtgcaacttgttccgtttttctgggcatttaccactctcgcaattgtactgcattcgtggcggatattttcaggactggatcctgtgcaaccgncgatgcttctttccctagcngtaccgcatctg

SEQ ID NO: 110285 - DNA, 732 bp, Zea mays
  Clone ID: MRT4577_32073C.1
gaatcgattattttccgtgggcgctcgctcgctgttgttgctgctgccaactgaagggatgcgagccacggccaccgcaggaggccgtgcggtgttccacctccaacacctccgcccgcgcccgccatggcgagctcttcctcctgctgccaccacgcacctctcccgctccgcgccagcgaggcgagccgaccaccgttgcctccccaaaggtttcttatcaactctagaaccgaggatttcaggagtctctttgtgtcggcgtgctcatgcaacatgtagctattctttggatgacaagttacagggagagctagatgatacacagggagaacagagaaagctagaaacagttggtgcgtttcagaaaataccaatggtgatgcctgcaactgatatactaatgtcagcacaaaggaaatctagaaacgtgccaccaacaaagggtatagcaaatattgctaagcgtgaaaggaacaaaggtgcgaaacagcttgatgccttaatgaaagaactttctgtaccgctgagaacatacacagaaaacttcccaaagaggagagatttgcatccttatgagaggtctctcattgagttgacttttggcgagggttattatgagcaggctccaggacgtgtagatactctcaggaaaaggatcacttctgttggaaagcaacatgcttcagcctgtgctaagtcaacaactaaacgtgaagcagaggagcgcct

SEQ ID NO: 110286 - DNA, 587 bp, Zea mays
  unsure (1)..(587): unsure at all n locations
  Clone ID: MRT4577_32074C.1
cccggcttggtccagacgattattttccgtgggcgctcgctcgctgttgttgctgctgccaacctgaaggatgcgagccacggccaccgcaggaggccgtgcggtgttccacctccaacacctccgcccgcgcccgccatggcgagctcttcctcctgctgccaccacgcacctctcccgctccgcgccagcgaggcgagccgaccaccgttgcctccccaagggaaccaaaactctgctgcaaccacaagcattattattggggttttcattgtctcttcaattttgatacactgtttttaacattttccaccggggatgccttcaactcaggtttcttatcaactctagaaccgaggatttcaggagtctctttgtgtcggcgtgctcatgcaacatgtagctattctttggatgacaagttacagggagagctagatgatacacagggnagaacagagaaagctagaaaccagttggtgcgtttcagaaaaataccaatggtgatgcctgcaactgatatactaatgtcagcacaaaggnaaatctagnaaaccgtgccaccaacaaagggtatagcaaatatt

SEQ ID NO: 110287 - DNA, 641 bp, Zea mays
  Clone ID: MRT4577_32075C.1
cctcgaggccggccgggccgggatttattgattcatacatcacccagcccctcacggactcgcctaacctgtctgaataaatctagatgtcctacacccaacagcacgctgcgactgactgacatggaagaaggaacatcgaggaatagccatgccagagagtgcacgacttctcgcgcccaagactcatcccgaccgctactaccggtgccgatgatgcgaacggactacaactgcacccagtggtcactgcaccgcagggcgatcagcgagactgttctccacgctgctacgtgcctcgtacatcacccggagcacaatgatcggcgacgagcgccagaggacacacgtgctcgccacgcacccgacgatcaggaccaccgtgcccagcatcctcgaagatggctctggtccttcgttcgccatgatcttcatcctcgtctactgcacctgacgtgatctcaggtgaggcacatcgaatgcagccgagacctattcctatgatcgtgcacatatatgtgtgccccaaccatgcggctgctatatatgtcatgatatatgcgcgcgccagttatacgcgtgccaagctaaatagctgctgcgaatatatactactactactgcgtacatgcgcctgtatg

SEQ ID NO: 110288 - DNA, 183 bp, Zea mays
  Clone ID: MRT4577_32076C.1
atagggtgaagttggcctctggcttgggctttataggaagggtcagtgatggatactggatgggcttgctggggacgaacatgaaggagagggcgctcagtcatggagggtgccttagcgctgggtgagagatgaagatggttttatacctgtcccctcccccatccccgtgtgaattactgg

SEQ ID NO: 110289 - DNA, 562 bp, Zea mays
  unsure (1)..(562): unsure at all n locations
  Clone ID: MRT4577_32077C.1
atccctcgatcgctacccaagtccgaaccgaaaaagggggttccccatttactgcctagactccctcaacacccacccggtatataggttaatagcccttttccctcttggcaccaacagacattgaaatgtctgaggagacaccggtgccaaaaaaaaagaaatacttggaatttgaaaattctttttggcatgcatcataaggatactaaatcctattttctggtaaattttcataattttttgacacctctagctaggtcatttgacctgatacaacatcggattttcatggtctagttggggctccgtgggcatatttgatgcaaacttgacatcctaaactctttattgatgtattttaagagattcgatcacaaaacattgcatcatatccaatgattttcgaaagttattcggcaacatttttttttctcggacatacggccgcgctggtcgacgaatcctcggacccggtcgatgaaatctcggacctggtcgacgatttaacccctggtcgaccattccttcaacccgatagattttcatcngccattcatcg

SEQ ID NO: 110290 - DNA, 231 bp, Zea mays
  Clone ID: MRT4577_32078C.1
caccggccactccagcaaggcggcgggcggtccgagttctccgggctcacgagctccccgtcgctgcccatgcgccggaatgccacctccgacgacttgatgtccggcgtcttcttcaggacccacgcggccggacgaacggcggaccgcggcgggcgccgacggaggcgaagctgaaggtggccatcaatgggttcggccgcatcgggcgcaacttcctgcggtgctggc

SEQ ID NO: 110291 - DNA, 171 bp, Zea mays
  Clone ID: MRT4577_32079C.1
ggacgcacactgtagccgcgcattaatcgcggtggttggggaggttacacacagagagactcggtacacttgccaaaggcttagcgttcggtccttcagctttattggctttctttgtcggcactgttcgcgggctttctccgataagctctaaaactgaggctcccttta

SEQ ID NO: 110292 - DNA, 781 bp, Zea mays
  unsure (1)..(781): unsure at all n locations
  Clone ID: MRT4577_3207C.1
cgaggccggccggggcaaatttcgtgtgccgcactggccgagcccacattcgaaccaaagtccccccgggcccccacaaggaaaaccatgtgccgcgcccgccacgttcccacgcgctgcccgagcagctgcgccacgacggcctgctccacacgcagtgcggcacccccgcgtacgtcgcgcccgaggtgctcaggaagcgcggctacgacggcgcccgcgccgacctctggtcctgcggcgtcgtgctctacgtcctcctctgcggcttcctcccgttccagcacgacaactacgtcaagttgtaccagaagatcttcaaggccgactaccaggtgccgccctgggtctccggcgacgcgcgccgcctcatcgcgcgcctgctcgtcgtcgaccccgccaagcgcgcctccatcgccgagatcatgtgcacgccgtggttcaggaagggcttcgtgccgcccgtcctttcgcccccggtgacgcccaagaaacagcagctggacgaaggcgctgccctcttcgacaacgacgacgacgacaacagcaacagcaaccactctggcgccacctcccctcggtcgtgcaacgcgttccagctcatctcgtccatgtcctccgggttcgacctgtcggggctgttcgagagcgagcagaagaccgcgaccgtgttcacggnccgcgcgccggcggncaccgtggtggagaagctggagtccgtggcgcgcgccctaggattcgaggtcaccagggggaaaggctggaaggtgaggatgggagc

SEQ ID NO: 110293 - DNA, 379 bp, Zea mays
  Clone ID: MRT4577_32080C.1
ccatgttacgtataatagactgaattggataatgctattgaggcctagtggggattatatggagagtacataagggacacatgagagatgctagagattgcactaatacccttgactattatttcttaatgctgatacctctatgcaggatagtttttgcttggtccaagtcttgttctcctagaatcttggtcaaatagtaacctgcgatctgaaaaatatgagccagagcttatgtcaacccacacttctgttcacttaaaacacttgttttttggtttcatctgtacttctgtaacatcagtgaaaagttattgtttttcagctgttgaccttagtgagaatgagttattgtttttccgacagcaacggaattcga

SEQ ID NO: 110294 - DNA, 365 bp, Zea mays
  Clone ID: MRT4577_32081C.1
attgttgttaattacattattccattttcattttcttttttattgtaaagggccccgaaaacaccacaccaatccctatcctatacaatgttggtggccaagcaaaagcgccctatctacaaagggggacccatataggggccgttgctgacgtccctcaaccaaatacttaacacttttaaagaggatgatggtgcccttattaaaactatacgtaatatgccaacggcgaatcaaggaaaaataaaaaacctgacaagtctcttggactgcgcatacaatgctggacctacccacaagaaatccctctaaatgttagactcccctggtggacctacccattaaattttccacttttctgtaaa

SEQ ID NO: 110295 - DNA, 140 bp, Zea mays
  Clone ID: MRT4577_32082C.1
ggggccgttttttttttttttttttgaaagaatgacgcgttttgaatccatttcatttgcaatgacactcacggaatggatagcatgcttaattgagtggagaccgccagttcatatggcctcatcatcggtcacgatca

SEQ ID NO: 110296 - DNA, 207 bp, Zea mays
  Clone ID: MRT4577_32083C.1
cctcacactcgtccctaaatttatttttttaaagcttatagtttgttccacaataagtggagattttatattgggcgggatcatactactaataaagtcattaatcctatcaacttcccgatcatcttatattccaataaaaaataaatcaatacacaccatttcatataaatctaatactcttacataaatttatacttaattaat

SEQ ID NO: 110297 - DNA, 355 bp, Zea mays
  Clone ID: MRT4577_32084C.1
aattaacttatttgcttgttgcccacatgactctttaaacaattattttgagcctttttggggggcagggcggaaattacataacacacccgcgggacaaatttccctttggggaaaggatgggccagttcccaaccccccaacgaggcccacaatgccttttcccggggggggccggccatttttccccccccccattacaaagggcaaattaaacggggggggcccccgcggacccgggaccacttttcccaaacccaaggtttttttttgggctgaccccctttaaaaaagcatgcgggcgttttaaataaccccaagggcccggaaacctgggcccttaaatggccaacca

SEQ ID NO: 110298 - DNA, 285 bp, Zea mays
  Clone ID: MRT4577_32085C.1
gcgagtataaatcatcttccagtcttggtatgtctgttgcaagctcctagatatatggagttgctggcaatggcaagcacattttaatcactgaaaattacaatgtaagcactaccctagtcgctgaactggttagcatcagtagttccagaaaacttggtttctcctatgctgcttcctgaggtagacgccggcagaaggcgcggcgccacggcgggcaggcacggcgcggcggagctgtgcaggagctgcgcccagagggaccgggcctccgcgaagtccccg

SEQ ID NO: 110299 - DNA, 1169 bp, Zea mays
  Clone ID: MRT4577_32086C.1
ccggccgggagcctgaggaatacatagaccgcctccttgccgccccagatggccaccggcgcacacgcaccaccaccacgcgggaggccggcgccactacgcccattgggtccattgcgtcggcggagggaaggctcacggcctgtccctctgcggccgggctggctcgtcgcacctcagcgcggacgctacgaacgctcactttcccaagcgtccgggtaccctcttggagctaaatccgatgctggcgagctgagcttcttctcaggagcaccagggaactccaggggcttcaccattgattctccagcagataactcttggcactccctgccatccaacgtgcccccgtttacactgtccaagggcagagactctggcctcctgcccggtgcctactcctactcccacattgaaccaccgcaggtgctcggccaggtcaccatcgcctcgctgtcacaggaccaggagcgccaccagtcgtcgttcagcagcggcggggccggcgctggtggattgctggggagcgtgaagcaggagaaccagccgctgaggcccttcttcgacgagtggcctgggacgcgggactcgtggtcggagatggacgacgcgaggtccagtaggacctccttctcgacgacccagctctccatctccattccgatgcccagatgtgattgagaacgaagctcgtgcgcggccagtaggtggcgttgtcgcatgacgcgcacccagcatcgcgctcgctgctagcgagccaccgtcacccggtgattgatgccctcatcctagctatttgtttcgctgaatcgcattaagaacagaactctatgtaagagcaggatccttcctcatgtatcaatgggggcaatgaactccattctgtttctatggttgtagtaccgaccatgctttgtatttgttgtacccagaccgagaatgaaaaccgcccagtcgtcaggcgttgtcgtcgctgcatcagatgatccaagtgtattgtgtgctttccaggctgtgtaagatctgatggcgaatctgttactgcagtgtaggtgtgtagcatctgtggtatggtaccttttgttgtgctactgctactggatctggattgatgcaaaatctggtgctgccgtaggcccctcttccttttcaaaaaaaaaaaaaaaaaa

SEQ ID NO: 110300 - DNA, 309 bp, Zea mays
  Clone ID: MRT4577_32087C.1
atgatgtccgtttgttcttctccgaaaaaacatttttataccaacactaagcaaccttcttcgcgaataaggggagttcctttttttaaaccttgagcgtgcggttcctcgtcgcagccaaacatgagcccaatgccgacctcgggcgcggtcagctttgaggtagatcaccgatctacacaagcacacctcgagttgagctttacagtcaaaccctgctaagcctaatcctgatcaaattgggccaaccccacaaggctcctggggggcttcgccagcgggccggagtcctgctggaacggggccatg

SEQ ID NO: 110301 - DNA, 407 bp, Zea mays
  unsure (1)..(407): unsure at all n locations
  Clone ID: MRT4577_32088C.1
accaggggacgagcaacagcgcgaaaaacgcaccggcacggccacggaacagaacaacggngcaccggcactagcaccccgaagccgncgccgcggcggcagcggcaaggagagcggcgaacaggggggggggggggccgccgacccgacggcggaccgggccgcgggggccgccccgcgggagcagccagcccagcgccccgcagaaccgggcgcgggancacgacagcagcgacgacaaccggcgcaccaagggggaagcggccacgcaccagacgagcaggggggccgccgccgngcgcggcgcggccgccagcggccgaccgaccggcacgagacaggccgcaggaaccgggaagcacaggcccggcgcgccgcggngggacaacccacccgcaagggccccc

SEQ ID NO: 110302 - DNA, 1795 bp, Zea mays
  Clone ID: MRT4577_32089C.1
gctaaattaataatatttattgagaccaataattatatttaatctatttatagacttagttgactggaatacgaatcaacttacccttatgatatccgacttgaaaccacgaaatcgacgacgcctttcggctcagcatttcaccggaaatagggtgagtgctgcgtcgaatcacgcttcttctttgtccgcatctagaatttttcggtcgcgtactgatttattttcatctgcgcctaatcttctcagagcttggcgtagacgaggatgacgatcaacggcttgttcgagcttttgtcgagcacttggtgaacaccacgctgctagcttcgtcttcacccgattcttgggatttcttgatgacgcgcggaacgacgacgaccttcgattgaagtcttcgaccgagcacttgataagcgatgcacagggacctcgcttatttctgcataacgtccgggattcagggttcgacgagatcaagtagggaagaacacggttcgacgacaccgacgaggtcaacgacgagccgatcaaaccaaaactccacgacgccgaccgacacacgggttagagaatggtggctgacgagatccgagctgggaaaaagaacacatgactgggcgttaacggtcggatccgagcgtgagggagaagcttgaccggcgagctggagcgagctgggcacacaacgacttgaggaagctgcgcgcgcacggactcagggagatggacggatcgacacagtggagcagggcacgcagcgacacgagaagcaaagcgaggtcacagtcgggcgggctcggacacaaacacacgcagcgtttcaccgtgtccagcacgcgcgttacggactcgatgtcgactgcaagcagtttcgcgcgcacgacaacacaacggaggagaactgaacagggagcttcgcggcagcacgcgcaggaacaacggaccacacgcgacgcagccatggaggaacagggagcagggacgctggtgctggagacgcggcatcgagtggcggagtttgtgaacaatccagggaggccgacatggttgaagacaggaggcgagctgggcgagctcgaccaccagagagcaagacgtgacggcggatccgcgcgtgcggaaagctgaagaccaaatcgagctggagccgaacagaagaactccggcgatggcgagggagccagggcgcacagcgtgcggctgacagagagcagggcaggggcttgcggggaaagggacttggcagaggaagaggctcggcaggtcgcgcagggaagcttcagtccaagcgcggcatggaaggagcgacagggagaaatgccggacgccatgggagagaagagagctcgctccaggaagaagaccgagcagacggagaggagctgggcatgcgctggcacatgggcacgcggcaccacgacggccaggacagggaccacgccggcgagcccacggcggccatggaggagagcgagcagagagagagcgacgcgacagggagagaagaggttgggggcgagctggagatagtcgacgttggggcaggcggcaggaccgagcgccgtccgagctccggccatgaagggagttccggccacagagggacgcagggagcgcaggaagctccaagcggaggagacgcgcagggaagaatcgagcacggtaggattttcttctcgagctgaacggtggcttggacctgcgcacagagatatagacgctggaaaaatctgcgcaggagcggcgggatttttgctccaggagcgaagccacacgcagagaaccgaagtgc

SEQ ID NO: 110303 - DNA, 868 bp, Zea mays
  Clone ID: MRT4577_3208C.1
ctgtgattggctcgctcgaggccggccgggaaatcccgtgtgctggcgtgctcgagcccacatcccaaccatatacgagacgagccgacgttcccccggggcccccaaggaaaaccatgtgctgtgcccgccaggtgccactaaatcggtagcgcatgctagcactgagacggagctcccagtaacggcaacaacaagcagcagcagccagacagccagtagtaacacagtaaccggcagaggccatggcgagatcaaggcaggaaggggaggccggaggagaggagcggaagctggtcctgggcaagtacgagctgggccgcctgctggggcagggcaccttcgccaaggtgtactacgcgcgggacctgagcgccgccgccggcacgggcagcaccagcgtggccatcaaggtgatcgacaaggcgcggctgcggcgcatggaggggatggtggagcagctgcgccgggagatctccatcatgcggatggtgcgccaccccaacgtggtgggcatccgggaggtgctcgccagccgctcccgcgtcttcgtcgtcatggagtacgcgcgcggcggtgagctcttcgccaaggtggcccggggccgcctcaccgaggaccacgcgcggcgctacttccagcagctcgtggccgccgtcggcttctgccaccgccgcggcgtcgcgcaccgggacctcaagcccgagaacctgctgctcgacgaggacggccggctcaaggtcaccgacttcgggctcgccgcgctgcccgagcagctgcgccacgacggcctgcttccacacgcagtgcgggcacccccgcgtacgtcgcgcccgaggtgctcaggaagcgccgcttccacggcgcc

SEQ ID NO: 110304 - DNA, 1559 bp, Zea mays
  Clone ID: MRT4577_32090C.1
ctagttctagatcgcgagcggctgcccttttttagctttttggctagaaccatcaccatcagtagggttgctgccacgtgcttccttatcagatggtggctcaatcaagtctactccagtgaaaagtgtgattggacaaggtggccctagcatcgtcaagaaggcacatagcagcaacccaactgatggtgatggttctagcaaaaaaatgaaaaaagagataaagaaagtagatgcatgtaacgtgaccaggctgcaagttaagaatgggacaaacaatgaaccagcagataggaaggggccacatgcttccttatcagcttgctcagtcaactctacttcgctgaaaagtgtgattgctcaaggtggtcctagtattgccaacaagatcatatcaaaattaaccgaggatatgaccgtggtgacatccattgacggacaccccaccaagacatggatcgtgatgacttataagggagggaaggtttccatttgggactatcaggagaagaaaactgtgatggagttgaaggtcaatgaggaatcaggcaagattgctcgtatcgcgcatggcatttctcaaaacttcaaagagacaggtgtcccacattcagtttgttcagccaaatttatcgctcaagggaaatggctggtagtgggaaatagtgatggatacatatatgtctacacttacactgacactaagcttaaggaggccaagaaattcagagctcatgacaactctgtcgacgtgttggctgtccacccaaccgaggcgtaccttctttcatcatctgcttatggcaaaacaataaagctttggagctggggcagtgactcgatcatgaactgggtgcaaattaaaacatttaacgtgaaacctacatatccggatggagtgcgcagtctcaggtttaacccaagggacaccaacacttttgcttgtgttacgtatgaagatagagtaaaggtcggggacataaaaaatccttctggtcttaccaccatactgaaggggccattgaaagctgattattgcttctctcatactcatccgcacttgatggttactttgagccgaacatcacctgatgcccagatacggaatttgaagacaggaaaagttgatcaaactcttagcttgagtgggggaaaaacaacttgcattgcttgccacccaacacttccaattctggttaccgcgttagatgacgggactgtatgtttttgggatgccagtatctacaggcttgaggaaaaagtaaaaattacgggcagctgtgctctcgatttggttttcatcgccgatattaatggcagcgcaaggtacttttaacattttttttctattgacgacttaatttatctacaaaaacagtagccgtgtgcctttgctctctgtggtgactagacgatgccatgtgagttgccgtggcccgtggggttcatagggagtacatattgatgaaagaatgtagtttttatgctaacattatttaatactttttataaagaaagattatattgaattattgaaataaatgatgcttattttgttt

SEQ ID NO: 110305 - DNA, 391 bp, Zea mays
  Clone ID: MRT4577_32091C.1
cgcacccctttaatcgtcacctttccagagcctacgatatcagcagtggccttgccatcggagacggattctgctaggttctagcagcaacccaaaggcctggaacggaggggaaaaggcagttttcgggagcttgttgatgcaagttagacaggtcaactgacttttcaatgatgcagaatctaacgacagtgaagaggtgctgattctttgtggtgaccatatgttccgaatggactacatggactttgtacagagtcacattcaaagaggagcatgcatcagtatttgttgtttgccaaatgatgacagtccgggcatctgattttggactagtgaaaatagactacactggaaggtgtatttcattcaatgagaaaccaaaaggaga

SEQ ID NO: 110306 - DNA, 583 bp, Zea mays
  unsure (1)..(583): unsure at all n locations
  Clone ID: MRT4577_32092C.1
gttgtgtgggggggtttttttttttttttttttttttttttttttttttttttttttttttttttttttttttttttttttttttttttttttacctgggaatttaaaaattcacgaactcattgatctaccgaccccggaataatttttatgggggacagggaccctgttaattagctagccaattgaacaggtgggactgaaaaacaaataaaatgcattgtttttaagggacacccacgcatgcaaaatggtgggacgatctttatttagttcgctccatttttgggtctccgtattttgaaaatttttttataaaaaaaaatatgccggggttttccatttttgcctggtggtgttcaaaaaaaagctggcctcctccaataccggggggagggtccaatttttgggggggtaaggccggggcctggggggcattgggggtcttgggaaccctgatctccagggaccccttgctgtcggnaaaaaatgcctccactttcctccactccggggcctttgggaggtccacccgccggacaaaaccgtgctcccaacaccgggccgggcgccaatcccgggc

SEQ ID NO: 110307 - DNA, 236 bp, Zea mays
  Clone ID: MRT4577_32093C.1
tttgtgggcttaaccaacattcaccagtgacatcatatgcaacgcttaaaaacacacctgagtcaagcaagcgcttacagagaccaactttctatccggcacataccatgattgtgcgccagccagtggtaaagactcgactaccgattcatatacaggtacattgtgccctaatgctccgacgggagcgacccaatttcacgtagggattaaggctctctagaaaatttcaaaca

SEQ ID NO: 110308 - DNA, 2564 bp, Zea mays
  Clone ID: MRT4577_32094C.1
aattcggcacgagggagaggagagccggccagtgggggggctcggaggccgagggaggcgaggaaagcggcgggtgccgggccgcccgcgccggtaccgaggccctcgccagtcaccaccccctcccctcttccgtctgtcccccgcttgccgccaccgccgctgcccgctcgcgatccttcccctttttaacgctcccgcggccccgcgtcgtgctcccttttgtcgccgctgccttcgtgcccgtactcgcgggttctcctcgctcctcaatctccgcgcctgggcgcggcgttcgccgccggatctgggcgcgggacggtgccccggacggtcgatggcgcgggtggcgctccggttgggcgcccgcgcgctcgcggttctcgtcctcgtgtcagtggctctgcttccacttgtcagttccgacgatggacacaaacactgcgagggtgttgtcaggggctgggcggattcctccacggggcgcgtgaaggacggggacaaactgagcctcaaggatttgctcttcttcctccacattcctaggactggaggccgcacctactttcactgcttcctaaaaaagctgtatacaaatgcgcaggaatgcccgcgttcttatgacaaactacggttcgacccaagccatcctgattgcaagctggttgttagtcatgatgactatagcttaacttccaagctgccaagggagagaacatctgttgtaacaatactaaggaacccagttgaccgtgtatttagcacatatgagttttcagttgaagttgcagctagattccttgttcacccaaacttaacttctgcaaagttaatgactacccgtgtgttaaaaaagtctcgtgctgtcagtactttggacatctggccttggaagtacttggttccttggatgagagaagatctgttttccaggagagatgccaggggtatcgacaaagttcatagtagtaagaaggttaatgcatatgatgtggaggatatggttatgccgttacatcagtacatcaatgatccagttgcccatgagatcattcataatggggctacctttcagattactgggttaacgaacaattcatactttgatggagcacatgaggttcgacattgtgccagaaagcatccagatcttggtcgtattgtgcttgaagttgctaagaataggctggaccagatgctgtatgtaggacttacagaggatcatgaagagtcagcgaggttgtttgctcatatggtaggagcacaggtgcttttacaatctgggacattgagtttggatctcaaggaagatctgcacagtgagactgactcacacccatccatggtggagcccggggatgaagaagcaagcgaacatctgaataacacacatggttggcaaaataatgaagccctgaactctaccagcgacgaacaaggaaaaggaaatatgactgtgggtaaactgatggaagcttatgaaacttgcatcgctaaactgcggaagtcccaatctagccgtcgtaaaatatcactaaagaaagtggaggaagcaaacttctcaaaagaggcacggaagctggtccccgaggcaattttgaaacaaattatctcgctgaacagccttgacatggaactttatgaccatgctaagaaaatctttacccaggaacatctgatgctgaaagctcagcaatccatggcggggcagcacagacagttggcggaacaagaggagggctggatcggcacgatgtgcagcgacgggacttgctctccctgggtggtggtcttgctgggtctagggatcaccacgatcctagttttggccacattagctgtaacgacgagaaaaagaacgtctaaacttaaggtttaaccagaacttttcatgagacaggtctctagattttggtgtacagtctgatgaatgccccttagcaatctttcggggcagaggtgctagcgtgcgcagaatcatcatgtactaactcgtgcggtcgtactggtatcttcacacaatttgagatgccgcggtggtagtgtggacgtgtagtctaaattgccactccataagaaaaaagcagcgacgttgtgcgcatccaataagtataataaaatatagctcctaaaacatagaaattgagatcttaaaaatattgaatccaataaaacgagtagtactcctgggacacctacgcttcaacttacacatgttcttcctgcctgatgagaaggtaggaaggcgtggtatgtcgttgtcgtcgagttgcagatacgcatcctggctggccaagaacccgacccaaaacccttccaaaggtaatgcaattaataaggcgtggggtgccccccaaagtaagcgtggtatcgcccccctggattctgtcctttccggtcttctctaaaagattttatcccctatatctattttctctccaacaacatcctttaaatcacgtcttctatatgtaaatatctatattaaagatattttttaatttttaaattttgtacatacatgtttgtcgtactctcaaatatattgtacatattttagtttt

SEQ ID NO: 110309 - DNA, 660 bp, Zea mays
  Clone ID: MRT4577_32095C.1
ggcatcggccagtgggggctcggaggccgagggaggcgaggaaagcggcgggtgccgggccgcccgcgccggtgccgaggccctcaccagtcaccaccccctcccctcttccgtctgtcccccgcttgccgccaccgccgctgcccgctcgcgatccttcccctttttaacgctcccgcggccccgcgtcgtgctcccttttgtcgccgctgccttcgtgcccgtactcgcgggttctcctcgctcctcaatctccgcgcctgggcgcggcgttcgccgccggatctgggcgcgggacggtgccccggacggtcgatggcgcgggtggcgctccggttgggcgcccgcgcgctcgcggttctcgtcctcgtgtcagttccgacgatggacacaaacactgcgagggtgttgtcaggggctgggcggattcctccacggggcgcgtgaaggacggggacaaactgagcctcaaggatttgctcttcttcctccacattcctaggactggaggccgcacctactttcactgcttcctaaaaaagctgtatacaaatgcgcaggaatgcccgcgttcttatgacaaactacggttcgacccaagccatcctgattgcaagctggttgttagtcatgatgactatagcttaacttccaagctgc

SEQ ID NO: 110310 - DNA, 623 bp, Zea mays
  unsure (1)..(623): unsure at all n locations
  Clone ID: MRT4577_32096C.1
aaggggcattcatcagactgtacaccaaaatctagagacctgtctcatgaaaagttctggttaaaccttaagtttagacgttctttttctcgtcgttacagctaatgtggccaaaactaggatcgtggtgatccctagacccagcaagaccaccacccagggagagcaagtcccgtcgctgcacatcgtgccgatccagccctcctgaaagagacaacgcaaagcacatgacatgaggcttgctactggcaatgagtacagttcttcatttccacagttccaccgcagtacgagaacggttcgtctcatatcctatcgtgtttccttcctcctccctggcaatggcaatgagtacagttcttcgtttatctaaattgtacttcaacagttagtatggttagccatgggacgcgctctggacatcactgggatcctaaattcttgcaggaaaagctttgtcaaactaaaataaacaaaccacataacngaagtagtgctcttttgagtttgaacaaacctcttgttccgccaactgtctgtgctgccccgccatggattgctgagctttcagcatcagatgttcctgggtaaagattttcttagcatggtcataaagttccatg

SEQ ID NO: 110311 - DNA, 417 bp, Zea mays
  unsure (1)..(417): unsure at all n locations
  Clone ID: MRT4577_32097C.1
tttgtcttacccactctcnctttaagcgtctgctcatccctgtccggtagggttatctcaaccagggagtggatcacatggtgctgacgcgagacttgatgagctctgtaccactaggtgctagtgctggcataacgagcgccgcaaggccgtgggacgcccgaaggatggctatctccgagggcctgaaggtccaggaggactgcctgccttgatgttcaccgccagccgagttaccgcctgcgcctgtgcatgacccatgatcaaggggtaggtcaacttgcgcatccaccgccacctacacacaagctgtacaccctgttgttctacgacacactggttaacaccttcgactcgatcatccaccacctcggccactgcctctgctgacttgaccgactgctgacagactccccg

SEQ ID NO: 110312 - DNA, 314 bp, Zea mays
  unsure (1)..(314): unsure at all n locations
  Clone ID: MRT4577_32098C.1
ccctnncccccggcccncgccattccncncccgcnaaccccaccccggcgccccggcccccgcggnccagcggcgagcggggccgaccggncccgacgccgcaccacaacaccgccggcgcccacggacgaccgcacacgaccgcgagcggaacccccggaacggaggaaccaacgcgcgcggaaacgcaccgaccgcgggcgggagcggaaggnaacggaagcggcggaggcggcgggaacccagccagcaaacgaaagggcaaacaanggaaaggaagaaagggaaccgagggggggggaccggcgggaaga

SEQ ID NO: 110313 - DNA, 528 bp, Zea mays
  Clone ID: MRT4577_32099C.1
ggccgcttttttttttttttttttattgccctctttttttctgggtggaacccacactacccctgagatgcgtatagaaaacctgaaaccatccgttgatatcggtgcgctcagactttgatgtgagggcactggtaatatgcaggggacagacagggtaaagggcttgcgaacccagccaaacgggggtgcagagcccaacgcaccagactaggtgggacaacgcggccttgcacagggagactcccttgccttgagccgccaaatttttcggacgaaggccataacattgtatacaagagaggcatccaacagatccgagtgcagatcacattgaataatgttattcaacacattgaataactaccttctactttataagaacataactactagtttactggcccttactcgaggctttcttggccgcctctctaatctctctaggacgcctctctaatatgttaaacgtgcatctggtaaatgtatcacgaacgtactgcctgatcataacgacggacttgtatg

SEQ ID NO: 110314 - DNA, 647 bp, Zea mays
  unsure (1)..(647): unsure at all n locations
  Clone ID: MRT4577_3209C.1
tatannnnnnnnnnnnnnnnnnnnnnnnnnnnnnnnnnnnnnnnnnnnntcaatacgtcttgttttcagataagaaaggtgattgatacggcactgcatgcttcggtagcacagtagtttccttttgcaaatttgcaaagcccaggtaggtagagaggcagcttgtgcttcatcgaccaaaccgtattcnnnnnnnnnnnnnnnnnnnnnnnnnnnnnnnnttcctcgggagctgtgccgtcgtgctctccggccagcggatcaatcttggcgaactcgagcgtcttcttgccctcgagcctgctggtgacgtagtggcatttgtgctagtggtgcgcacaacgcatgccaagagtatgctgagtcaatattgaatatgaatacatcatgttttgcgcagaccatgaatgcttgtgatggtggacttcccactagttcttatgatctgcgggctgaatccacgggccattcatggattatagttaaagaatttcagaagacgctggattcggcatcgtgtggacggttggctgatagaggactggaaacgnnnnngaacagtgtgaaaaggaacatcttggaaaatggtagtaataagccttggtcccagcaattccgaaaacatcgcaaatgatcgacgagtttct

SEQ ID NO: 110315 - DNA, 863 bp, Zea mays
  Clone ID: MRT4577_320C.1
aaacaacaacgtaaacagccataattattctcaataacccggtagcaatgcagggggaattaacgactcttacaacatcaggggttgtaaaccacacaatacttcataacagacacacataacacgatagcaggagcaactcacggcagatcacgggataagggcagcacactggcctgatgctgcgtcatcagcaaacttttctagtactcgacaccctcgtcgccatcctcgccctcatagaactcagcgccgacctcctcgtagtccttctcgagcgccgccaggtcctcacgggcctaaaaaaactcaccttcctccatacccttaccgacgtaccagtgcacgaaggcacccttggcgtacatgagggccaacttgtgggccatgcgggaaaacacctccacgacactggtggagttggagatcatgcacacggcacgctgcaccttggccaggtcgccaccaggcacaacgctagtaggctggtagttgatgccgcacttgaagccagtcgggcaccaatccacgaactgaatggtgcgtttggtcttgatggtggccacagcagcattaacatccttggggactacatcgccacggtacatgagacagcaggccatgtacataccatcgcttgagtcgcacatggccatcatggaagatgactcacaggcactgtaggtgatctcagccacagataggtgctcgtggtaggccttctcacaacagatggctggagcgtacgaacaaagcatgaatgtggatcgtcgggtagggtacaagtttggtgtggaactcgctaacatatacgttcagagccccatcgtacctcaggcaggcagtaaagaatgagatgacct

SEQ ID NO: 110316 - DNA, 335 bp, Zea mays
  Clone ID: MRT4577_32100C.1
acgaattgtgtcgtttggcaacgggcaaaagtttaagaccaagataggtgcacatcgaaccgatctgctcgaactacaaaacgggctggacctgagagcaaccaatacacttgggctgaacgacactgcgtatacgggatcatacggaaaaggggtacaaactggcttgctctattcatccggcggaattgggggagggggtgagatactactacgcgcgctcgaaatggttgccgccgccgagctggaagtatatgtgaatgatggagacacgcttggcccagatggagcaacagttgatggtctagatcaggccggcgcgatttgaataaggg

SEQ ID NO: 110317 - DNA, 509 bp, Zea mays
  unsure (1)..(509): unsure at all n locations
  Clone ID: MRT4577_32101C.1
gcacgaggacagaggggcgcaggagaaagagaggcagtgccgagcagggagagagagagagaatccccgacctctcgcctccgccctagccaccaaggttcctcctgatcgattgattcccatccatccaaaaccccaacaaaatacgacagtggcggcggttcgaggttcggtgcgagagcgcgacgtcccggaatcggcggcggcgaagatgtcggtgagccacgcggagggacatcgagatatcactgtgcgacggcaactcgggaggacgagcggcggcgcgtaagatcggctcgctgcggcggaaggctatccacgcgctcaagaagcgagggangcgccgcgtcgactttccgcttcccgccggcggncatctccatcgaggaagtccggcgacgccgaggaggagcgcgccgtcggctccttccggggaacgccttcgncggcgnaagggtttccttcccccgnaaaagcaacggattgaattaaccaacattgntgncttc

SEQ ID NO: 110318 - DNA, 651 bp, Zea mays
  Clone ID: MRT4577_32102C.1
aaggggatggaggacccaggccatatgcgtgctaccacgaccccgtggccatggcccacatccgcgagtacaccctcaagccgctctcggagccggcggtggcgcccgtgtgcaccaggaacaactctgtccctggcttcctcttctccaacggtggcttctccggcaacctgtagcacggctacacagatgtgctggtgccatttgttcatcaggagtcaggacgcaccagttccggggcgggtgcagctcttgctcagcgggatgaaggacgaggatataactcgaaaatgacaacaatggacgccgaagctataacccaagagtaacaactttggcttaaaatggtatcgaagatcaagcatgatgctgtgtcgaaaaggaaaagattatctagtctctaacgattaatgttacaattgtgaaagaatgttaatgtcataaatgtatttttactcgggctgcatcccgtgtctatagataggtgaacaatacccccgtactgttcacgctggattgtaattgctctcgcgtcatcaccttcgaacaagccgaagtatcaatgtaataaaaatcttgttaatattccaaaaaaaaaaaaaaaaaaaaaaaaaaaaaaaaaaaaaaaactcgagaagggggcccggtacc

SEQ ID NO: 110319 - DNA, 222 bp, Zea mays
  Clone ID: MRT4577_32103C.1
gtgtgtggtggtggggggccgttttgtgtggtttaaagctggcggtggctcgggctgggcgtgggctcgcgggtgttgcggttgctctggcggtgcgtgggctctcggctgccgttgcgggtgtgcggtcgtttgtgttcgcgggccgtcgtttttggctggttgtgcttggtcggggccttgtgttgcccgtgttggaccgctttctgcgcttcgcgcttt

SEQ ID NO: 110320 - DNA, 454 bp, Zea mays
  Clone ID: MRT4577_32104C.1
aaatactccatcagcagtgacaactctgacaccactgacagtcatgcgacatctacagccggatcaagatgctccaaactgcccagcagcaccaagtcgggctggccccgacagaacgaaaagaagccctccgaggttttccggacagacttgatcacagccatgaagatcccggactcataccagctcagcccggatgactactacatcctggcagacccatggcgacaggaatgggagaaaggtgtgcaggtgccttgccgggcagaggccatcccagagcccgtggtgaggatcctcccaccactggaaggcccccctgcccaggcatccccgagcagcaccatgcttggtgagggctcccagcctgattggccagggggcagccgctatgactgggacgagattgatgcctactggctggagctcatcaactcggagcttaaggagatgg

SEQ ID NO: 110321 - DNA, 139 bp, Zea mays
  Clone ID: MRT4577_32105C.1
acatcaccagcggctctattccaggcgcccaggtcttcatcggacccttcgccagaaagcatgcaacaagttgccggccttgtacttgaatcaaggaggagcactagccttcaatcttcggcactgaaaaggacagttt

SEQ ID NO: 110322 - DNA, 376 bp, Zea mays
  Clone ID: MRT4577_32106C.1
ggtaaacgtgcggcgccagcgccggaacaccggggggtctgagctgggcgagggcgcgtacctcccggaggcggagcgcaacatcccgcccaacccggccatggccagcgcacgggaggaggccgagaaggacatgaacggcgcgctggacgagctgctcgccaagaccggggcgcggcccaaggagatcggcgcgccggcggagaactgcagcctctacaacccgacgccgacgctggccgccaaggacgtcaaccactacaggcggcggggcaacgtcgggagctacaacctcggcggcatgggctgcagcgcggggaacatcgccgaggaccacaccagggacctgagacagggccaccggggcacctacacc

SEQ ID NO: 110323 - DNA, 390 bp, Zea mays
  Clone ID: MRT4577_32107C.1
ctcgaggtttattgggcaacccctcttccaatccacaagaagctgggaggtgaagcttgggctgtggggccacctgcatgcccctttcaacttccttctgttgcttgctcctcacagcgagtgggcgatcagggaggagagcaaagattggggtggtccagtatgtgaacaggcgacagggatgtggccccattgtgcataggatggttgccgggttgaactgatgaggcatgaagaggacattgtttcttgctttgcctagtgcgggcccggcaccattgttgatcacgtttagaagcagaggcatcttttttgacacaattgatggtcagggttacaagcatactcatgtggtcagcagtgttgtgttgtaaatcaatgagtggtatt

SEQ ID NO: 110324 - DNA, 1055 bp, Zea mays
  Clone ID: MRT4577_32108C.1
cggacgcgtggggcattgaccctgaatcgattttagcatacaagaatgccttttctggatgctacaaggttccacggtctcctacaccatacagcggaaagctttttacaaggagtgaaagtgagactaagagaaaatcacttatccaggacgatcgtgatttgccaatcagttttcttgcagacagtgatagcatgttcattgcttgccaggggatcactatacactacaaagtttccgatccagcagccagcctaccttcatcccctggcttcttttcagagagagatactcatcacgatgtaatttcatcaagcatttctcctagaagacagaggcatgagagtccaccatctgcttcctctaatacccgtcgcgttctgaataggagctttagccatcaataccataatacttcgctatatgcaccactattggtagaaccagtggcatctccaactttgttggatgatattcctctgatgtgtattgatgatggcaatgctgatggatgtctgagtcatgtgggctttgaccttgaggctggagggcagggtaaattcgctgtagttttggtgcatggatttggagggggagtattctcgtggagacatgtttccaatttgttagctcgacaattgggatgcactgtgatggcatttgatcgcccaggatggggattaacatctcgacctcgtaggaaggactgggaagataagaagttaccgaatccatatgagctggagtctcaggttgatcttcttatttcattttgttcagagatgggcttgcactctgtggttttagttggtcatgatgatgggggcttgcttgccttgaaggctgctgagaagctgcgcacttatggatgtgacagagaggttgaagtgaacggagtagttcttattgttgtgagcttatcaagagaagtcattcctgcatttgctcatatactcctgcatacacctctgagaaaaagcacatggttttaccacttttacgtactgaaattcgtcaaggtatcaatcggcgggcatgggatgatgccacaaagt

SEQ ID NO: 110325 - DNA, 1116 bp, Zea mays
  Clone ID: MRT4577_32109C.1
gggccacagaactcatgggaccatttgcacaaactttccaacaacaatctaatgctgggttgcgctttgctcggccctggtgaggggcgccgtgcatgcctgcacctgccagtgtgcaatgaacacattacccttcgttttgctggcagatggtagcaggcattaaagaacccagaggtgtaaggcagagtcagccatccatttgatattgtgaggctgtacacactctctgtgtagttgctccctggtccctgcatactgagatgcaggagggacacttcatactctgtactctaaacagaagcaactcgaggtttattgggcaacccctcttccaatccacaagaagctgggaggtgaagcttgggctgtggggccacctgcatgcccctttcaacttccttctgttgcttgctcctcacaggttgagatgctgaaggagcacatcttgccctatttgaatgggctctgttgtcgaaggactgatgacgatgatgaaaaattgggattcgcagtgagtgggcgatcagggaggagagcaaagattggggtggtccagtatgtgaacaggcgacagggatgtgggttagtgcagttctcacgtttcttttttgcttaatacttggtcctcttggcacttattgatgaagatgaaccatatgcagccccattgtgcataggatggttgccgggttgaactgaggaggcatgaagaggacgttgtttcttgctttgcctagtgcgggcccggcaccattgttgatcaggtttagaagcagaggcatctctgttgacacaattgatggtcaggtttacaagcagactcatctggtagtcagtgttgtgttgtaaattaatgagtgttattgaattaccgaacctatttcttgtaccatgcatgacaagcaacgacactagttatgatcatgacgaatcatgtaacagacctgtttactgcagtgcagtgtttaatgttagaccgggttatttgcttgtgtttggtagttgtttaaggtttcactcttctttttttattaaggtattgctggaaactaatacttcctctataccaaaagattagttgttattgccaaaaaaaaaaaaaaaaaagcggcc

SEQ ID NO: 110326 - DNA, 2062 bp, Zea mays
  Clone ID: MRT4577_3210C.1
gcctcgcaagaggcagggagctaccggagcactcactaaagcaccggatcccatcagaactccgaagttaagcgtgcttgggcgagagtagtactaggatgggtgacctcctggggagtccctcggtcgcggccggggcaaatcccgtgtgccgcactggccgagcccacattcgaaccaaagtccccccgggcccccacaaggaaaaccatgtgccgcgcccgccacgttcccacgcgccactaaatcagcagcgcccggccgcccggagctgcctgccagtagcagcaacagcaaaacaagaagcagccagccaccaggcactagtaaacagtaagcagcagagagcatggcgagatcagggcgggaagcggatcccggagaggaggaacggaagctggtgctgggcaagtacgagctgggccgcctgctggggcagggcaccttcgccaaggtttactacgcgagggacctgagcgccggcgccggcacgggccacagctgcagcgtagccatcaaggtgatcgacaaggcgcggctgcggcgcacggaggggatggtggagcagctgcgccgggagatctccatcatgcggatggtgcggcaccccaacgtggtgggcatccgggaggtgctcgccagccgctcccgcgtcttcgtcgtcatggagtacgcgcgcggcggggagctcttcgccaaggtggcccggggccgcctccccgaggaccacgcgcgccgctacttccagcagctggtcgcccgccgtcggcttctgccaccgccgcggcgtcgcgcaccgggacctcaagcccgagaacctgctgctggacgaggcggggcggctcaaggtcaccgaccttcgggctggccgcgctgcccgagcagctgcgccacgacggcctgctccacacgcagtgcggcacccccgcgtacgtcgcgcccgaggtgctcaggaagcgcggctacgacggcgcccgcgccgacctctggtcctgcggcgtcgtgctctacgtcctcctctgcggcttcctcccgttccagcacgacaactacgtcaagttgtaccagaagatcttcaaggccgactaccaggtaccgccctgggtctccggcgacgcgcgccgcctcatcgcgcgcctgctcgtcgtcgaccccgccaagcgcgcctccatcgccgagatcatgtgcacgccgtggttcaggaagggcttcgtgccgcccgtcctttcgcccccggtgacgcccaagaaacagcagctggacgaaggcgctgccctcttcgacaacgacgacgacgacaacagcaacagcaaccactctggcgccacctcccctcggtcgtgcaacgcgttccagctcatctcgtccatgtcctccgggttcgacctgtcggggctgttcgagagcgagcagaagaccgcgaccgtgttcacggcccgcgcgccggcggccaccgtggtggagaagctggagtccgtggcgcgcgccctaggattcgaggtcaccagggggaaaggctggaaggtgaggatggaggccaaggccgagggcacgaacggacggctcgcggccaccgccgaggtgctcgaggtggccgtggacgtgaccgtggtcgagttcgtgcacgacgccggggacgcgctggactttaacaagttctgcgccgtcgacgtccgcccggggctcacggagatcgtctgggcgtggcagggcgacagccccgccgccgccgtcggcaccgcgtgaacaagcgtcctctggcgtccccgtctgtgacgtggaagttgtagcaactttgcgtaggagttaaacacggctgcactggcaccagctttttgtagcatgtaaagtttcaagttctcatcgttgcttcgagactgccatggtggctagttcgttgtgtgccatatgctgtacaggaaggaaagagtcgaatcgagccggggagttttcgatcgacttgccaagttttgtacgatcataacctgtattttctggagatgtgtgcatacaaaattttgcccgtgatcaaatttagttttggtccccatatattttttcc

SEQ ID NO: 110327 - DNA, 129 bp, Zea mays
  Clone ID: MRT4577_32110C.1
ccggccggagtctggcactggtactggtaggtggtaggcaccgcgcgcgcgcgccgctcgcgtacacgtgaaccgcaccgtcgccaccacccgaagaggcccgagcgtgctatggcacatgcaggcccc

SEQ ID NO: 110328 - DNA, 169 bp, Zea mays
  Clone ID: MRT4577_32111C.1
actgcatgacgcaggtgtccaataagtcgctgagcctgaacacccgggcgttctccacaccgcgcgcttctgcgaaaaggacctgcatactgcgatcgaccgctaggcgtggttcgcgtaccccgaccacctctgcagccccaactacccgctaatgcagaatctccgc

SEQ ID NO: 110329 - DNA, 602 bp, Zea mays
  Clone ID: MRT4577_32112C.1
attttaaaaataaaaaaaaaaaaaaaaaaaaaaaaaaaaaaaaaaaaaaaaaccgttatcgcgcacatctcctgatcctcgttcctctccgccccgcttgcgccgcgcctccgcccccgtctcctgtgagatcagctccggcggcacgcggatatgactacttcaaggcgtcttgctgacaggaagagtgcaaagttccagaagaacatcacaaagaggggttctgtgcctgagaccacggtgaaaaagagcaatgactaccctgttggacctatagttcttggattcttcatttttgtggtcattggatcatccttgttccagataatcaggacagcgacaagcggtgggctggcctgaattcactgagctaaaaccagaaatttatctgtccgtgagctgggaggcagtatctgtgttctgtagcaaacttgttcatggatatgtagtgcgaatgtcactactgttctgtttgcagtatcaaaagagtttaaactgatgttgtaaccatgcaaaggctgaaaattttaaagagtatgggagaaaccttaatctaaagaagagtggctctgcaattcccgggcaaaaaaaaaaaaaaaaaa

SEQ ID NO: 110330 - DNA, 136 bp, Zea mays
  Clone ID: MRT4577_32113C.1
gaccaacttgcagcataggatgctcattagtgtaccaacaaaggcagtcaaaatatttagcctccttatgctggtcggtcttactgcaagtgctgataccgtgaccattttccggcaccgctagctagctcctata

SEQ ID NO: 110331 - DNA, 378 bp, Zea mays
  Clone ID: MRT4577_32114C.1
tctccctgcaaccatggtcgagctcctttttcccctgccatggacatgcccctccctgcacctcccctccatggtggctgccagtatccacctcgccgagcttctccctggccaagggcaccctggagctcgtcgtgccccatgcccgggcttgctccttgtccgtacccatctctcaagctactgccgtagggccccctatgtttcccctagcagctgtagcttcggcggcggcgtcaagatttccttgttgcgccttgcaccgtcgatgttagttgggtgttcgacaaaatgcctaaaccaaccagcgtgttttgaacagacatgtccgcggcgtcgtcgaccctcgctagctatcgccatcgcgtttggcgcttt

SEQ ID NO: 110332 - DNA, 400 bp, Zea mays
  Clone ID: MRT4577_32115C.1
cttgatgtcaaccagcacgtgaataacgtctagtatatcggttggatccttgaggtaatggcttcagggcccccttgcctgcctcttttcatcctatattcaatggcgccactgctctgaccatgtggtggctgttggagataccactggcatggcttaaaaagtttataaagctctgcgtacttgcgtagctcattgctaatgaatgatcctgtatttgagatgtaaaacattgctcgtgcacgggtatctattgagcttcttgatctccacacagtacgaacccgctccaatgcccgaatccctttcatttatctctcccttccttttaactttgtccacagagtgcttcgatctcgatcctggaacaacacgagcttgcgagcatgacgctggacta

SEQ ID NO: 110333 - DNA, 239 bp, Zea mays
  Clone ID: MRT4577_32116C.1
tttccaattcgtcaatcagaactatactaaaccccttcaattagcaattaatctttcctgccactagttatgctccgacgtcccatctgatgctgacttttgcgccttccctcggcgccgatttccgtcctccgctttccgaaaaaaatcgatacagtcctcgccagctctcgagtcctctgatgatacccgctgcgacccatagcctccgtccgatcagcagcagcagcagcctaaca

SEQ ID NO: 110334 - DNA, 437 bp, Zea mays
  Clone ID: MRT4577_32117C.1
gcagtaactacgggtatattttctacacacaatacaaggacatccatcagcattccattgggaaggcaatgttagctattgatagttgcacttattagaatgttgacgatgccagtaacttaaacatgaatgtttagcaaaatctggaggcttatagctttttggttccttaaaaactagtaatttatgcagagaatcatcaatgaagattccagacaccatccaattgcttataataagacctgtacaagtacttcaataagctacctgcctacaggctacaaaatctgcaggttgtagaactcttaaatgaccgaaccttttttaggaacaaaactcgccaggttttttctaaagggtaggtttggtgcaatggtgagagctgtttatggagtcaccaccgcgggtttgaagcaccttttcacattatgggggaa

SEQ ID NO: 110335 - DNA, 172 bp, Zea mays
  Clone ID: MRT4577_32118C.1
ttacaaacagaggcaggaactctatgcaacgtgcgcacgtggggtacctatctcgctctgggaggcttccatatgttgacaaaaaaaggaacccactttaagattaaaaggccttctaaaacctcataagacgggattgaaaccttagcaaatggcaaaaacacggtattta

SEQ ID NO: 110336 - DNA, 411 bp, Zea mays
  Clone ID: MRT4577_32119C.1
actgccacgcattccgaatgacgagtctgcaccatatcttgacgctggcgagaattgtagagcgaatctgactgagttcaagatgaacgttagctaacgtgtgctccaggctcaggaaatgctatcaaagaagaacatgtcccagttgaatgagtatgccatcggcgtgctggaatcctcatccaattatctcatgccatcattctattgctaccccctagatatggacatcaacctgtgtcactcgtatagcacggatgggcctcactagacactactttcgacaggagctaatcctataaattcgaaagtgctgaatctcatgtaatgatcaagctgtcgaatgtgaactacatgctgcctgctactcaaaagatgtcctgcataaccacatgttctgctacctgcaac

SEQ ID NO: 110337 - DNA, 1016 bp, Zea mays
  Clone ID: MRT4577_3211C.1
cattgggtacctcgaggccgggccggggcattgcattccattccattccattccaatttccactggcagtgaaacagccaaagaacagaaaaaaatataaaaaggtgggcgtgcaactttcccttccttcgccgaagccgcgcgacggaaaccccaaacccaacctcatctcttttctcggcctctaccgccccctcgatcggtcggccggtcagctatgacgccgggaagctcggccgccggatccggcgtcgtcgttcctcggaacttcaggctcctagaagagcttgaacgtggagagaagggcattggagatgggacagtgagctatggaatggatgacgcagatgacatctacatgcgatcatggactggcactattattggccctcataataccgtccatgagggtcgcatctaccagctgaagttgttctgcgacaaggactaccctgagaagccaccatcagttcgatttcattcaagaataaacttaacatgcgttaatcatgaaactggagtggtcatgtaggttgacccgaagaagttcagcgttctgggtaactggcagcgtgattactcaatggaatacatcctaacccatctcaagaaagagatgacatcgccacagaaccgcaagctagttcagcctccggaagggacattcttctaaagatggcagcaactcatgtccatccatggtgactcggaaacagcttccgcacctggttcctatattttatatatttagtctgatctcccagttatctgtaaaccaccgagatcgagtgcaagcagacttggttgatttacaatttgcccggtggttgctaatgatatgggatgaaacggttgccggtttggctgctattaaggttgtgtaatctgatgggcaatttcagcattctaatgccctaatgatgaatctttggccatttgctgttctgcctaaaaaaaaaaaaaaaaaaaaaaaaaaaaaaaaaaaaaaaaaaaaaaaaaaaaaaaaaaaaaaaaaa

SEQ ID NO: 110338 - DNA, 216 bp, Zea mays
  Clone ID: MRT4577_32120C.1
aacgtccagaccgacgcgcacgcttatactgtaacggagcccctggtttactgcctagctcgcttgattactcatccatcggcgataagtaacgtattgacacccatcaccatgcgtggcggtgcccgcaactgtcctggttgctcccttgctttgcggcgggggggggcggtccttctcttaggtgatggctttaccttgcgtgggctggctgtg

SEQ ID NO: 110339 - DNA, 489 bp, Zea mays
  Clone ID: MRT4577_32121C.1
cgtgattccttcggtaggtaataggaaagtcttgccacccctaggaatatggccccaccaatgccagccaagatatagagggattgattgccggtgcccaaaccaatgaaccgatagcaaataaagacaatgcccaccaggagcaataacggggtgatgtcaaagtatctgccgtggtcgcccgcttcgttttggatgcccaaaaaaccttcctcgatggcccgcttagccaacatgggattacccccagctcggctttgcagtttggcaatctggtttggctttagtcccgaccccagggaaatggcctctttttccatcaagtctcggatctggtattgcgccaggggcttgagttcaatgcgaggcacatagataaacaagtcagtgcgggggggattagtggccgccaacagcatgggaacccccacgtccttcagttttttgagccaaagccgaaatttgacttccagataatgggcatcgtcg

SEQ ID NO: 110340 - DNA, 248 bp, Zea mays
  unsure (1)..(248): unsure at all n locations
  Clone ID: MRT4577_32122C.1
tgattatttgatggatggaatatnngggtacagcaaattcatgtgatggntgtgctatnatgtgtaatattctatgacgatatcaattaaaaaaaaaaaaaaaaaaaaaaaaaaaaaaaaaaaaaaaaaattaaaaaaaaaaaaaaaaaaaaaacaggcggctnctacgcctattaaccccccaaaaaataatataaatcccccccctggagcccaaccagatctacattatacccatgtattataac

SEQ ID NO: 110341 - DNA, 403 bp, Zea mays
  Clone ID: MRT4577_32123C.1
ggctcctatccattctctctttgttattattcatacaacaaacataagaaaagccaacgcacaaacaatgccatcttgaaaagaaaaaaaatatatactgatcgagttggactccacaaactaataataataaacttgtgggaaaaaaaaagagaagcactgaaggatgttccgccattggcttgaacagagagagtatcatacagcagctgagggtgcagagcccagattgcccgtattgctattcagaaggcctgcatgactaagcagagcccagatgtgcgtgaggaactccccgccgttttcaaggtgctgcatgtgttgctccgtggtgtagtgcgacttaccggcatggatggttgccttggcccagaattcttgcagcaacttccagcgatcccca

SEQ ID NO: 110342 - DNA, 474 bp, Zea mays
  Clone ID: MRT4577_32124C.1
aaaacaaaacttgccataaatgggcagggggttatgtaaagaaagcgagaccattcaaattcttggggccccgggggggccccctctacccagggggccccaggggggggatcccagaccgacccccggttggcccccttgatcaaccgggaaggaaggaaaaccccccccccccccaattaattgatcagcaatttccagagctgaaacccaaaggcccgggctggcttttggtccattccatttgaacaacacgggcctgccccaggaggcgttcagttctcaccagagcggggggggcttccccctgaccatgtccgaaatggggggccagcccaccaaccacggccttctgtttggggggcccgcaaaattgagcccaaacatttccttggtgagggggccccccccgaaaaaacccaccagccgggccaccagccccgggcttttgtaaatgggcccccgggcgggggg

SEQ ID NO: 110343 - DNA, 511 bp, Zea mays
  unsure (1)..(511): unsure at all n locations
  Clone ID: MRT4577_32125C.1
cgggcacgaggctgtagtaatatttgtaatggagtttttggcttgacatagctagttgagacatttagcgttgatgattgagtaataatgtgttacgcatcaccatagaggtggtatgtgacagtgtgagcaatgacctgaatgaacaatggaaccgaaaagaaaaaagtattgttcctaaggagaaaaagattcgtaaaagagagttggcacaaatggcaaaaattgctgttgttgtaaaaaggcaacaatagtttgccacatcctgtgggtagaatgcctnnacttgttcctgcttaaggaaggcttttgtgttttccacaacctgtggggaaactgtcagcaattgtttgttggggcccaatgcccccttgttggggacaacttgcaaacggatgggcggcatttgacactgcaataagagggaaaaccgtgtcccgaccagttttatgaatgttagaaaatattccgctttcaagtgttggggaagtttcacaaaaggcccgtcgat

SEQ ID NO: 110344 - DNA, 352 bp, Zea mays
  Clone ID: MRT4577_32126C.1
ggggaggggcggtcccaagcgggtttctataatacaccttgttcaaatggtgatccatgggtgattcagagagtggatttagaacgactttatcctcacttacttgaatccattccaattgggctcacttagactaccgcatcacgcactggaaaaaccaatgtaaagaggacgccgttagattcaaaccgcggtttactatctctttgccacacgcggacacacaagggacccctactttattctactaccaactcttgccttcaaaaaagggatgagtcttaccacgcacctcttgggacggtcgtcaactttttgggcgagcgggaaaaagacataggtactacacaag

SEQ ID NO: 110345 - DNA, 358 bp, Zea mays
  Clone ID: MRT4577_32128C.1
tcgcgcgcacgccgtcggctcgcagcacgccgtgatgctgacctgccgagaatccaggcttgcgtcgaccatcgggctgcggctgtggcaggccggagtcgtcgtgtatctagacatccggaggtggatctgatgagctgaaactgaagctgcacctgagccgctcagctgccgttgatagatgccctctgtttgctctgttttacgatccataggtgatgcatttattggctgaggggtcatttacaggtctgagacagagatgaggatgtgtaatactatcaatgtgacgacgggagttgtgaatatgctcatataagcagatcacattcgtgcgatgccaaatgacatggtggac

SEQ ID NO: 110346 - DNA, 245 bp, Zea mays
  Clone ID: MRT4577_32129C.1
ccgacaggacgcacgcatccgattgatgcttaatatgtattataaagtctttcctgttaactgccctgtggggttgtaaggatctcatttagttatggagaaagagaatattacttttacttatgaagttgaatttgtaaacagtgatatcatgttgccatcacggagtgatgcatacctgaagattgatgattctaagattcactgctttttcaatttatgaactctctgatggtaattctatt

SEQ ID NO: 110347 - DNA, 493 bp, Zea mays
  Clone ID: MRT4577_3212C.1
atgcagatcttcgtacagactctcactgaaaagactatcactctggagcggagccctttgactccattgacactcgaaagggcaagataccaggacacggaaggcattcacccggaccataagcgcttatcttcatggcagcactctggacctcgcacaattgccgactactacattcaataagagagcacccttcaccgtgttctgcacctgagccgaggcaagaatcattttgagaggcaaccatgactgtgaagactatcacactatctgcggagcactacagacgccatcgacaccttctgggccgagatccatgacatggaggacacccctccggaccaggaaagactgattcctgctgtcctgcagatcttaggacagccgcactctggccgactacaacgtcagaacgagagcaccgctcacaccgcggtagcttgcacaggggcagtgatgcagatcttcgcgcactctctgactgccttgacta

SEQ ID NO: 110348 - DNA, 281 bp, Zea mays
  Clone ID: MRT4577_32130C.1
cgcacgcgtccgcgctctcggctgcggaccgtggtggcttctgctcgccctccgtttcgggttctggttattgacgttcgcgggggttctacagtctgcgcctgcggatcgatatggcctcttctgatgtccactacctctgcttcgtcggcggcctcgcctgggccacggacgaccactcactccacaacgccttcagcacctacggcgacgtcctcgagtccaacatcatcctcgatcgggacacgcagatgtcccgctgcttcggcttcgtcaccttc

SEQ ID NO: 110349 - DNA, 176 bp, Zea mays
  Clone ID: MRT4577_32131C.1
agctggtacgagctcgatcactagtacgccgcagtggctggattcggacgaggctgcattgcatctactgacctggcctccgcatttcaacagccgacgagctagagctagagagcggcagcacctccctctaaaggacagggggagacgttttttttaaggggggggggaaaaca

SEQ ID NO: 110350 - DNA, 1631 bp, Zea mays
  Clone ID: MRT4577_32132C.1
ggacgaactcaggaggcggcgcggtcatgggatcctgcttctcgttggagggaggccgcagtgaaagcatagcgcccgcgcagaggtcgcagatcccggaggatgagcaggtcgagcctaccgttacgagcgagctggccatcccagtcccagaggtggcagaatcagtggtcatgttggaggcccttcgtactggcttcatcacagaccaacgtccagagaggcacattcgtgtcaggagtttcacctatgatgaggtgtgtgcggcgacacatggcttcgaagtagatcgtttcctgggacagggtgggttcggccaagtgtacaggggttttcttgaaagcaccaatcaggaggtggctataaagaggcttgatcttcaaggacaacaagggcacagggaattcgttactgaagttctgatcttgagcaatgtgcaccacccgaatcttgtaaagctcgttggacattgcactagtcatgatcagaggattttagtttatgagtatatgcctttgggttcgctaaacagtcacatccatgatcttccccctggccagcagcctcttgactggagtacaagaattaagatactgcttggtgctgctaaaggtcttgagcatttgcatcacaatctcaaccctcctgtcatcaatcgtgatgtgaaatgtgcaaacattttgctcggagcggggtaccacccgaagctgtctgacttcggcttggcaaagctaggtccaactggtgacaacacccatgtttcaacaagagttatgggtacacctggttattgcgcgccagagtacttgatgactggtaaattgacagtaaagacagatatttacagctttggtgtagttatgttggaggttctcaccggaagaatggctagagacgaaagacttcctgaatccgagcgaaaccttgtcgcatgggctctcaactttctccgcagacgggaactggacaatctgctagatccggcactgcggggtcagtgcccccaggcttgtttggagcatgccttttttgttgtttcacgctgtatcagtgaatcacccaatactagaccatccatgcgagatgttgtcgcctctctcactgtgatctcagaattcagaaacagaaacacaaggcggttggagcgtggcgggcgcagcacaccaacaagaactcctgatcggaaccaccggggcgacgatcagggagaaggaagctgaggaatcagtgcatagcaaaacaatggtgatcttctgttgctgtatttttttatgatggtcggttactgcctgtctgggagcaaggaagttgtaatgcctgttcaaatgatatggttcaattgcagggaagtacatggtcatgcagaagatttttttccctgttagggctagtttgggaacttcattttccaaagtgatttttattttctcaagtaaaaataaactattttttcttaggaaaatggaaatcccttgtaaaatgggttctcaaactaggcattaaagtctgtagataacaggtgtaaactcttgttgtgtttgttggggctcagtcttctcagacgttctgtttgcatgttgtattattgacgaggctatgtttaaaccaatggagatggtttgtttcccttg

SEQ ID NO: 110351 - DNA, 326 bp, Zea mays
  Clone ID: MRT4577_32133C.1
aacggtatatgtcatgtattaggtcacctatattgaaaccaatggccaatgtactacaacgtggtgaatggcaaaacgattgggaaaaccatgttaatacccttgtaaaacatcttgctttacatagctgttttaatagctaagaggatagcaaagatggcccttccgaacagttttgcaaactgaatggcaaatggaatgggcaatggaacgggccattaagcgcggcattagtggcggttactgtcatggttaccggtacagtgaccagtgcactagcgagcgctctattggctgtttttttttcttttttcgctacgtttgtc

SEQ ID NO: 110352 - DNA, 1287 bp, Zea mays
  Clone ID: MRT4577_32134C.1
atgggatcctgcttctcgttggagggaggccgcagtgaaagcatagcgcccgcgcagaggtcgcagatcccggaggatgagcaggtcgagcctaccgttacgagcgagctggccatcccagtcccagcttcagtaccaaccagtgctgctggagatgtcattgaaaagtttgtgttttttttggtcattagtcatcggttcgctgcccaggtggcagaatcagtggtcatgttggaggcccttcgtactggcttcatcacagaccaacgtccagagaggcacattcgtgtcaggagtttcacctatgatgaggtgtgtgcggcgacacatggcttcgaagtagatcgtttcctgggacagggtgggttcggccaagtgtacaggggttttcttgaaagcaccaatcaggtgcctggacaggaggtggctataaagaggcttgatcttcaaggacaacaagggcacagggaattcgttactgaagttctgatcttgagcaatgtgcaccacccgaatcttgtaaagctcgttggacattgcactagtcatgatcagaggattttagtttatgagtatatgcctttgggttcgctaaacagtcacatccatgatcttccccctggccagcagcctcttgactggagtacaagaattaagatactgcttggtgctgctaaaggtcttgagcatttgcatcacaatctcaaccctcctgtcatcaatcgtgatgtgaaatgtgcaaacattttgctcggagcggggtaccacccgaagctgtctgacttcggcttggcaaagctaggtccaactggtgacaacacccatgtttcaacaagagttatgggtacacctggttattgcgcgccagagtacttgatgactggtaaattgacagtaaagacagatatttacagctttggtgtagttatgttggaggttctcaccggaagaatggctagagacgaaagacttcctgaatccgagcgaaaccttgtcgcatgggctctcaactttctccgcagacgggaactggacaatctgctagatccggcactgcggggtcagtgcccccaggcttgtttggagcatgccttttttgttgtttcacgctgtatcagtgaatcacccaatacgagaccatccatgcgagatgttgtcgcctctctcactgtgatctcagaattcagaaacagaaacacaaggcggttggagcgtggcgggcgcagcacaccaacaagaactcctgatcggaaccaccggggcgacgatcagggagaaggaagctga

SEQ ID NO: 110353 - DNA, 337 bp, Zea mays
  Clone ID: MRT4577_32135C.1
gtcacacatactcaccatgtggtgtgtcagcttgtttcctttggttccgcactacactaggaggagttcttccagtttgccgatgcatccttatatgccagtcaccacttggtatcatccatatttcatactgtaaacgagtaagaaaaaataatccactactagagttcactactaattaatactaatcttattatttgaaaatttgacatcgaaatttgttcctttctatacattatttgtacgaagtattagctactagcgacactaaacaattcacaagtgctcacgcatagcatatattctattttttagcattcacaaaagaaagctcttt

SEQ ID NO: 110354 - DNA, 727 bp, Zea mays
  unsure (1)..(727): unsure at all n locations
  Clone ID: MRT4577_32136C.1
ctcgagccggcgggatccttacgcagcatccagatccacctctctctctctctctctctctctctctctcggtagtccgatccaccaaaccatgtcgggcagccaggtcggcggcggcgggctgcgagggtggagccctttcgacgtgatccgcagcttcccgtcgacgcccgagtcgctaatgtcgcagatcgacgcggccatcgtctccaccgagtacgcccgcgcctgcgccctcctcgacccctcccaagtctcagcctcgtcgccgcccgagatcgatcccgagggccagggggaccggggagcctcccctctgcctccggcctgctacgacgcgagggtcgcggacgaggcgtaccgcgcggcgtgcgcggcgctgggagcgggacggcccgacgccgccgtgcggtcgctgcgggcggcgctggcgagctgcccgccggacaaggccgcggctgtggccaaggtgaggtccatgctggccatcgcgtcagcgcagctgcacaagcagcagcaccaggcccagcagcagcagagcaggaactgaggccgtcctacttcgccatagctgctgcaatctattgatgcaattattactgcgatgttttattaggccatgatcagacgcaataaaccgttcagattaatgcaaaaaaaaaaaagaaaaaaaaaaaaaaaaaagcggncgcttttttttttttttttttgttttttagatgagcaa

SEQ ID NO: 110355 - DNA, 269 bp, Zea mays
  Clone ID: MRT4577_32137C.1
ataagatgttatcatgttaaactaaaagcatatgcaacttacttctgctatctcatcccaaatttcatctgttgtgtcaattatccatgcatgattgttcggagaaacaccacttcgatcctgtgtccatcttgttgtagtttttttcgtgattcttagtgtcgtcaggttcagagtttcagttagcgagtctgtcagttcttcaatgtttcgtttcagagtcgttgagtcagtcgcaattgctgtaaatatggagccgtgtgtggtga

SEQ ID NO: 110356 - DNA, 573 bp, Zea mays
  Clone ID: MRT4577_32139C.1
gcacgaggccgccggcgctggaccccccgccggtccctcgcggcacaggcgagatcaggcgacattgcgtccctggcggctgggagcccgatggtggcagggctcatgaacgaacggctcaaggccctcaccacctcctttgcgcagcagatgggcagggagttccactactgcatcaagaacatggaccgggagtggaacactgccttcaatttctcttccgatcccgccttcctgacagcctgcatgaaggaaaccgacggtgacctaccgcagcgcgtgtgcacggccgcagagatgaagttctacttcgagagcttcctcgaaggcaacggaaggaagaactacgtgagaccgaacaagaactgcaaccttacttcatggatcgacgggtgtgagcctggatggtcctgcagcgccggcaaggaccaggaggtcaacttaaaagacgccgccaacatcccgtccagaacccttgactgccgaggttgctgtgctggcttcttttgccctcatgggctcacttgcatgataccatgtcctctgggagcctactgccctcagtccactctg

SEQ ID NO: 110357 - DNA, 1525 bp, Zea mays
  Clone ID: MRT4577_3213C.1
cctcgaggccggccgggttgcttttgtctctgggtgtgcttatatagtcattacaaactctcaagtctcctgctattggatgttagctcaattggttgaatcattctaagttgccatgtttatgagtacttcatactaaatatcctcttgttttgtttcttaagcttatgattcttcaattgttgtctcatgttactctctgcttggcggaactctatgcaacaagaaaccagtaactgtcctactatactctttccatcgatagagcaatggcagtgagcctgttgtgtctttttttcttgttcaagcagacaagcacagcaattatgttctagcctaagtgcctgtattggcttattgtttgttcaacaacagagcaaactgttttttcagtggaaacaagtgcatattatattaccaatcagaatagcaatatattgaatcacttcttatggtttgattaatctgtaaactggccacagttcctcggaacttcaggctcctagaagagcttgaacgtggagagaagggcattggagatgggacagtgagctatggaatggatgacgcagatgacatctacatgcgatcatggactggcactattattggccctcataataccgtccatgagggtcgcatctaccagctgaagttgttctgcgacaaggactaccctgagaagccaccatcagttcgatttcattcaagaataaacttaacatgcgttaatcatgaaactggagtggttgacccgaagaagttcagcgttctgggtaactggcagcgtgattactcaatggaatacatcctaacccatctcaagaaagagatgacatcgccacagaaccgcaagctagttcagcctccggaagggacattcttctaaagatggcagcaactcatgtccatccatggtgactcggaaacagcttccgcacctggtttctatattttatatatttagtctgatctcccagttatctgtgaaccaccgagatcgagtgcaagcagacttggttgatttacaatttgcccggtggttgctaatgatatgggatgaaacggttgccggtttggctgctaaaaaaaaaaaaaaaaaaaaaaaaaaaagggcggccgcgctggtgctgccggacgtcgcggaggccgcgcagtccggcgggctcacgccgtcgctcaagaacttcctcctcagcatcgtgtccggtggggtcgtgctcgttggtattgtcggcgccgtcgtcgccgtctccaacttcgaccccgtcaagagggcctgatcggaatccatcgtatcgatcgtctcgcctgtgtcctgtcctgtgcctgtgctgtctgtatcgactggtggtgctatatcccctgtgtgttaattgattttggagaatgttcagacgtatatctatgtctaagaaatggagttcgagtcaaactttgctgagacttctcttgtctatataatattattagtaggaatcaaaaaaaaaaaaaaaaaaactcgagactagtctcttcctcgtgc

SEQ ID NO: 110358 - DNA, 749 bp, Zea mays
  Clone ID: MRT4577_32140C.1
acccctccaaacctggggcgggcttcttaaaacttgcttcaatggagttaatgctctctcagcgttgggatattatctattccatatgcattgtctcagggggatggctgagcttacttatcttcttaaccatagcaatcatctgtttctacactggtattctcctgcggaggtgtgtagactcgagttcgcttgttaagacctatcctgatatcggtgagctagcttttgggcggaaaggaaaaatcatagtagcaatattcttgtacctagagctgtatcttgtggctattgatttcttgatattagaaggtgacaacttcccacgattatttccaaatgctaacttccatgtggccgggctgaaggttggaagcaagcaagggtttgtgttgatgttcagtctacttgttttaccaacaacatggcttcagagcttgaacatgcttgcatatgtcgcccttggtggagtcatggcttctgtcattttaatcgcctctgttctgtgggttgggacatttgatggggttgggttttcataagaaaggtgtgcctgtggactggactggcatgccaactgccatgagcttatatgcgttctgcttcattggccatgctctttttcttatgatatacacttggcatgaggaacataaaaacgttccccaacagagttactcatctgcttcattttctgcactcttagctattgcctcacaggtgttattggatacttgatgtttgggaaa

SEQ ID NO: 110359 - DNA, 538 bp, Zea mays
  unsure (1)..(538): unsure at all n locations
  Clone ID: MRT4577_32141C.1
cgggcgctgcgcggaggagaggtcgtgctaccagtgagcagccaagtagctctggcaaacctttctccctactctcagcaacaacaatttcttccattcaaccaactgtgtacactgagccctgcggcgtatttacaacaacaacaactactaccattcagcgggggggcggactgtttattttcancagcaacaatttcttccatttaaccaattggggcggctgagacccctctgcgtatttccaggagcaaatactactaccatttgggcagctagctacaacaaggcccacttcctttttgagacaacaacaattggttccgtgctaccagcgggttgtggggaaccccgcgaccctcttacaactgcgacaggtgcgtggctttgtgcaacttgcgttgagaaacccaggaggcttctaccaacaacacatcattgggggggccatcttttagagtgcgtattaggtgtgattcaataatgagatgttttgggggaggggatggggctcctanaaataagaagtgacatttcc

SEQ ID NO: 110360 - DNA, 543 bp, Zea mays
  Clone ID: MRT4577_32142C.1
gccggccgattttcgagaactataaaatgccacctcccgtctagctcctgaacattttctacttccgcgacaactaccacgccgaggccagattcacgatggactcctccgtgatggggaaccctttgctcgcgtcctcatcctcatgggcctcctcgacgcctggtgcttcctctacctcttccgcgcgtacgaccagcctgtcgccctcttctgccgagtcttctccgaccgcgagaagctgatgaaggtcgtctacgcgtacttcgtcctgctgttcttcacctccatctcgtcgctgatcatctacagcttgctcgtcagggtctgcctctccgcggtacacgtggcgttcaccgtgccagagtacctcttcctcgacgagaccaacttgtgccccggcaacaccacgagccaattgctgatctcattccttgccgcaccctcatctagcggttgatgctccgcactatcagatctgatctactgccttagaagatggttcgatagatgcacacggttctgagaagagcagcaaattca

SEQ ID NO: 110361 - DNA, 272 bp, Zea mays
  Clone ID: MRT4577_32143C.1
gactgttcacagacctcagtgatgtgagcactgttgctcaggagtgacaagttgctaatatgcagaagggatgggtgatacttcttgcttctcatgatgcatgtttctgtatgttaatgacttgttgggtagctattaatgtactagagttgatacatgtgtacagggtccttttgcaataaaactggttatgacttgatcccagtgtttaacaattggggctgttaagtctgaccatacatcactgtgatagaatgtgggcttgttcaagg

SEQ ID NO: 110362 - DNA, 347 bp, Zea mays
  Clone ID: MRT4577_32144C.1
gggccattccaagctgggggattagcaaaccacaggggttacaagaaaataaagggcccaacgatggcattcaaacaggaaggcaacaaacattgcacccaaatgggcgttataccggagcattccaaacattaaaggccccctatatatggaaaccatcactttagcaaatcccaaaaacagaagttaaaagggccccagctttgccgggggagcattttttatggggcaaaaaaaaaggaacattccccggtggggagggcgattcaacttcctatttcccagcggggggacaggaaaaccagagaacacccccatgctttaggggccccccccctcccaaatgc

SEQ ID NO: 110363 - DNA, 427 bp, Zea mays
  Clone ID: MRT4577_32145C.1
acaggaaaataaagggcccaacgatgtcattcaaacaggaatgcaacagacattgcccccaaaggggggttataccggagcattccaaacattcaaggccccctatatatcgaaaccatcactttagcaaatcccacaaacagaagttaaaagggccccagctttgccgggggagcattttttatggggcagaaaaaaaggatacattccccggttgggagggcgattcagcttcctatttcccaggtgggggacaggaaaaccagagaacactcccatgctttaagggccccacccctcccaaatgccttgaagaaaggctgcttactggggcgcgcactgaactttttgggctccccccgggattttggcgtcctcctcgaacccctcctggggagggggagcttgcttcctgcgcattttttcc

SEQ ID NO: 110364 - DNA, 358 bp, Zea mays
  Clone ID: MRT4577_32146C.1
cttcgatcaacaagtgctcttttaattggtgcacaaaaaaaataaactaatacaaacacgggggagggaagaaagagcgcgtctataattcatcgcttatgaccaaccgtcgggtccatagcaaaccaaccctgcatgcggggccagcttattatatataatatctgaggtggagcatatctatctggctgtgtactggaggcaggcatagaacgccgcctgcgcgtttcttctataacacatatcggcccatccctgcgtgtgcgcacgttaccgtcgtgtcgaaccatgccctacgaggctccatggaacatcgatgggtggcttctatattagaacatgtttaaataaacgctat

SEQ ID NO: 110365 - DNA, 220 bp, Zea mays
  Clone ID: MRT4577_32147C.1
atggcgcccctggctttaaaggcaagccgcgcagcagcccctgccctctaccacctcgcctcctgcttgctccctgctcggagcagcagcctcccatggcgcccttgctccattgccgcgccccgtctctttgctgctcgccatccatggacgtctactcccccatggcaccttgatctgtagctctagtgctccaaatggattcaaatttttacagtag

SEQ ID NO: 110366 - DNA, 411 bp, Zea mays
  Clone ID: MRT4577_32148C.1
aaggggcaaaaaggctccttctttaaccccacatcccaccaaccaaacaaagacggggtgcaggcagtgaaggccctggcaatggttaccccaaaaaaaaaaccccccgtttaattgtccagcttccccacttggtgaattgggggaagggcccccggttaaaacaaaaaccttaatgggaaaagggcttggttatttccaggcttaaaatactaacaaggacgcgtcaaccaaagggaaggattctttcgcttcctccatcatcaatatttcaaagtcccaagggtaaggattgtctttttggtccagggttcctttggattaaacaccacaaaaaaaaaaaatcccaaaccctgtttagttttaaaaagttttggcccccggcaagaaggctctccacggggagcccga

SEQ ID NO: 110367 - DNA, 367 bp, Zea mays
  Clone ID: MRT4577_32149C.1
gctcagtcttcggcgcgtggaagcgcggactgatcgccgggacgagcacattcgccggactcgagagtcgtgctgcaccaagaaagtgctcctagaccttattctcgtccggcactacgataagggcccgagcaccgggcgcaagcagctattgttggactacacggaggctcacacaaacgccttagtgctcctcggtggagctcgaggcagcgtgctggctgcgagtcactccgtcagcgtgtacatggccggagctctttcatgattgctaccacaacctggaggatgttatggaccatgataaaagcaaaggctgtctaggtaagtgaagttaccatggaattagtgccacaggcgaacatgc

SEQ ID NO: 110368 - DNA, 232 bp, Zea mays
  Clone ID: MRT4577_3214C.1
tacaagcctcgaccaccaacccagctcgctcgtcccagctgatcaggccgagcacctagtagcgacctgctcgatcatcagtgtacagtgtcggtaggtgtctgtctctcttgaaggctggttgcaacggacatggcgacgtcgcctcgtaggaagcccttgctgctgctgagcctggccatgctgatgtgctgctccttgggcctggcgagctcgaaccagcagctggaca

SEQ ID NO: 110369 - DNA, 404 bp, Zea mays
  Clone ID: MRT4577_32150C.1
gaaaaggggggggatttttatttcggccggtttttaccaatttttactgggccccggtttttaccttacaacccgtttggggaacccttttttttaggttgggaaactgatttttacaaatttacaattgggcctgacttctgaccaacttaaaaaaatgggaaaccctccagttttaaaatcaggggaaattaacccctttattcaaagccgttgagcccattatgacccctgaataaatttgcttggcaaatttttttcttttgggccccttaaacttttcaaatccatccatttgttggaactgggccatttggattgggttgtcctgccgggataaacttttaaaaacccggccgttttttagtaagttttggggaaactgaccaattttgttgcccttc

SEQ ID NO: 110370 - DNA, 374 bp, Zea mays
  Clone ID: MRT4577_32151C.1
atcaacactgacttcttgccagggggacagagcaggctttttcatcagaagcaaagggggctaccaactctcaccatactaggaaccaggccagcggtgcccaaaagcgctcaaacaagaaagaaaaaacagctttttaccagaggtgggtgaacaccatatacacataattccaatacacaactaacactgcgaatgtgacgcgaagcaaatccaaatgcccgcaatggttctccggactgggctccattttctacttattgttactgccccgaactagaaaaaggacagcggaacctggatggacacgctactggactttagggcggaaaacatctcggtgtagccgcgggactcgcgccactccaggaagg

SEQ ID NO: 110371 - DNA, 313 bp, Zea mays
  Clone ID: MRT4577_32152C.1
ggaaacccccggtcaataattggggcccaccgggcatttccaaggaaacaggagggggccgccaaaaaaaaaaagggccaaaaaaccccccccaaaccatcccaaaaaggcttcaaaccctaacccaaaatgggggcaaaacacacgtttccccaaaaaaagggcaaaaaaaaagcaggggccccccccttaaggctagtgggaaaggccctccaaaatccctttaaacaaaagttttggccccacagtggaaagggaatggcccgaacgggggaaggcggccgtacccccacccccgggttctggtttggga

SEQ ID NO: 110372 - DNA, 169 bp, Zea mays
  Clone ID: MRT4577_32153C.1
gaaaaaccctctctgtcgtatttacttagacacttctcatgagtgcccaatacaaatgcgacatgttaaacccacggatgaactactaataggccatagttgtgagggaccaggacttgtgatatattaagggttaggctcagcgtcttccttaccagtttaggtcgtg

SEQ ID NO: 110373 - DNA, 2568 bp, Zea mays
  Clone ID: MRT4577_32154C.1
atgaatgaagtgcaaatcaacaagaaggtgctctcagacgccaccaacatcgccgtcaccaaaggccttctcttccccaatgtcggccacaagtgcctcatagcaaaggacgacaaaaagaagaaggaaaaaataaaaataataacaagttacaaaaataccttcaacttgaaagaaggtaaaagtacaagtgtgacgcaaaagcagatgctcagtcagcgtgaacaattttttagcttcggccttaagagcacgttttcaacatttccgaagatgtctcaagataacaaagctatcaccgaaacaaagctgagcctttctaaagagaagaatcttgggtttcttgaatcgatagcaaagacgaatacagagaagaccactagggagattttagaaggtttatctgaggacactggtgaaagtgacaattatgatatggaaagcggagatgaagactccgaagatcgaccgcggcgacccagtcacacagtcttcggaaaatcgagtattaaacagagtcatctcgataacatgaggggaagatattttcgggacatgtctactgtgagggcagatgacggagagaggactgtgcctacccccaaagagaatgaagttgtgatcttccgaagcttttttaaagctgggcttcgatttccattaagcaaatttgtggttaaggttttaaagatctatcaagtctaccttcatcaaattactcccgaagcaatcataagaatgggaatcttcgtctgggccgtgaggagccagggcttggagccaaatgcaaaaagtttctgcaatatgcatgaactgttatatgagacgaaaccctggggcaaagagcaatatcataacaattttggctgttatagcttcgtcgctcgctctggctcgagctgtcccatgccaaccttccggaaaagatggcctggggactggatgaaggaatggttttacgtgaaaaacgatttaaaggcacgagaagacgttaaagatattatcatgcgtcctatctggcagcgcttcggccttcagaaaccgaatgtggaatttgatgaagcggccgaagaatgccaaaaggccttcgacatatgggaaatgcaaaaggaaactatcagcaagcctgacgaaggtggactggttatgttgaaatacaccttcagatacgagggtaagtttattgagccagatgatgattggctgaagtgcatcgaagctacaagcgacaaattgcttggaccatactcaaagacagaagataacgcgctatctgcaaccttcagaggccggaagaagaagaggctgaatagagttttcgatgctattgggtttatgtaccctgattaccgctacccgttgaaagggcaaaagagaaaaagcgcaacttctggaaaaggtgatgcttcggttgctctaagtgaggccgtgccaaagaggaaaagggtgaaggtccttactcaccgaccgcgcttcatcgaaccggcctcagtgcccgaatttggtggtgagacctctacgactactgaagccaaaggacctgctcttacacagaagaatgaagagtcgactgcaacgccgaaggctgaaaaaattggagagccaagagctgaagggacaaaaacatcagaaattttaagtccttcggcagaagttgaagtgccaaaaccccaaaaaggtccagcaatgacccccaaaaggaaaaggatgctgactgaaaaagaaaagcaagaagctcagctctatgcccaaaaattgaaatatccgaagggggcattgagtttcaacggcagcggagaagaagacttcttatattgtctcccagacagcaaggagatctctgtctgccgggagatgggaagaagcttcggattcccgtcgttagaagacgggctcccagtgttatcaaaagataaattggccgacagcttagcatacaacaactttaagggccttattcttagcaacgccctcagggcgcaaaaaagcgctgaagacgagggatataccatggccttgaataaccttcgttctgaagtaattgaactaagaaacgaaggtcttgaaaaagacaaaatattaaactcattgataaacaagataaaagaagacgaggctacttcaaaagcccaagctgagacccaaaaacgcgaaattgaaaatcttcggaaacagccggcagaagaaaaattaaaatgtgcaattgccgaagctgaccgagatgccagtgattactggaaaaatcattgggagaaaacaactgcagaacttcggtcttcaaaagaaagatgttatgaaaaatccatagagtgcgtgggaaaagttaagactaggttcgccagcgtcggcgcatattcaaatgaagacaacttcgtattgggcgatcccgaaggtccaatcgactggatcaacggcgaagccaaagcttttgaggaagttttgagtggccatggagatgtctgtgtcttcttaggtgccaggggaattgcagctattttggagaaggcaggatgcgaacatggaagattctggcccaagccgaagctgcgttctctgttgaagatataa

SEQ ID NO: 110374 - DNA, 378 bp, Zea mays
  Clone ID: MRT4577_32155C.1
atggagatatgggagatcatcgagcccggtggcgctagcatgaagcgcgctcatgatcgacaagcattgggcgctctcttgcgttctgtgccaagggagatgtgggtgacattggggagtaagaagacagttaaagaggtgtgggaggtggtaaaaaacatgtgtggggttggtcacgtaaaggaagcccatgcccaacgcctgttgcaggagttcgagaatatctcctccaaggatggcgagcttgtagatgacttcacactacataccaatgtgctggtggaggcgtgggctcagggaaatgtcaatgacacatgttgtgaagaagatgttacgcatgctcccgaagcactactcctagatcgtggtctcgattga

SEQ ID NO: 110375 - DNA, 2069 bp, Zea mays
  Clone ID: MRT4577_32156C.1
attgaatcatttctattttattactatgaagaaataggaatgatatcatattacaagtgtaccttcggcttgaggaaaggtaaagagtacaagcgtgacgcaaaagcaaatgccaagtcagcgtaaacagtactggagcactgttcatctatttataggcacgggacgcagcccatgtaaaattacactcatgctctttacatttgctaataattctatagtaatccatcggggtctagatagccttttcctctttaagtcggtttccttttctgttatcatgccgaagctcccttgcgcacagcttcagcttcgttccattcttcgtatcccttgtgcttcttctcactgtgattttgactcaagcccgaagggtccgagttcgaaggtacctgctcatgtattatactccagaaacattgttaaatcatgtttttgaggaccttcggaagtcgaaggtccccaacagtagcccctcgcaatattaatttgttagaatgataaattcagattgcgatatggacgaaggccttaagccgaaggtccgaaaaaacaccttccctatgctagaatagcatcaatcaatgacaagcggggccctcccacttgcaacgcgctaggcgtataaataagagcacactgtgagcacatttggcacgcttccttgccatctgctcttgctttcgcaaattttagttcttgcataccaacgcttgcctgactttttagaatttttagcttcggccttaagagctcgttttcaacatttccgaagatgtctcaggataacaaagctgccgccgaaacaaagctgagcctttctgaggagaagaatcttgggtttcttgaatcaatagcaaagactaatacagagaagattactagggagattttagaaggtttatctgaagacagcggtgatagtgacagttatgacgtggagagtgggggtaaagactccgaagatcgaccgtggcgaccaagtcacaaagtcttcggaaaatcgagtattaaacagagtcatctcgataacatgagggggagatattttcgggacatgtctactgtgagggcagatgacggagagaggactgtgcttactcccgaagagaatgaagttgtgatcttccgaaacttttttaaagctgggcttcggttccccttaagcaaatttgtggttgaggttttaaagatctatcaggtctaccttcatcaaattactcccgtagctatcacaagaatgagaatctttgtctgggtcgtgaggaaccagggcttggagccaaatgcaaaaagtttctgcaatgtgcatgaactgttatatgagacgaaaccctagggcaaagagcaatatcataacaattttggctgctatagcttcgtcgctcgctctggctcgagctgtcccgtgccaacattccagaaaagatggcctggggactggatgaaggaatggttttacgtgaaaaacgatttaaaggcacgagaagacgttaaagatattatcatgcgtcctatctggcagcgcttcggccttcggaagccgaaggtggaaattgatgaagcagccgaagaatgccaaaaggctttcggcatagtctgttctttcatcgggacgagggatttagtccaggagcacatagccttcagagtgtgtccacttgtagagcaatgggaaatgccaaaggaaactataagcaagtctgacgaaggtggactggttagattgaaatacaccttcagatacgagggtaagtttattgagccagatgatgattggttgaagtgcatcgaagctacaagcaacagactgcttggaccatattcaaaggtagaagataacacgctatctgcgaccttcggaggccggaagaagaagaggctgaatagagtttttgatgctattgggtttatgtaccctaattaccgctacccgctgaaagggcaaaagagaaaaagcgcaacttctggaaaaggtgatgctgtagttgctctgagtgaggccgcaccaaagaggaaaaagatgaaggtccttactcaccgaccgcacttcatcgaaccggcctcag

SEQ ID NO: 110376 - DNA, 273 bp, Zea mays
  Clone ID: MRT4577_32157C.1
cgctactacttcgcgtataaccctattctagcgacgaaagccacttacctggaactttactacccgttctctacgagtcgctagacaccatcacagtatccatggataccaagtcatcaaaccctcgcctgaccactgagtcactcagtctttccagcggcagcaatttttcaactcgccccgcttccgtcgtctcaactccgactttggaggctcgcgagtttattggcggcgtcccgcccaaagtctcgacaaaccctctgctgcgagagt

SEQ ID NO: 110377 - DNA, 672 bp, Zea mays
  unsure (1)..(672): unsure at all n locations
  Clone ID: MRT4577_32158C.1
cggacgcgtggggaaacggaaggagttagttgataaggcgcgagcaaagcagttgcagccccatgagtacaactctgattttttgcctcatacacaaatatgaatatgtagcacattgttgtatagcttttctaatgctctgaataagatgtggtggtacagtgcagaataatatgttctgttttttattcaactattcaaatcttattttttattcagctattcaaatcatatttttttgattagctgattgccggagagattaaaatcaaaggggttgagctgcaggagagttgcagtttgtcgttcttttccatggtaggcattttcattgggttcatacaattattctttgtcgacgtttacaagaaaatagtatctaaaaacaagatgcttttgttccatgagggtgtgattgagactgaaacggtgggtacaagagtgaaggagtcggaggcagttgtagtagagaaagaggtcgaactaatagatgagcctcagattcattagagccctccagttccttcattgttggatgatgagngtggattttgcttaatcgtcacttgctattagagaatccgacattcccgtgaaaaagtgctgataatcgtgacatcacttctgttcggccacacaaccatattacttgaatagctagcccatgttttg

SEQ ID NO: 110378 - DNA, 362 bp, Zea mays
  unsure (1)..(362): unsure at all n locations
  Clone ID: MRT4577_32159C.1
ttcttgncgcgtgggcggccgcctgggcgggggcgtggggggagaaaaaaaaaaaaaaaagaggggggggaaaaaaaaaaaaaaaaaaaaaaaaaaggagaggcgaaataattatggaagcctacttggtgtccgcttttttgatgcaccccgttttcttttcttttttgcttccctaaatatcattttttgggggggggggggtggcaactactttaactcaaccttaccttttccgtntcctcccttttttatcctcgttgcttttcctccttttttcggctggtgttttccccccgtggcgccgggtgatcttttttcttgacggctgttccgccttcttgttggcctggcgctccccc

SEQ ID NO: 110379 - DNA, 380 bp, Zea mays
  Clone ID: MRT4577_3215C.1
cgtgaaggcatacttcttgtatagtgtaacctacatgcaattgactgcgcgcaggcttacaaacatcgggactgcgaaaaccctggagttaccgaacataaccggcgcggaaacatgccactcttgacctatggcgtgtctctgagaggcccctaccgatcgggcttgccaacacattgccatcctgaaaggcgaataggactcgccctggagcggctcattaatgcgctgcagaagtggtggttactcgcagcgacacctgttcacttgtcacctgcctaacgtccgctagtttcgctttaatacccttatttgttgtcacgatcaccggcttttcccgtcgaacttttaatcgggggctacccatagggttccgactc

SEQ ID NO: 110380 - DNA, 1014 bp, Zea mays
  unsure (1)..(1014): unsure at all n locations
  Clone ID: MRT4577_32160C.1
cctcgagccggccgggatatgaactccattggctaaatgacatggatttgtttggcatgcccacagggaggggtccaccatgacagtaaaacaaatgacaggggagaatcttaaatcccctcctccaccccctcctgcctcaccagatttgatacacatgcaaatcctgctggctgttgcttctcagcagggccaaaatccgttcctttggcctagcagtagctaccactaccaggagaccgtcttctttccccccccccccccccctcccctcctgtgagaggtgcccaacagcttcgtcagaggaatcagcacttcagcggagacacacagtccaggccatcgaactgatacttgtgtggtggcgcgggcagagatcaagatggagaaggaacacatcaagatggccatgctgaggcaagaacagacattcagacagcaggttcacgagctgcaccgcgtgtaccaggttcagaagcagctgatgatgcagatgcagattgccaagacaaacagctacggaaacgaagctgctgaaaggcaaaccaaaccgacagaaaaactcgagcaccgacagtggtgtggtagctcaggcaagacggaggccaagctggccgaagacttcagcctggagctgacactggcaactggggctggaaggaggggggaggaggagaagccatccaactcagactccgaagcaacaatgtcgtcatcgacatctgcagagtcagagccagggcaggggttcgcgcccaagtccgatgtaacaaacctaaggttccagaatgagagcagtaggcatgatgctcaggtcttgcagtctccttggcgataccaatgtttaagtctcaagatggcgtgaaggggttaggttgggttggcatggcatgggtgtaccccaggctcaacaanacaagtgcattgctgcatgcatgtatgnatgnatattacgatttcactgcaactgtaggagcgagctcaaaagagcaaatggagcattttatggggaat

SEQ ID NO: 110381 - DNA, 529 bp, Zea mays
  Clone ID: MRT4577_32161C.1
gctcgtcctcctcctactcctcctggccagcactacacggctcatcacaccgagaaagaacaagcagcacgacaccgggagctgaaaaccaccatgagcaggaggagtcacacccggtcaaacttgcacacacgcgcgcacacacacatggcgacacacgagaggaaacagatggcgggagcggaggcggaaggagtcctccgccgtgggcttggaggactacctgccggtgatggcggaggggttggtcgaggacaggctgatgcgggagctggagagcgggttcctgctgctgatggacccggggcgcgggctgatgaccttccacaggctccggcgcaacacgccgctgatgggcctgggcggcatgtcggacgccgacctgcgcgggatgctcgacgagggccacttcgacaggcacggcgcgctcaactagacggagtactgcgtgctcatggagcgcctgatccgcgagctcatggacgagcccaggccgtggctcgtcgacgacgtcaaccagggggtccgc

SEQ ID NO: 110382 - DNA, 162 bp, Zea mays
  Clone ID: MRT4577_32162C.1
gccgtaatgttgaacaggattggagtattttctttataatttcttggacagcgaaatgtaagcttatgatagaatgcatgtattctgcgttatctttggaacatcagcaccagtatattgctggcagctattgtattaagaaatacagtatattgtcactat

SEQ ID NO: 110383 - DNA, 246 bp, Zea mays
  Clone ID: MRT4577_32163C.1
gcccaattcccatctggggaacaatttaaggggggggttcccaggaccaatgccttggattgggcttactccaaaccaacgcgggcgaaaaatattcccccctaacagcgatttgcattgaagaccccccaaaaagaagccggggggttcgacatttgggatcattacaccgagccttgaacacaacccaccccctatacaaactttgggaaaaaacagggggggggtacaccggcctttccgggg

SEQ ID NO: 110384 - DNA, 909 bp, Zea mays
  Clone ID: MRT4577_32164C.1
aaactgaacttacgaactttatatagagctgattatactctttttccttctaacaaaatgatttataaacgaggtagtcattgcatagctgtggtaactttaatctctactaactattaagacaatagtgtagaccattttctatgcccccgcctcccgctctgcgcaagccccatatccccgcgaaagctgcaactgcctcccccgctgcgacgtgggcagggagggtcagaactttgggtggcaggtctgtgctcatgggcagacgacatcgcagcgaccgaaggttacgagtagcgagacgagaagtcgaagtccaggcatccagggcctcccttgcttccgccggcgtcgcagagcggagacacttacgcgcgctcgaggtcgtcgggatcgggatccccgcggcggctcctgcggcagccgcgacggcgagcagggccagcgccgccacgccgatccccggggcacaccgcccacgccacatcccctacgcagcccacgcgtaaccaggtctcctcgacccagatctatgccccggcccgtccttctcgcggcccacacgagccgcaaaaccaattcggtcgcaaatgaggcacggaagcagagagggacagaaggggacgtgctcacgcgtgaggaagtaggagacggcgaagatgcagagcgcccaccagacggtgcgcagttttgcctcctcgatcagatcgtcgacgctctccatcctcttccgcatctcggcctgcgcgcgcgccacggcgcggcccggcccgtgggaggcggcgagggatccggtgggaccgattaacggatgtggaatccccgtaacgagctccgccttcgccggagaagaaggccgtgccgggcagtgccggcggcgactcgcctccacggcgatttttctttctg

SEQ ID NO: 110385 - DNA, 296 bp, Zea mays
  Clone ID: MRT4577_32165C.1
atgaggaaagttggcacgctctgtagagttccgatcctgtatagcggggctcgactccacgctgtccggccaccaccgttctgtgctgtctgtcgctctcgaccagggcacaggagggcagtgaggcccgctgaacgatcctctcttggtatggcgatcttcccctggtgcttcgcgtacggcatgaaagctgatttcacgagaacgtggcgtacgtaatgacacgagctggtcggtggtggacaaggccaagacgcgccgcgtgctcagactgatgaatacgtcaaggtgggcta

SEQ ID NO: 110386 - DNA, 740 bp, Zea mays
  Clone ID: MRT4577_32166C.1
tatccccatttgtccgtcgccagtagccacagaatccatcgccagagccaagagagagagacagagtactacactccacacgcccgccgttccatttcgctccgccctcccgccttgtcccgttgctgcgttcccgccggctcgccgggaagagcagttcgccgccgttgaagcaccctcctcggtcgctcgccgccatgaagaaggttgtgctcaagctggacgtccacgacgacaggcacaagggcaaggcgctcaagggcgtctccggtctccacggcatcgaccagctgggcgtggacatgaaggagcagaagatgaccatcgtgggcaccgtcgaccccgtagccgtcgtcggcaagctgcgcaagctcttcccgggcgtgcagatcgtctccgtcggcccggccaaggaggagaagaaggacgacaagaaggacggcggaggggacaagaagcccgccggagacaagaaggagggcgacaagaaggacggcggcggcgacaagaaagacggggccaagaaggacggcggcgacaagaagcagcaggaggcgaagcacccatggccgtgtacccgccctacggctacgcgcactacgggtacccgccgccgccgccgccgccgccgcgctacttcgtccgcagccgccgaggaggaccccaactcgtgcatcatctgctgatcggcacgcgccgtcgccgcccgtcccttgtaaattttcgtcgccgtcctgcct

SEQ ID NO: 110387 - DNA, 347 bp, Zea mays
  Clone ID: MRT4577_32167C.1
actcctatgggcgattgggaccctcgaggccggccggggcaacatgtacttcgtcaacctggagcgcggcctcggactgctcagcaccgacgaggagctgtggacggacccccgcaccaagcccctggtgcagctctacgcgtccaaccccactgccttcttcaccgacttcggccgcgccatggagaagctcagcttgttcggcgtcaagaccggcgccgacggcgaggtcaggcggcgctgcgacgcgtacaacagcggccccgacgttggcggcgccatgcctatggctatgcccatgcccaagatgtgacgctgcgcgcgctacaagtacaacgacggcggcc

SEQ ID NO: 110388 - DNA, 214 bp, Zea mays
  Clone ID: MRT4577_32168C.1
tgggggtttttttagcatttttttggggaatcccacaaacgatgtgccaacaaacccagcatttaacctaagattattgtgtgtacaaccagaagacaacacttgacagctggaagatgcgcaacaacaactttcagtgataaagctaacactcctatgacgatgatgcactgtgtaatgtcataagcaaaagacattgaatagagaataaact

SEQ ID NO: 110389 - DNA, 500 bp, Zea mays
  unsure (1)..(500): unsure at all n locations
  Clone ID: MRT4577_32169C.1
ggcgcagccgcagccgcagccgcngcnnnncgnncgncnncaacccacgcgagggcgaaacccacaaacccncnccctcccgnaccccggcccacacacccaggggcgaagacgcngggnagcnccggcgccgngacgagcgncgncgnnccccgaaaccccaggcnaggagaggagcncgagcgnggagagaagggcacnggnganggaacagngagcnanggaagggangangccgangacancnacangcggncanggaccggnaccancannggcccncacaanacngnacangagggncgcancnaccagcngaagnngnnnngngacaaggaccanccggagaagccaccancngncagannccacncaagaancaacangacangcgnnaancacgagaacaggaaggnnganccaaggaagnnnggnnngcnagcgaacnggcagcgggaccacacngaggagaacanccncacccagcncaagaaaagaga

SEQ ID NO: 110390 - DNA, 308 bp, Zea mays
  Clone ID: MRT4577_3216C.1
ttcggcacaaggcgccctctccctctgcggcgtataagaagcgacccacggccaccgccacggcctcgccggaatatcatacgaaaaccctcgcggcggggagagcgctctccctcccacacactcgcgccgcagcatccgcagtccgcacctgcctgcctccacgacttgtcgtgctcgtgcgctactctcctcgagtgcggcgcgggagcacggggacatctaatggcggccgcggcggagatcggtggtttcacggcggccgcgctcatgccggttgcgcacccagccccggcggcggcgcctag

SEQ ID NO: 110391 - DNA, 2121 bp, Zea mays
  Clone ID: MRT4577_32170C.1
acataatcaacttcagaacttgaaggcattgcaaaaagaatggttgataccttttacaaaaacctgcctcaatcaaattacttggatcctcaggaaagcatgtacggtgaagagcttctgtcaatggccagcagtatccttgtgcagctatactggcgcaccagggatttaggatacctacttgaagcaattttgatactggagtttggattgactgtgcgcaagtatgtctggcaatacaaggttactctggtccatctgtactcttacctgggggcacttcctttggcacataaatggtacacaaccttggaagtgaaaaacattcttctagagtctgttttgcatcacatcttgccacaaatgttaaattctcccttcttgcaacaaactgctgatcttgttaaggattatttgaaatttatggatgatcatttgaaagaatctgctgatcttacatgtctcgcatatagacaccgtacttactcaaaggtaattgagtttgttcaatttaaagaccgcttgcatcactccatgcaatatctttctgcaaaatcagattctgttatgctacatctcaagcagaaggcggactctcttgatgaagtggagtctattctagaaagtgttagccatggcacaaagctggttgagctatctaatgaggatagcatggtggacttaaccttcaacgaagatcttgatgcacggccttggtggacgccaacaagcagcgttaattttctttcagaaccatttgatgaaagttcaacacctgcaagctatagggccaaaatgtgcaagcacaaatctaatgagaaggacggttcgaagctgaaagatgtagagagaaaatctcttgttcctcgacttgtttatctttccacacatggttgtgcgtcttttctcagggagagtgaatcaaatggtgcttcctctgatgcaactgcttctggggagatgaaaactttgcttgataaatatgctaggagtattggttactcttttgatgatgctctaagttttgttctgggtatctcacatggcaagaaggctgtcaaggatttggctcctgatatagtcagctggatgaactttgctgtgtttatcaatgcttggaacttgtgttctaatgtgtcagtgatccctggaactgacaaaagcagcccaaactcctggtggatcgtggataacctcgtcaaaacttgcatagatgagcagttggctgataccaatcaaattctgacatctccaggaagcaatattccacttctagcgtggatggtgacagagcccatttcctggcaccttcttgtaatccaatcctgtatgagatctatggctccacaagggaagaagaagaagaaaggcgggccatctgagcgaccaaacacacctcacctgcaggcaattcggagctccgttcagtgcatggctgacactctccagagagtccagaaatgtctgtcagaacagatgaagccagaagagcaagctctagacatgctggtgtcacatttgcaaggaaccggtgccgaaggccctggacagatcgcccgtatcttggacgagagcgcagcagctgccagctccgaaatcggtggccggatcgcccattctctagagccgtggagccgcgccggcgtgatgagaagaatagttggggctgagaatgagacgatagccgagttgatgaagatatgcacctcgaagctcaagctccttgcgtccgcatcagcttccctgtccttggtgttgcactaggctgggaaattttgatcgtgagatttttttatcctcatccccgactgctgtcgtgccttcctcttgcccccttgatgttgtaaaccaaactaatgtgcgctggtgtttgttgtttcgatgcaattttggtttgagtgacatgctagtttccgagctgtttgcatgcctgctgtctgtctttggtcgtggtggaactgttgctagaatccatacgtcgtttgtgatcgtgatggattgatgacctccgtttcttgaactgtatttgtctactggttgagggcacttaagaattttactggattgtatttggtttccaaaaaaaaaaacagtatgtagggaaaacaaatccctgggtat

SEQ ID NO: 110392 - DNA, 565 bp, Zea mays
  unsure (1)..(565): unsure at all n locations
  Clone ID: MRT4577_32171C.1
tccgggnnatgaatccatgnaatnntctgacagtgaggnaaaacanagatgaagattcagatgaagctgctgacaaacaggaaggtgactatcgatctggcaaagaaaaggcaggngaagaagttatcagaggtaaaagaatcttcaggcaaaaagaaggcaaacacagggagtggccacaaatcaggtcctccaaagaaaattatcaaaagtccagtaaaaaaagtgtcatccaaggttcatgaggaaaaaggaagccccaatccaaaaaaaaaaaaaaaaaaaaaaaaaaaaaaaaaaaaaaaaaaaaaaaaaaaaaaaaaaaaaaaaaaaaaaaaaaaaaaaaaaaaaaaaaaaaaaaaaaaaaaaaaaaaaaaaaaaaaaaaaaaaaaaaaaagggggcgccccttttaaagaaccaaattttacttccccgtgcttgaaaggtaaaagtttttttttggggcccccaaatttaaatccatggcccgcgttttaaaaccgttggaattggaaaaacccggggtttcccaaatttaatccctttgaaaaaaacccccttttc

SEQ ID NO: 110393 - DNA, 189 bp, Zea mays
  Clone ID: MRT4577_32172C.1
gacccaagcgtcaaggttacttcactgctcatacaaaagctccacagattgtcgagactgatcatgctatctcccgaatgttttcatgtcgattccaatgtggtattcagtacggtacataagctcatcttgtatgttggtcaactgcttgcaccacttagtcgtggactttaaatccgaattcggttc

SEQ ID NO: 110394 - DNA, 432 bp, Zea mays
  Clone ID: MRT4577_32173C.1
agcagtggtaacaacgcagagtacttttttttttttttttttttttttttttttttctttttttttttttttttttttttttttttaccatgatccaacctttttatcaatgcacggtaccgttgactaagcagccacgggatccaatgcccatacgagtccaattacaagggggggggaagcctccgttgggcttaggcacaacacaagcagggaatagtcacgggggctgcttcctttcccatttcccttctttcctgcccgggccagcagcagggccatcccgctccctcctttccggaacctgcctagaggaggatgacctggtgcctcgggggccatggggcctcacgccggccagttcaggatctccggtgctggtaggggcctgggcccaagggctgtcctcgttggcggggcgctcccgaggct

SEQ ID NO: 110395 - DNA, 455 bp, Zea mays
  unsure (1)..(455): unsure at all n locations
  Clone ID: MRT4577_32174C.1
actcaaatcaaggaaatttggccttgatatgaagataagatggaattcgacctaccttatgcttaagaaactagaagggtatgaaaagattataactgtctttgtgaatgctaatgctcttgatattgatttggttctaactgaagctgattggtatatggtcaaacattttagagagttcttgatgcccttttatgtagccacaaatgttttatcaggtgtttactatcctacatcctgcttagtcattgattacatttggttaattgctgagtcatttgctaagcacaaatctgattcccttctttgcactgttgctgctccaatggaactaaaatttctaaaatactttgataacatatcccatatatattgctntgcaactattttggatcctagaaaaaaacttgatggggtacaatctgctctagaggaattggtgacttgctagatat

SEQ ID NO: 110396 - DNA, 622 bp, Zea mays
  Clone ID: MRT4577_32175C.1
cggacgcgtgggcggacgcgtgggcggacgcgtgggcggacgcgtgggtgctgctattggtgtattttgtcttatatctaggccactagctcagtacttgtgttatgtatctagatctactctggcgtgcttgcaaattcatccaacatgagcaggattacttgttgaagctaccaaaaacaaaacattttttcccttccacttctatatcattaatgaaaaatggtaaatatttatgaatattttcacaacatgtttcttcctctaacaaggcaagtgctcagttcttttttttttgcaaaagcactacatccaagcacatactctgttgtgcaattggtttgtgcattcccatttttttattttggatacttgctacatcgctaagtttggacatctttttaactacaatcattttaactatgatcagtgtgttatccaccgccatagcttttcgctcagtgacaacgaggtcgccggcaccggagcgtggagggcctgcatgtacttcacgcatgggttctgtgagaatggctctacctgccgcttctagacgccgcccccgcgggtcgtcatgcgctccaaggcactcgctgtcgtgccccctcagcagcagctcatg

SEQ ID NO: 110397 - DNA, 654 bp, Zea mays
  Clone ID: MRT4577_32176C.1
gggtacctcgaggccggccgggataccacttccaccaccaccaacaccaccaccaccactatccaccaccaccaccaccaccaccaccatcatgagctccagaccaactgttgagcctctccaacctccgattctcgcgaagtatggcagtgattatctgcaatacacaagccattatttgttctatttgcgtttgcggctttctttggatcgtgacccgatacgtctcaagagagtcaggtcacgccgtcaccgttatggtgacgacaattcttatactaggaaagtcgtgccacgcatcatgacggttgaacagctgtacgaacgctttcagccaaagttcacagagcgaattattggggtcgatcatcccaccccccatgaaacttcatttggcttgccaatgttgtttttgccccagcatgataccgagaccccagctccctttgccgagttggtagacgatcagaacgacgagggttgcatgccacaggatgcagccattcgcgttgccaatgatgatcaagtcaccatgcttggtgaaaacgagtgggttcatgagaaaatccacgaggagccagtcgtccacatgcagaacgtcaagcttacgaaaaatgaacttttccagaagattgctcatgcgacgacggcctc

SEQ ID NO: 110398 - DNA, 666 bp, Zea mays
  Clone ID: MRT4577_32177C.1
ctgggaccaccaccgccttcttcaagatcggcgggcgggcaccggccggcgatgacatccaccgtcaccacaaccgttgggtgcggggggctccccgtccgcccgttgtcgacagcgaccagaggacgcccacgcagatgcctccaatgataagtcagtggaggtcatgcgcaagttctccgagcagtacgcccgccgctccaacactttcttctgcgccgacaagacagtcactgccgtcgtcatcaagggacttgctgatcacagggatactcttggagctcctctatgcccttgtaggcattatgatgacaaagctgcggaggtagcacaaggattttggaattgcccatgcgtccccatgcgtgagaggaaggaatgccactgtatgctttttcttactcccgataatgactttgctgggaaggatcaggttatctccttcgaggagatcaaagaggcgacatcgaagttctaagcccttgtatttgtcacggagtgtttacttgacagctaattttttatatgtatatgtacttaagtagcatctataagatatgccatcaggaaaattttcataaaatgtgcagtaaacagcacttcgcaaggctgccgatcatataagccgccttcggcctttttattgtatctgggctccatttcgtg

SEQ ID NO: 110399 - DNA, 384 bp, Zea mays
  unsure (1)..(384): unsure at all n locations
  Clone ID: MRT4577_32178C.1
gggcgccccgccacgcctactataaatccntctctattttattatttcccttcatatcaaaatctttaatgatttggaccctttttagtttttggtacaccacaaagaatccctaaaaccacaaactctaccatctgcgacctgcccaaaaaaaaccaacacaccaaccccccaccaaaacattccaaaaacattccctctacttaccacaatgccatacacatttcttactacaaaacacccaatattattgcacacccccactgaccaaaacaaagatctttgaataagccaaaaaaacacaatctacaacaaatctttgcctctaacttcaaaaccaaacgcggatgatttaatcctcaagacatccatacatcatttgaa

SEQ ID NO: 110400 - DNA, 1895 bp, Zea mays
  Clone ID: MRT4577_32179C.1
tccggaaggaaaggggacaggcacagccgcacagccgccgcccctccatccacctctccacaccatctgacgctgctcccaccgaggtctccaaggctcactcctcaccagcttctgctctctccctcctcatctctgctctgctctggaccgttaactctccagctccccctcgctccgttcccttccgcccaaatcactgggaccaccaccgccttcttcaagatcggcgggcgggcaccggccggcgatgacatccaccgtcaccacaaccgttgggtgcggggggctccccgtccgcccgttgtcgacagcgaccagaggacgcccacgcagatgcgccgtccgagcccaggccgcgggagcggatgcctccaatgataagtcagtggaggtcatgcgcaagttctccgagcagtacgcccgccgctccaacactttcttctgcgccgacaagacagtcactgccgtcgtcatcaagggacttgctgatcacagggatactcttggagctcctctatgcccttgtaggcattatgatgacaaagctgcggaggtagcacaaggattttggaattgcccatgcgtccccatgcgtgagaggaaggaatgccactgtatgctttttcttactcccgataatgactttgctgggaaggatcaggttatctccttcgaggagatcaaagaggcgacatcgaagttctaagcccttgtatttgtcacggagtgtttacttgacagctaattttttatatgtatatgtacttaagtagcatctataagatatgccatcaggaaaattttcataaaatgtgcagtaaacagcacttcgcaaggctgccgatcatataagccgccttcggcctttttattgtatctgggctccatttcgtgaattaaacctacgcaattcgccgctcttaaaaaaaatttagcaggagagcggcgaattgcgtaggtttaattcacgaaatggagcccagatacaataaaaaggccgaaggcggctcatatgatcggcagccttgcgaagtgctgtttactgcacattttatgaaaattttcctgatggcatatcttatagatgctacttaagtacatatacatataaaaaattagctgtcaagtaaacactccgtgtcatatacaagggctgagaacttcgatgtcgatctctttgatctcctcgaaggagataacctgccacaagtatacaacagaaatcattctccaggtgtttgcacagaacgtatgaaggatgcagatgtcagaggacaagaagaaagcaacatgcctgatccttcccagcaaagtcattatcgggagtaagaaaaagcatacagtggcattccttcctctcacgcatggggacacatgggcaattccaaaatccttgtgctacctccgcagctttgtcatcataatgcctacaagggcatagaggagctccaagagtatccctgtgatcagcaagtcccttgatgacgacggcagtgactgtcttgtcggcgcagaagaaagtgttggagcggcgggcgtactgctcggagaacttgcgcatgacctccactgacttatcattggaggcatccgctcccgcggcctgggctcggacggcgcatctgcgtgggcgtcctctggtcgccgtcgacgacgggcggacggggagccccccgcacccaacggttgtggtgacggtggatgtcatagccggccggtgcccgcccgccgatcttgaagaaggcggtggtggtcccggtgatttgggcggaagggaacggagcgagggggagctggagagttaacggtccagagcagagcagagatgaggagggagagagcagaagctggtgaggagtgagccttagcttcccggccggcccgagggaccc

SEQ ID NO: 110401 - DNA, 590 bp, Zea mays
  Clone ID: MRT4577_3217C.1
tctattccttcccttgaagagtgacgcatcctcaggctcctcatccttcgtcgagaagatatggcgaacagctaccaacgatatctactacgacatagccccctttacctgttctctcctgtccgactcttgtttctgcaacgcctggcgagcagccatgcatcaacaacaccaaggaccgctacaacattacgcatgtacaagctctcctcctaactgcgccatacctccgtctctcaccctccaattgaagatgatcccctcttgtagtggatctctctgccagcgagaacgagaggcgacaagattcaaagaagctcatctctgaatgcagcagatgcgcatcgagcacccacttgtgctattgattagagatgaaaccatcttgtttcagagctacatctatactaagctgaccacgcacctgctggcacagccgacatctgtcaaatgaacactgcagctgggcaacgcggctgcttggaacaagaacagctggctactgcactggctggaatgcatcttgtaataattcactagctgtcagccatcttaaacctgtgatgacaacagatgatatactcgacata

SEQ ID NO: 110402 - DNA, 374 bp, Zea mays
  Clone ID: MRT4577_32180C.1
ggaaggaagatcaggataatcaaatttaactgggggccgtcaaaacacatggccatgggaatagtatagtttatgcaccccacaccgggtgaattattcgggtacaggagcaggatagtactttttttttaatccggaataccttggttttttttttatctggagttcaaataattggcaggggcgcgcctttccactcgttgaggcactgcaacagggggtcgatgtgcttgccctggttaatggggatcaccaccttgtccacctcctccccgggcgaccgggttttcttgccgggcaggtacttggggccgagctttttgggcacaaacctgtacagggggtacaaacggcacttggtaatcctgttcggg

SEQ ID NO: 110403 - DNA, 220 bp, Zea mays
  unsure (1)..(220): unsure at all n locations
  Clone ID: MRT4577_32181C.1
tttttgaccaaaaaaaatttatattattgattcatgggacatcaataaccaatgacaatccgaagttgnctggtgnggtttctcatttgtggttttaggactcaatgcgctcaggtgcctggaatgttcctgggactcctgatgggggggcggtgagttggcaattggtatagtattcgttatacataacgtgggcgggggtgctcttagccgtgcgggg

SEQ ID NO: 110404 - DNA, 250 bp, Zea mays
  Clone ID: MRT4577_32182C.1
gtgggcgatccggacgctgagtctgatgttgctgatgtctctacgatattacatgactcgatcgtgcccagagcgttgctcccgtacatgaggaggtcggtgatgttcttctcgtgtgacccgatggcgcggcggcggctagacctccgcggacggagcagcatggagcgggaccgaaatgtgctgctacaacacacacgctaggagcggtgttggtcccaaggactccgactacagaacacctgaggca

SEQ ID NO: 110405 - DNA, 725 bp, Zea mays
  Clone ID: MRT4577_32183C.1
gttctttttcgtgttccttgcaattttgactgagaaaaaaactcattgaacgcccgcgccgctccgatcttcttttccggcgacggcggcggtggaggcggtggtggcagtttggcttcgctcttccttggtctgaggatctccacccgcagtttgtgcaggatttggttgccgtgcggtggtcggccggctagggcaggcggcggggccggtctcctctctcatgcagaatcgaatacaatcccatcctgccggagcctcgtcctctgcctccagcggcggagacggctctggttcaggcttctgtctcagtgatataatggaaatcgatgctggcagcggaggagaccacaaagcaccaggctccccgaggtccaagcattccgctacagagcagagacgtcgctgcaaaatcaatgagagatttcagatacttcgtgatcttgtaccacaaagcgaccagaagagagataaggccacattccttttggaggtgattgaatatgtcaaattcttacaagaaaaggtacaaaagcatgaagcatgtgctggtggagactggagccaagaaaatacaaaattggcgccttggagtagcaatcgagtaccagttgacctcatgccaggtgtagcacccacaacaaaaattggctctgctggaaactttctggacaacagcatccccaccatgccagaaatgctgcaaaatgctgaaacagtagtag

SEQ ID NO: 110406 - DNA, 353 bp, Zea mays
  Clone ID: MRT4577_32184C.1
agcctttccgaggattttgttgccaagccaccggcagaagacagggacattatgggagaggtgtcgaagactcatgaggccatacaatacttggagaagtcaattgacacactgcagatggagctggcagcgaagcgcagcatcaacgagcttcacggggaaagtacaggtggtggcataagtaagcagaggagaagggcgttcgtggtgatcggggtcaacaccgccttcagcagcaggaagcgtcgggattccgtgagggagacctggatgcctcaaggtgagaagctcaagaaactggaggagaagggaatcgtcgtccggtttacgatagggcatagcgctacatcgaa

SEQ ID NO: 110407 - DNA, 1537 bp, Zea mays
  Clone ID: MRT4577_32185C.1
cattggacccctcgaggccggccggggcccggaacaccacgcctagcaccaagcaccaccaccgcccgggcggccactccacgtctccacttgccgtgctgcaccgacgcggccagcgcctaggcttctcttcacctcaagacaaagcagatcgcaacctctcgagccacccccaatctccaacgttaccgtccccggtcccccgcactttagccccccaagcccaacccaactcgccacccatggccatggcgtttcacttccacccgctggtcgcctcgcgcgtccacctctctccgcacccgttcgccgccgctacgggggcaccctccccctcctcctccgtcgccatcgcggcgcactaccaccaccacggccgccgccgcttctccgccatcgtggccacggccacgaccacggagttcaacttcaaggcatacatggaggagcgagcggtcgcggtgaaccgggcgctggacgcggccatccccgccggggggctccccgcggcgctgcacgacgcgatgcggtacgcgctgctggcgggcgggaagcgcgtgcgccccgcgctgtgcctggccgcgtgcgccgtggtgggcgggccggagtcctgggcgatgccggccgcggcggccgtcgagatggtgcacaccatgtcgctcgtccacgacgacctcccctgcatggacgacgacgacctccgccgcggcaagcccacctgccacgtcgtctacggcgagcccatcgccgtcctcgccggggacgcgctgctctcgctctccttccaccacatggccagcgtcgggtcctaccctccggacgtggacccggagaagcaccccgcccgcgtcgtccgagccattggggagctcgcgcgctgcatcggatccgagggactcgtcgccggccaggttgtcgatctcgagatgacgggcacatcagagacggtgcccctcgaacgcctcgagtacatccacctccacaagaccgccgcattgctcgaggcctcggtggtgattggggcgatcatcggaggcggcacggacgagcagatcgagaggctgcggaagtacgcgaggtcgatcgggctgctgttccaggtggtcgacgacatactcgatgtcaccaagtcgtcagaggagctcggcaagacggcggggaaggacctggcaagcgacaaaacgacgtacccgaagctgctggggctagaaaagtcgcgggagttcgcggaggagttgctctctgatgccgtagagcagcttgcttgcttcgacaaggagaaggcagcgcctctgttgcatctggccaactatatcgcccataggcagaactgagaatttgaggtgattgcgtactctattgtcggacctgttgtaactttgtcaggccgtcgcccgtcgaactggggttcgaggaatatatccaaatcgtcatgtgatgtatactagctgtagctctgtaccttgatggaatggggctgtttagttcgaattccaaaagtatgaaataccgtatccaattatgaacctaattatta

SEQ ID NO: 110408 - DNA, 684 bp, Zea mays
  Clone ID: MRT4577_32186C.1
aactattctgatatcggtgccgacattcgactttctcgcgatcaggagcccgcgatctcctctccgcacgtccctatccactatgcccaccgaagcaaagccgaactatctgcatgccaccgaaaacgacgaggaaatcactggatccacaccggcgctgctccacttctaaaagcccttcgacctaactccaaggctgtatctgaagcttccagtacggacgatctcctctgctctttcggccgcacaccacgcctagcgagtgccgtgcgatacctctgcatacctgtcacatgtactctagcacatcagctgtgatcggctgtagcctgctgcaaaggcatccacagaaaacaagactaccatcaatatggcgtctcctttgaccactccgctgccgacgacgaggaaatagacgatgaggtagagtgatgacaccgtcgcaagagcagcggtgatgccctccatacaccacaagctcactccccaagaaagatggatcggccagggcttccaccccaaatgtctaggaccactgaagctgctgagaggagatcgccttttgtaccgaatatatacatcaattgcgcccagactctcatactgctgccattattagtagtcggcaatcatgaaatgattgtgccatatcttttcttaagaaaaattcctgtaaagattata

SEQ ID NO: 110409 - DNA, 696 bp, Zea mays
  Clone ID: MRT4577_32187C.1
ggccgcttttttttttttttttttggagagcctaactggatgtcatgggccgtgtggcaattaaatcttctagggtacaaggggaagaagaaaaaaaagagaacgcccatgtggcaaatcggcttccatgggcctcaaacagaaaagaaagggaaaccgagcaaaccccctcagtccaggaaacaaacaaaccattgaagaccagggcgcactagacgacggcccaagaaataagagcccacagacagaaacgcgtctggaacaggacgacggcctgtataaacaactggcctgggcagctcctaattctgtcgcgcttttgaactgaaatcacacgacccaaaacaacaagagctccagctaaaacaagcggacaaagcgcccccagccagcgagccagcctgggtgtccgtccccagcccacccgtgccgggtgacgtgccgcgagcgtgcgtgtccacccgcccgtgtcacatcacatctcagtccgcccgtcagccgtcgccggtggtgctccggcactgctcggcgggcctggcctcgaggggcccgccgatggtggggcatccgtcggccgcggacgccatcggcaggtccatgcagttgtaggacaggcagagcgcggcggagtccggcagcggcgcggcaggcggcacggggaaggccgtcaggaagttgtcccgcgcggcctcgagg

SEQ ID NO: 110410 - DNA, 244 bp, Zea mays
  Clone ID: MRT4577_32188C.1
atgggccgggccgacgggcacaagcttttttttttttttctttttttatttgtttttgtctgaaatttgaggaccatatccattgcaagcagggagttatatgcatatatcacagcgcctcctgataccagaccagtggaacgagaactgagccgtctattccacaggttacatgccaaaaacgacagaattacaatgggctcaatgaattgacatgcaatggtgggagcagccatcaatacgg

SEQ ID NO: 110411 - DNA, 1763 bp, Zea mays
  Clone ID: MRT4577_32189C.1
ctgcagagcttccccttcctcactgtggtggctcggtggggggatccgcgcctcccccatcgctggccagctcatggcgcccccgccgccggaggatctccaatgcgccgtgaacgtcaagtgcgccgcgccgccggcgctggccgcgggggacggcgagctccggtggctgcggcggtgcgtggaggcggcagcgaaggcttcgccatcggcgcaggcctcaagggcggcctcgcgctcttctccgtcctcgtccgcatccgcagccgccgctcccccagatcgaggaaggccggagctatgaccaacgaggaggccgtggtgctcgcggtcaaggagactctgagctatgcgacagtgatggtaagaattgctatctaccagatgaagccaagaaattccagtgacatactggcttgtagagttcattgcgtgatttttgtatggtcactcatgtgatcctagctggtccttctatgctcctgacagtacagtgaactcagcatactagcgtggaacaatacattctgatgcgtgcagcagtgcttgcagccgcttgtggcataaaggcaagcgttttggaagggatctgtaaacctttgacttggtcacatgttaatgtcttccttatgtgcctctcatctgcacaaattttgttagcatacattttaaagcaatacagtttaatttcatcatataacgaattgtggatccagcatgaccggaaaagatcttactattttgcaaggtgtgaaggatgtagtcaaccacactgctttcagtaacttagtgggtatcgagaagtactacaaatctgttggtgttgacataaagctagatccaaacatgaaagtgccttgctcaattgtgcatggtaaccagtcatgtacaggacatgtcttttcattcttgttacaagcatatggaagagcagttcctgtatatgttccagtctacttagtccctgcacttgtagttcataggcagcatctcatgaaaaggccttactcaattatagggaagagttttctaggagtagcaagatctagtctgtttctctcagtatactgtgcatctgcatgggcttggacctgcctgctttttaggatcttccggagagccaatacccctcttgtcatccttggcacgtttccaacaggtctggctttgctcatcgagaagaagagcaggaggattgagatatccctgtactgtcttgccagagctatcgagagttttttcacatggatgaccgatgcaggactctgccctccaatacttcagataaagcgagctgatgtggttgtgttcagcatagctacctctatcattatgcactgctatgcgcaggaaagagaagtcttccggtccaagtacctgaatgtgctggactgggtatttggtgtgccgccaccacccgacagtgaggataagaactgctatctaccagatgaagccaagaaatgccagtgacatactggcttgtagagttcattgcatgatttttgtatggtcacccatgtgatcctagcgcgagactagacccattagagggtttagtgaacgaaccttgtacaggactcttcggaaaatcgggactttagtggatatagcaagatagattttttaattaattgatttgtccaaacgatgccctggtcattaaatgaccatatgtggttgtaacttatgacctttattgttgttgttgtcatgcgaatataacttatggtccttgaaattgtttaaatggaatttctcat

SEQ ID NO: 110412 - DNA, 786 bp, Zea mays
  unsure (1)..(786): unsure at all n locations
  Clone ID: MRT4577_3218C.1
cattgggtacctcgaggccggccgggaaggcaaagcaaacgctgcaagcgaactcgccgccccacaaagcagtgccagggtctggctgattggctcccaccatggcatcgacctctccgcaccgctcctccggcggggatccaccttcctcgtccacgcccctcatctcctcgccgacctccccggcatccggctcctccggcggcccgctagggcggctcacgagcctccgcggcgcagcgcggttcatccggcgcacggggagccggcgtttgatgagggagccctccgtggcggtgcgggagacggctgccgagcacctagaggagcgtcagaccgactgggcctactctaagcccgtcatcgtggtcgacatgctctggaacgtcgccttcgtcgcaatcgccgcggccgtcgtcgccgcgtcgctgggcgagattcccgccgtgcctctccgcgtctggatcgcgggctacgtgctccagtgcctcctccacatcctctgcgtcacagtcgaatacaggcgtcgacgcagggacgcggaccaggagggagtgggtgttgacttcaagttcaggaggagggagcatctgaagatgacgtaaacaacctttccaaattcaaatttcggacaatgagtgatgcagacaagctagctgtcggcattgcagcacctgtgngtggagtgatgacagagtgcggtaccaatcctcctgtcgaacatattctttcggctgaggatgcagcacgtttggcacatacttctagagtagggagtgtcatttg

SEQ ID NO: 110413 - DNA, 333 bp, Zea mays
  unsure (1)..(333): unsure at all n locations
  Clone ID: MRT4577_32190C.1
gccggcggccttttttttttttttttttttttttcggcaangcggccgtcccaaacagagtgagggataattaatactaaacattttgggcataaaagcatcgggaagacggggtttttatcgaacccacataatgcttttactatgtatccccccaaaatccttagtttttttttttgcaccccaaaagacctttctggtcgtacagatgtctttgaaacatatacttgatacacttctttttttgaataaagattcgggcttcatttttccaaggcagagggggtacatttgggcctgcccccctcagggtgctgagttgtttctacctca

SEQ ID NO: 110414 - DNA, 307 bp, Zea mays
  unsure (1)..(307): unsure at all n locations
  Clone ID: MRT4577_32191C.1
ntaattcgatcaaactctgcatcgcattccattcctgtgctctcaacttgttaaggtcagacgagccagcatacaggtactttgctgcacaagctttgtcaagtctggtttgtaatggtagcagaggaacacttctggctgtcgctaattctggggcagccattggacttgtatctttgcttggatgcgctgatgtcgatatagccgatcttttggaattatcagaggaattcatgttggtgcctaatcctgatcaaattgcattagagaggctatttagagntgatgacatcaggattggtgcaac

SEQ ID NO: 110415 - DNA, 873 bp, Zea mays
  Clone ID: MRT4577_32192C.1
atacgcttttttttttttttttttgccaaccaatctttctgtgtgtactaagtactaacagaagaacacgtaggctttctataaactacttcatccatgcaagttacgaaacagtttatacgtgcaaccaatttagagaagttccatctctgcgccgaattgtgctcggctcacctacaggctagagcttcatctggctatacactgacgaggcgacgacgacgcagtagcagcgccggcccgttcatccaggaccagactgaatcagcggccccggatcagctgcgcgcacacgaggaacagcgacgccgggacgccgagcagcatcaccgccagcaagccggcgccgagccccgggcgcgcgttcacgaggagcgcctcgagaaggccgaccgcgccgcgcacgccgaccacgtagctcccgtgggtggtgccgctccagctccgtccacccggtcggcggcagcgggatgccgccgtcgtcagcgtcgaaaatgccgtcctcctctgacgactccgcccgcgcctcgcggatacgccgccgcagcgtcgccatgtcctcgtccaccagccggccgccctcggaggaggaggaagagccgccgtcggcgccccacccgttgcgccgcccagcgccaaggagcacggccctgcgcccgccggcgcgacgtggcagccgaacgggaggtggccgaggcggcgacaagaaactactattggagatgaagtggctagggcccgagccaccgatagctcgggttgctgctgccggtgccatcgccattacctgctgctcctgctgctgccgccgtcgcctacacttcacagctagctagcactgggacccggccgagccgagacgagaaggtgtgt

SEQ ID NO: 110416 - DNA, 570 bp, Zea mays
  Clone ID: MRT4577_32193C.1
atgggcacggcgagacctcaacagcggcgacagaatgggcacgcgatcatggcggacgatgacggtgcttctctggctcgtgcgcgatgtgagattggatgtcatcgggttttattgattaatggcaatgtaagattacatgtgactaacgtgtgttttgcagagcaaatggaggcccagcagtgtttagcaatataccaggaaatgaggaaagacggtgataatcaagatttttacaatttggatctacaacctaacaggaaagaatctttcaacctgtttcttgagaaagtcgttgaagctcgaattgttcaatctgttcttcggaagatcaaagagcaatacctcctaggtcatgttgagctgccacttcgtattatcatcacggatcatgagaagacatcaagagctgaagctgaaactaatgcagttgacatcgtgcaggcaatagttactgaaactagtgcagttgacgtcgtgcaggcaagagctgaagctgaaattagttttgattggacctggaagccgccctcctgtttcatcaaaatccaaagcaccaacaaaatctag

SEQ ID NO: 110417 - DNA, 293 bp, Zea mays
  Clone ID: MRT4577_32194C.1
attcggttcgagattaaaccgcgagtgtcttttttctatccatacggctgatgttggagatgggatgttagagttagctgtggcccactaaaacacaaagcaggtaagggtgaaggacgaatctatgtccaggacatgggcacttacacaaccgaatgaatgggagcaccaacactagagctgagcagaccaatcaactaacaacagattgagcaaattgttattgaactcccataggacggagctggcgtggaacatgcagcgtgtgcaccaatgacacatgaatcgtgcag

SEQ ID NO: 110418 - DNA, 341 bp, Zea mays
  Clone ID: MRT4577_32195C.1
cgctaatacggtaaagatacgggagttgctcttgccattactagtactaccaccagcagccatatcttctgataagctcagcgaggttgaatcaatgatccaggtcctagcacaatgatgagcacttgatgaacgctcttgatcaaatcttgtataccaggtataatgaggaatgttcattgattggacgagagatccaccaagcatggtcactatttcaggcatatactacgatagctgtggaaattatctggtctgctgctgctaataacaacgatactagtacttattttgataacaacaacatctgctgcgcaccatgatccactcattgacacaac

SEQ ID NO: 110419 - DNA, 432 bp, Zea mays
  unsure (1)..(432): unsure at all n locations
  Clone ID: MRT4577_32196C.1
aaaaataaaatnnntatatatatattttttattgattgggtacctcgaggtcggccgggccgggacgctagttctcccaattccttcccccctcctcggtcgtcgcctcccccagagaggatgagccgcctcgaccctgccggtcacgacccccatcacgccggcgtccaacgccatgactccccagtacgactacctcttcaagctgctcctcatcggcgactccggtggggggaaggcttgcgtgctgctgagggttgcggatgaatcatatctggagagctatgtcagcactatggcagcggatcttaaaatccgcaccgtctgcagcaagatgggaagacaatatagctactgacatgggacactgctggcctataacgctttaggaccatcacaaatagctactaccgcggagctcatgccattatt

SEQ ID NO: 110420 - DNA, 640 bp, Zea mays
  Clone ID: MRT4577_32197C.1
gccggccgggtctgggagaaccaccctcaccacccacacctgcccatcaccaccaccaccctttgaagcctacgcaagtggcacgctacgagcattatccagcacatctcatctccaactatgtcgagccaggaccccccatatgacccctacatccccagcggcggcgccggcggacagcagggcggccagaatggcaaccaccgcacagctgcgctccaagcggaaatcgacagcaccgttggcatcatgcgggacaacatcaacaaggtctctgagcgaggagcccgcctcgactcgctacaagacaagacggacaaccttgccgtatccgcccaaggcttccgaaggggcgccaaccgcgtgcgcaagcagatgtggtggaaggacatgaagatgcgcatgtgcctgattgttggcatcatcatcctgctcatcgtcattattgtcccttctgtcgttgccacgcaaaagaactaaaccacccacgcgagataccacgaatcatacacattaataattgcgcggatgggggggaggttgtcaagccattgggggaagggacgaatggctacaagctgcactacgatcaacgacatgggtcactgtaagatgtgtcttgagcatccagccttttttt

SEQ ID NO: 110421 - DNA, 508 bp, Zea mays
  Clone ID: MRT4577_32198C.1
gaatctaacttggatgaactttgaaaattgatgatccgtagataagtgtaggatgctatgtatttgttgctgtttgttttagtacacctcaacgaacgagttatgttcctttccagcctacctgttaccttgttgctagccatacaccataaagagaacgcaggaccccgttaccttgttgctagtcaaacaccataaagagaatgcaagacatgaaaaattgaaccaaacaaatcccgctttgccttaccatgcaacgggtaccactgcaacctgattccattaacgttgccactcccactgacagaaccaaacagcacctgagtgtgtaactttgctgctcccagttataatatggaagcatattttttcccttcagttaaactgttgtggcatggaatttgaccgtgcatttagcgattccagaaattttattgtcttctaattaaatatctgattgcagaaaatagtttttcttggtactgccagaagccatgtattattttgg

SEQ ID NO: 110422 - DNA, 226 bp, Zea mays
  Clone ID: MRT4577_32199C.1
tcgagtcgtcttcactcatcgatgctcttgcggaccatccggtccctcgctgtcgctttatagctgcctcttcgggtacaggctgtggttccatcgctcagtcaccctgtctcaaagctcccgtcccccagctggcgtcatagagaacctggctgattcgctcacttgttcaaagatcttcgcagtctcaatcgacagtgcgccgcgccttttccttgcgcattaa

SEQ ID NO: 110423 - DNA, 297 bp, Zea mays
  Clone ID: MRT4577_3219C.1
acgccccacgcggccgaataaacggaggaggcacgcaacgacgacgacgactactgcggcgacgtcgagagcgtcgtcagcgactcggccgagtgctgccgccgcgagaggagggagacgacgccgtcgagccaggcacgggtagatcgtccctgcagcgacgaggagtgcagccaggccgcagacgggccaacgcgccaccgtcggcgacggaaggctttggcggccaccgcgacagccgcggtcgcttgcagagcgagggcgacgccaccggcagaagagatcgagcagttcttc

SEQ ID NO: 110424 - DNA, 860 bp, Zea mays
  unsure (1)..(860): unsure at all n locations
  Clone ID: MRT4577_321C.1
acgcgtccggcgctcgccgtctaggagcattcacgttggcggcgggcggcggctcggtccttcctccctttcttccgtgctaagccaccgagcacccaagcggtttggcctgatgccacatctctggtaggagaggtggatttggtggacctagattcgatgtgcagagagcgacttggaggtggctgacatcttcaagcactgcatcatgcagttacaactactgttggccatacagggaaatgctgggcctattataccaattgttcaaagcatggaccttgtataattacatgttattatcatagatagattaatttctgaaatgcccatagattggtatatttggggaaatttattcgccaactgtaagcccgtcgtgatgcatagaacgatcgtggtataagatttttctgttgatgtttgcagggtatttttccagcacttgacattcgagtgaaaaatgtcgcagggacatattctcttgaacataaaggagaaatgatctcttcgcacatcagacaaggcttctactctttcagaagaaagtcattttcaagagaatcttgaacaaaatgaccagatgtttaggcctagttggaaggacatttttcgaatgaatcagagtgagctcgaggctgagattcgaaaaggtctctcgagattctactcttgatccaaggaggaaggcctatctgatccaaaatctcatgaccagaaatcaccacaaccaagcgtcgaaggacataatggatgtacacgacgacctggatgtgttccttcgtaccgagacccagggaaacaaatatttggctgtgagcattacaaaagaaactgccagcttngntgctgcatgctgc

SEQ ID NO: 110425 - DNA, 820 bp, Zea mays
  unsure (1)..(820): unsure at all n locations
  Clone ID: MRT4577_32200C.1
acagttccacactgacaatcaatccgtagtcccgatcgatcttcagtactggccattggcgcaagaaagatggcacgagtcctcctcgtcctggccgcctcgctggtcgcactggcgtggccggcgtcgtgccagcgtcttccggtgctcgctccggtcaccaaggatctcgccacctccctctacaccctccccttccacgacggagccaacctcgtcctagacatcgccggcccgctcgtctggttcacctgccagcgtggcaacctgccggcggagctcccgtgcaagagcccgacctgccgcctcgccaacgcctaccccgtcccgggctgccacgcgcccggctgcggccgccattggcacgacgacaagacgtgcacggcgtacccgtacaacccggtcaccggcgcgtgcgctgccgggaacctcgtccacacgaggtttgtcgccaacgctaccgacgggaggaacccggtgagccaggtgaacgtcagggccgtggcggcgtgcgcgccgaggaagctcctggcgtcgctgccccggggctccacgggcgtggccgggctcgcaggctcctgcctggcgcttccggcgcaggtggcgtccacgcagaaggtcgcgaataagttcctcctctgcctcccccgaggcggcgccaacggcgacggcgtggccatcttcggcggcggcccgcttcacttctgggtggacccgtcggactacacgcagtcgatggactacaccccgctcgtcgcccagcagggcagnccggcgcactacatctcggtcaagtcatcagcatggacacagccgcgtc

SEQ ID NO: 110426 - DNA, 258 bp, Zea mays
  Clone ID: MRT4577_32201C.1
ggcactacccgctgaatgtaagcatataaataagcggaggagaagaagcgcacgaggactccgctagtagcgtggagcgaaccgggagcagcccatcttgagaatagggcggcctctgcgcgctgattgtaacgtaatcagggtgactcagccccagacctggtggaagaactctagacagggacgcctgatagggtgtgagcccctatcgacccctaccctgtctcactaagtgagtccggaaaagcgccatctgga

SEQ ID NO: 110427 - DNA, 410 bp, Zea mays
  Clone ID: MRT4577_32202C.1
cacatattagcaaggacccggcggccttctagtccttgcctttttttacaacggctgccgcgtccctcctgcctcgctcactctcgcttccaactgacaccctgaatccctgcccccctgcccccactgtcccacttcccaccctcccgcccccgacagcttagcttgccgcgagccctgccctgccctgccctgccctacacacccgacgccatcctgacctgtgcgtgctactgccaggcaccaggagctcgcgctcagctcggcaggtcgatgagctagcgacaaccgccagtccgcccgaggcagcgacacgtatgggccgacgaggcgtctcaactgcaatgagggtgtacatcacggccacagccactgctggcgaatgccacccaccaaacccaaggcgcccc

SEQ ID NO: 110428 - DNA, 2414 bp, Zea mays
  Clone ID: MRT4577_32203C.1
aaaaaaaaaaaaacaaaaaaaaaaaaaaaaaaaaaaaaaatttaaaaaaaaaaaaaaaaaaaaaatttgtaccctgccggcccggcgggggactcgcaatgtctacttgtctaccgtcgctgcgctagccctcctccctgcttcttgcttttgcctgagcctgcagcctgctgcaagcttttgctttggtttaggtgcttcttttccacccctttactgttccccccacttttgcttgctttgtcacgcacacgaaaagctcctgcctttaccttatctccgcacccgtagtgggatttggtgggagctgcgctgctcgcccctcgcgtttctttgctcaattgggggtcacggtcacggcccgcgggtgctgcgcgtgctcgtgggcgggcggaattcggggttcttgcgcggtcccggtcccctcggcgattgcggacgctctctgcagatcttcgcgtaactccgggagcgcgccggagatgaactgcgggccgcccgaccagctgccgccggggtcggcgccgtcgtgcttcctcaacctgaactgggaccagtctatggccgccgaccagctcgacccggcgctcagctcgatggtctcctccccggcgtccaactcgacggccgccgccgcggttactgacggccgcgctctccacgggatctctccgcagcagcagtacggaggcactccgctcagctcgccccccaagctcaacctgttccaccaaactcgcccccagttccaccacttcccgccgccgcaggtcggcggcctgccaatcctggagaacctgatgccgatgggccatctagaccagttcctcgccgacccaggcttcgccgagcgcgcggcgcggctgtccggcttcgacggccgccccggtggaagtggctatggccggcgtcccgggacagtttggcatcccggacgccggccccatcggcgcattgaaggagctggagctcgggaacggccgggacgagtcgtcggtgtccgatccggcgtccggcagcgcggagatggcgctcaacaaggggccttccgacggcaatgcgaagaaacggaaggctagcgggaagggcaaaggcaaggacggccccgggtccgccgccgccggcgccgccaaggaggagtcgagtgggaagcggtgccgatcggcggacgagagcagtggcgcggaggacaacaaccccaccaccaagggcaaggccgcgcagagcagtagcgagaatggtggtggcaggaagcagcaggggaaggagagcgcgacgaagccccccgccgaggcgcccaaggactacatccatgtccgggcgcggcgcggcgaggcgacggacagccacagcctcgcggagagggtgagaagggagaagatcagccagcggatgaagctgctgcaggatcttcgtgccgggttgcaacaaggtggtgggcaaggcagtgatgctggacgaaatcataaactacgtgcagtccctgcaacggcaagtcgagttcctgtccatgaaactggccaccgtgaacccgcagctggacttcaacagcctgcccaacctcctccctaaagacatacaccagccctgtgggccgccgcagtactcccatttcccgctggagacctcaggcgctccgctgccgtacctgaaccatgggagccctctataggctgcggacacccaggggggctctatgcacccgctgtctgaaattggcccccgccaacccgccgccgcagcccaccagcagggctccccgcccccgacgcggcttctgcccggccgatgaacgcccctcagcatcctttcctcaacggtgctagcgacgcggcgtctcaggtcgggactttctggcaagacgaccttcaaagcgtggttcacatggacatcggccaaagccaggaggaatcgctcccacctcttccaacagctacaacggttcattgcagacagtccacatgaaaatggagctttgaggcatggccggggaaaaagaaagaaagaaaaccccagtccgaagctcgacgccgtcgtcccccctgtacatacggagaagagaggacacagctcgcaccggaagcagcgggctcttggggggtccaatccaacctaacgacgttggcccctagcagtgtttcagcctctaattttccccacccccgcccaatggtgtgacgattctttctttgaacaagatgcggaagaccgccgcgccggcagctgctcgcaccatccccgtcgcctgtttcgtttcagctttagcaagatcccgccggcgcggtgcgtcccagactctcccccagtatattccttcccgatcagagaccccccgcacgtaatgtcatttgtattgccgtcatatttgtagctgatatatatatagtgtatatttaagatcgccatttctcgtc

SEQ ID NO: 110429 - DNA, 1091 bp, Zea mays
  Clone ID: MRT4577_32204C.1
ccacgcgtccgcaaggcagtgatgctggacgaaatcataaactacgtgcagtccctgcaacggcaagtcgagttcctgtccatgaaactggccaccgtgaacccgcagctggacttcaacagcctgcccaacctcctcctccctaaagacgtgagggggacacgcacgcataacatgatcgctcgcttcgcattactacgtttggttcctagctcacacgagtcatattccattcctgtctgtctgtctgtgatcagatacaccagccctgtgggccgccgcatttcccgctggagacctcaggcgctccgctgccgtacctgagccagcctcaccatgggagccctctaggctgctgcatggacacccaggggggctctatgcacccgctcgacgcggcgttctgccggccgatgaaccctcagcatcctttcctcaacggtgctagcgacgcggcgtctcaggtcgggactttctggcaagacgaccttcaaagcgtggttcacatggacatcggccaaagccaggagatcgctcccacctcttccaacagctacaacggttcattgcagacagtccacatgaaaatggagctttgaggcatggccggggaaaaagaaagaaagaaaaccccagtccgaagctcgacgccgtcgtcccccctgtacatacggagaagagaggacacagctcgcaccggaagcagcgggctcttggggggtccaatccaacctaacgacgttggcccctagcagtgtttcagcctctaattttccccacccccgcccaatggtgtgacgattctttctttgaacaagatgcggaagaccgccgcgccggcagctgctcgcaccatccccgtcgcctgtttcgtttcagctttagcaagatcccgccggcgcggtgcgtcccagactctcccccagtatattccttcccgatcagagaccccccgcacgtaatgtcatttgtattgccgtcatatttgtagctgatatatatatagtgtatatttaagatcgccatttctcgtcaaaaaaaaaaaaaaaaagaaagaaaaaaactcgagggggggcccggtacccaattcg

SEQ ID NO: 110430 - DNA, 1054 bp, Zea mays
  Clone ID: MRT4577_32205C.1
cccacgcgtccgcccacgcgtccgggcccccgtgccgaggcccggcgccctgggcaagcagggggtggcgctgcggatatcggcggacagcgcggcgttcgtggggtgcaacttcctgggcgcgcaggacacgctgtacgaccacctcggccgccactactaccgggactgctacatcgagggctccgtcgacttcatcttcggcaacgcgctctccctctactcgaggtgccatgtgcacgcgatctccgcgtccttcgccgtgaagacgcagtacttccggcacaaggaacatcactttcaagaacacgtcgccggtgccgaagcctggggcggcggggaagcaggcggtggcgctgcgggtgtcggcggacaacgcggcgttcgtggggtgcaagttcctgggcgcgcaggacacgctgtacgaccactcgggccgccactactacaaggactgctacatccaagggtccgtggacttcatcttcggcaacgcgctgtcgctgtacgaggactgccacgtgcacgcgatcgcgcggactacgggcgctgacggcgcagaaccggcagagcatgctggaggacacggggttctcgttcgtcaactgccgggtgacggggtccggcgcgctctacctgggccgcgcctggggcaccttctcccgcgtcgtcttcgcctacacccacatggacgacatcatcgtccccaacgggtggttcaactggggcgaccccaaccgcgagctgacggtgttctacgggcagtacaagtgcacgggcccgggcgcgacctatgccggccgggtggcgtggtcgcacgagctcaccgacgacgaggccaagcccttcatctcgctcagcttcatcgatggcaccgagtgggtcaggctgtagctgtaaatctcgcagccgctcacgccaccacgccgcacactgtaaagaaacagagcaagacagtatatacagattttatactttccgttcctcgaccgagccaaaactctggagtctggatgcagcgtctcgatgggatgagcttttgccccaaaccgta

SEQ ID NO: 110431 - DNA, 1234 bp, Zea mays
  Clone ID: MRT4577_32206C.1
gggtacctcgagccggccgggcttcattccggaatgggcatgccgcgagcacgatccttggcctgcattgccgtggcggccattgcgctcctcgcgccgacgcgtggagcggagatggtcgagcggcagttcgtggagtgggtgcggtacatgggcggcctccggcacagcacgttccagcagcacgcgctgctggaccgtgcgtccccctcgtactcgctcgtcgtcgacgcgaacccggcgttcggcgacttcacgaccatccaggccgccgtcgactcgctcccggacatcaacctcgtccgcgtcgtcatcagggtcaaccccggcacctacacggagaaggtgagcatctcggcgatgcgcgcgttcatcaccctggagggcgccggcgcggacagcacgatcgtgcagtggggcgacaccgcggactcgccgacgggggccaagggacggcccctcggcacgttcaactccgcgtccttcgccgtgaacgcgcagtacttcctggcgaggaacatcactttcaagaacacgtcgccggtgccgaggcccggggcgacggggaagcaggcggtggcgctgcgggtgtcggcggacaacgcggcgttcgtggggtgcagtttcctgggcgcgcaggacacgctgtacgaccactcgggccggcactactacaaggagtgctacatccaagggtccgtggacttcatcttcggcaacgcgctgtcgctgtacgaggactgccacgtgcacgcgatcgcgctggactacggggcgctgacggcgcagaaccggcagagcatgctggaggacacggggttctccttcgtcaactgccgggtgacgggctccggcgcgctctacctgggccgcgcctggggcaccttctcccgcgtcgtcttcgcctacacctacatggacgacatcatcatccccaaaggatggtacaactggggcgaccccaaccgcgagctgacggtgttctacgggcagtacaagtgcacggggccgggcgcgacctacgccggccgggtggcgtggtcgcacgagctcaccgacgacgaggccaggcccttcgtctcgctcaacttcatcgacggcaacgagtggatcatgctgtagttgtatattatcgtaaatctcccagtcgctcacacggcagcacgtcgccacaccatgtaaagaagcagaggaacaaaacaatatacaagatttacatttttctgttgctccc

SEQ ID NO: 110432 - DNA, 351 bp, Zea mays
  Clone ID: MRT4577_32207C.1
ggccgaccccaactcaacatatagaaattgtttttgccgatacaaagccagaattacaggataggtgatagaacaaaaaagggggctggttgattttccatggggggggccaacttacacgaaatttaacagccaagggactaattaacatacaaatttaaaggtaaccctcctcccacataggaagcatgttttttggatgtccgaaaaaaagctttaacggggaaaccacactccgaaacctaatttggaggggggggttccaaaacgggcccccaaagagaagcaacccaatacttggaggccttgacggggagggtcttggggggggcgggaagaacacccttggag

SEQ ID NO: 110433 - DNA, 1266 bp, Zea mays
  Clone ID: MRT4577_32208C.1
gacccactcgtccgctgactcttgcgtgcctcgagcacgacctttggcctgcattgccgtggcggcggttgcgctcctctcgccgacgctcggagcggagatggtcgagcggcagttcgtggagtgggtgcgctacatgggcggcctacggcacagcacgttccatcagcacgcgctggaccgcgcgtgcacatcgtactcgctcgtcgtcgacgcgaaccctgcgttcggagacttcacgaccatagatgccgccgtcgactcgctcccagacatgaaccgcgtacgtgtcgtcgcagggagaaggtgaccgtctcggcgatgcgcgcgttcatcaccctggagggcgccggcgcggacaagacggtcgtgcagtggggcgacaccgcggactcgccgaccgggcccaagggccggcccctcggcacgttcaactcggcgtccttcgccgtgaacgcgcagtacttcctggcaaggaacatcactttcaaggtacgtacgtagccggcaccacgcacccgtgtcgtgtgttccctagtactatatatatgtgctccttagttctggcgttggcgcgcgggacagaacacgtcgccggtgccgaagcctggggcggcggggaagcaggcggtggcgctgcgggtgtcggcggacaacgcggcgttcgtggggtgcaggttcctgggcgcgcaggacacgctgtacgaccactcgggccgccactactacaaggactgctacatccaagggtccgtggacttcatcttcggcaacgcgctgtcgctgtacgaggactgccacgtgcacgcgatcgcgcgggactacggggcgctgacggcgcagaaccggcagagcatgctggaggacacggggttctcgttcgtcaactgccgggtgacggggtccggcgcgctctacctgggccgcgcctggggcaccttctcccgcgtcgtcttcgcctacacccacatggacgacatcatcgtccccaacgggtggttcaactggggcgaccccaaccgcgagctgacggtgttctacgggcagtacaagtgcacgggcccgggcgcgacctatgccggccgggtggcgtggtcgcacgagctcaccgacgacgaggccaagcccttcatctcgctcagcttcatcgatggcaccgagtgggtcaggctgtagctgtaaatctcgcagccgctcacgccaccacgccgcacactgtaaagaaacagagcaagacagtatatacagattttatactttccgttc

SEQ ID NO: 110434 - DNA, 1010 bp, Zea mays
  Clone ID: MRT4577_32209C.1
ctcgaggccggccgggacaaccaacttcagaattctgaaagggacacaccgtcataccgacagcgaagacctttgccgtttttattcttcctccgtctctgcctgtacagcggcggcttggccacctctgagcctcaagccctcaacctccctcttcggcgcgtaacgtcagtcctcaggtattggcagcataaagtgttagatttgtccttgattgaggtaccccttcaaaggtcaagatgttgtggcgcgcagtacgcagtatggatgtaataatgcattcttcgagtttccttcttccgaaactgtatcaacctgtcaacaaaccagtcaagaactatgctttagttgttctaaaccagcatcttccacgattcatgcctcgactctgggatcatgcaaacttgaggatctgcgctgatggaggagctaatcatatttttgatgagatgtatcagataaccaatgatgaagacaaaaaaagcaccagaaataagtatgttccagaaataattgaaggggacatggattctataagacctgaagtaaaactgttctactctagtcagggatccaaaatttctgataagtcacataaccaggagacaacagatctacacaaatgtatttctcgaacccatcattgtacgcctgatgatgaaaaaccaaatgtgaatcaaagatgagatttgggagcatgataagcacatccaacattgtgcagtcggagaaagtaactgtagaatctgatgcagatctcttgtggacaatttctctgcgaaatctgacataagcagttcctagtttgttatcttttttcttctctttcctgtcaagtggcaaccaagctcttgtacagccacttttgtgtttatgagttgtgtgtctggtaaataaataccatctgatgacaaatcgatgaggtctcatcattagacaggatgtctaccacgatcttgaactgctgatgaattatgtgaataacacgagcaggcatgatggttgtatcc

SEQ ID NO: 110435 - DNA, 776 bp, Zea mays
  Clone ID: MRT4577_3220C.1
cattgggtacctcgaggccggccgggatgcagtatgatcgatgcaatgcaagcagtctctctcatctcatgcaatattgcaaacgcagtgccccacctcacaaggccatccccccatgcatgtgcacacacacacacacacacacacaccatatatctctccacctacaccctgcctgcctgcttgcaattgcaattgcaaccaataaccatatacacacagctagctagcttcacatatcgcaagcacccagatcggcaggaccagcggcagcggcagcggtgccggcaagaagcaggccgcgcgctccactctccgaccccggccgaaacaaaggtgatggcgcagctgccgccgagggcgccggggggcgccgcgccgcaggaccactggtcggcggcgggggagttcctggggttcgccgcggccaggcgcggcgcgcaccgccgctcggcgagcgactccgccgcgttcctcgaggccctgcccatggaagacgtcatcggcggcgacggcttcgaccgcctcgacgacgaccagctcatgtccatgttctccgacgtcgacgcgccagccgtctccgccggggacgcggcgcagctcatggacgtggcggacgccgacgcggacgacgacgggtcggccgtcctcgtcgcgcgtcgccgtggacggcgtctccgttgacctcaaaaggttcaagacgataattggcaaacaggcagtcagcgcagaggtcacgagtcaggaagctacagtacatctccgagctcgaacgg

SEQ ID NO: 110436 - DNA, 1405 bp, Zea mays
  Clone ID: MRT4577_32210C.1
acaacacacttagaattctgaaagggacacaccgtcataccgacagcgaagacctttgccgtttttattcttcctccgtctctgcctgtacagcggcggcttggccacctctgagcctcaagccctcaacctccctcttcggcgcgtaacgtcagtcctcaggtattggcagcataaagtgttagatttgtccttgattgaggtaccccttcaaaggtcaagatgttgtggcgcgcagtacgcagtatggatgtaataatgcattcttcgagtttccttcttccgaaactgtatcaacctgtcaacaaaccagtcaagaactatgctttagttgttctaaaccagcatcttccacgattcatgcctcgactctgggatcatgcaaacttgaggatctgcgctgatggaggagctaatcatatttttgatgagatgtatcagataaccaatgatgaagacaaaaaaagcaccagaaataagtatgttccagaaataattgaaggggacatggattctataagacctgaagtaaaactgttctactctagtcagggatccaaaatttctgataagtcacataaccaggagacaacagatctacacaaatgtatttctcgaatccatcattgtacgcctgatgatgaaaaaccaaatctctgtgtacttgttactggagcactaggtggaaggtttgatcacgaggcggcaaatatcaatgttctgtatctgttttcggacatgaggattgtcctcctatcagacgattgcttgatccgacttcttccaagaacacatcgccatgagctttatattgagtcgtctgttgaaggaccccattgtgggcttttccctgttggagcaccatcaacaagcacaacaactactggcctgaaatggaatctaagtgaatcaaagatgagatttgggagcatgataagcacatccaacattgtgcagtcggagaaagtaactgtagaatctgatgcagatctcttgtggacaatttctctgcgaaatctgacataagcagttcctagtttgttatcttttttcttctctttcctgtcaagtggcaaccaagctcttgtacagccacttttgtgtttatgagttgtgtgtctggtaaataaataccatctgatgacaaatcgatgaggtctcatcattagacaggatgtctaccacgatcttgaactgctgatgaattatgtgaataacacgagcaggcatgatggttgtatcctctctagttgtataactgtattgttgtacttgcaacggggtttcttgtataaaattgttctcaacagttcacactgtatggttggattttgtaatgagtctggcaattgggtacagtgatatatgctaatccatctgttctaatgtaagacattttagattt

SEQ ID NO: 110437 - DNA, 379 bp, Zea mays
  Clone ID: MRT4577_32211C.1
ttttctaggataattccgacaacgagggtgtccttataaacacaaccgcttaagccctaagctacatatacaactgaatatttactacacttttggtgggcataaacaccctaacaggtttatataaacatgtagattacacgaccagaacatatacgtgaaactgggcacttacacaaaggccacgaatgacattagaccattgggtacaaacttttgtcgaccaagccgaaaacaaggcgcttgacatgctccacgttctagacctgtgttttatcttttgggggagctttgggaattttgctcaaaactgtggcatccatgaccgcgtatagtttgcagagctacctgcgcgcctatgcaacaaaattggccacct

SEQ ID NO: 110438 - DNA, 183 bp, Zea mays
  Clone ID: MRT4577_32212C.1
gcccaccatcgcgtctcacgaggtgagtagtcttccgacctgcgagatgtcgttcaccacgtccgactcgttgactacggcctcgaaccccacctcctccgcggcccggaccacggcgtcgaggctgacgagcacgcgagtgcagcggcgcgagatgaccagcagccgatgcttcctccccgt

SEQ ID NO: 110439 - DNA, 692 bp, Zea mays
  Clone ID: MRT4577_32213C.1
attccgcgacagctacgtgatctctccgccactctccacgaaattccctcgccggcccttctcccatctctttcgcgccccatttgatctattcctgatggagccgcaaggacaacaagaaaccgcggataagaagccggtcgaggacaaggacgagaacaaacgagggctgacaagcgcgacgccgagcaacgtcgtcggcgagaataagggaaagactaatgctgagacgactgtcgagacggacaacatctactgtctatcatggtgctctggcgggagcacccgtgaacttggcttctcgtccaagggcttgtgcatcatggactccttcatcaacgacatctgctagaagctcgccgccgagggcgtcatggttgtccgttacgacaagaagaccaccagtctccttcgctggagatccacacctcggttacgcctcgtactcaccgcccagctcgccgagtacgcgcgtatccagagcgtatcaaggttgcctacctcgtccacatcctcttaagatgccgacgcacgtagctacgatcctggcttgttttctcatatttaggactggtaggctgatcgcgcacctgtgtagaatcttgctatacttgctgaatgtcacggttacccctgcctgaagtgtctaatatattgaaatcttgctagaattccttgcttcaaatcttgat

SEQ ID NO: 110440 - DNA, 579 bp, Zea mays
  Clone ID: MRT4577_32214C.1
tttttttttttttttttttttttttttttttttttttttttttttttttttttttttttttttttttttttttttttggactaaagagcacaggcatttctaccagggggccaacaaaaatgggccaaattacaacacaaaaacccgaatccaagcaattgcattaaaaagctagacgagaaccaagaccgccaaaaaaaagggcccaaaaggggaaaaaaaaaagggggggatcccactattaattttccttgggaaaaagaaaccccgtaacgaaccgaaaaaaggggatttttgggaccccgaaacccccaccacccccagggggggggaaactgaacgggcgaacctcgggcttaaaaaaaaaataaaaaagccctgggtggaaaaccctggcaagggaaaaaaaaacccgccccaaaataagggtcggcttcccacccggttaaaaaaaattggggccaaactcaaaaaaaaggagccggcccttttgaaaaggggcaaaacccggttggtttaaaccaaggaaagtttggggcccaccaaaaatttaatcaaattggcggaaggctggtgctc

SEQ ID NO: 110441 - DNA, 378 bp, Zea mays
  Clone ID: MRT4577_32215C.1
ccgggcagcccagaaccagaggagggagccgccattgctgcagatccccaggagcttcttgagggttagagaggggaggatgacagttagagtagtgatgaggtaccttgttaacaagctgggccttgacgacgattcacagttagagattacctgtcgagggcaacaccttcaaccgacaatgacgctgcagcaggtccgtgacaccatttggcggccagtgccggctgaggctgcagcggttttgccggcccccggctcaccaagcacaagccaggtcatgactctgcattatggcagatgctagcacatggagagcggagcaacaacagacaacttttcacactgtaattagattttcagtgcccacaggcactg

SEQ ID NO: 110442 - DNA, 258 bp, Zea mays
  Clone ID: MRT4577_32216C.1
ccgaagcgatccttagcggcgctttttttttttttttgctcaaaggtggtgtacctttgcgcctggtcccgaatcgacgaccgaggtacagttctatgggcgattaactgcgaatatggtatactgttctgggaaattgtatcgtacaattccacacatacaccgaagctaagtaagctggggctaagggactactacaaattggtggctactgccctttcatcgaaacgcggccctgcttaatgaatcgcaacccgg

SEQ ID NO: 110443 - DNA, 2291 bp, Zea mays
  Clone ID: MRT4577_32217C.1
ggccgcttttttttttttttttttcttttttttttttttttttttttttttttttttttttttttttttttttttttttttttttttgcatacttcagcaagatatttcctttaaaaaaaacaaagcactgaaaacacatagtaacatgttgacacggaccctctgtatcttggttttagcttgacaagttttttttggacaatactaccaaacatgttcccgttgtaatgcacagaaaatctagtagtatatttgtaccacattaaatgttgcccaccacatcattacgaatttgaaatggatgactatgaaatttgcgcagtctgccggtagcaatgaacagggcattgcctaattgttgatcaggtatatatggacacacctaaatgtagttgcagtgactctcactttgtccattgctcaaaaacgagtttctggccaccatttcttccaagcacctggcgctgtcaaccccgtccccacggctatgcagttggaatgacttatttccgtccattgctcgaaaagagtttctgccccccgccattcttccaagcacctcgcgctggcaaccctgtctcagggccttgcaattccctttctggacgttcagggcttgcacttggacgacttaaatcaagtgtggctaatgagttgtcacctaaacgagctctgagaaactttgctgtcttcttcggttgcttattgcctcctcccttgcctatgttatcttttgcaccagatgattttgagttggaactagtatcactgtccagattagatgaagatccagctgccggttggacccccttggaaggtcgatacccatccttcgacagcacctcagctcctccttcccgagcctgctggtttgattgaagccttcttacagtctccagaatgttatctgctagtgcactattcacatcattagcagcactgctttctgtgacaggagctttccccttccccttctttttacggttgccctcttgtgagctagttccacctccgttttcttgtaggcttttaaatcgagtatttgtataatatgcatcagcaagttccctctgtttttgaggatcaggcaatagcctagccatttcaggaacaaggtgtgacagtccaaactgctcgacatatgaaagatactccagagtacctatgataccttgacggtattcaccagcaatctctttgaatgcagagtacctgtcctcgtccattcccagagcagaacgcattctttcaaccagagttttgtttgcagcacggaaatcctctggaacaggcaaagtttggttaccttgaggaggatcctgacttttgttgctaccataagctgtactcaatgatacttgggcagaggatccaccagacacaagattaggcgtagaaacagagtgcttcatcttgtttggagcaacaggattccacactgtgttactggagatagttggcatggcattttcccttgttggttgagttccagatcgaagctgagaatatccagacaggactaggccctgatcaggtgtaggccatgtctgggtggaactagagagggcttcaacattttcagggggacgtggccgagcagtattaagtaccttcacagggcccttgctacgttgttgaagtcttgctgcaagtgtgctcttggctagactttgtagtccctgttggactgaaccagcacccctattgttattagacccactagacccaggcaaaggggggaatagtgactcatccccaagcctcgcagtgccccttgcactctgactgagagctagtgcataccttgattgctgctcggataatgaaggaaatgaggtttcatcatgaaaagaatcaacgttgttgtcaggaatatctgggtctaaaagaggtgggaaggacaactgttcgagcacttgtccagtcctcgagccttggccaacttcagctcccccagaactagatccaatgcttaatgactgaaatgaccctgaaacactatcaagacggcgatcggcagttgcttggccgttttgtgcagatgatgagatatgactgtcaaatcggtcatggagagcattacgccccctacctctgccacgccgttgtgcttgctcatttctgcgatatataaaactggtaggtatctgaagtgcagcattcctctgggaacgagacattcgcccaccgtgctccatagcattatgcctcttcagctctgcttcactcagaaaaacaacaaacttctttgccaagcatgcttcatcttcacaaagaaaatggtcctttc

SEQ ID NO: 110444 - DNA, 445 bp, Zea mays
  Clone ID: MRT4577_32218C.1
ccggccgggaaaccaagcaacccaatccaaaccagacaggcagggaatcccccgatggctcatagcgttctcctactctctctctctacgcgtcggccggcgctgggtgccgccgccgacgacgcagtacgacacctgtgatccggctggtggtattccggggcatatgacatcgatctggatctgaacgcggcaccccacttactgagcttctggcaatggatcggtgagtcctacgaggacgccaacgagcacgcgtaccggctgtccgcgttgaaggccaacctgagccgcgcgcgcctgcaccagctgctgaacccatggacggagcaaggatgcactatactgtccctcctgacgccatcggaggtccctcggaactacctcgggctatgaaagtagcattgcgcaatcctaagggaactatacgagtcggagcatgaga

SEQ ID NO: 110445 - DNA, 424 bp, Zea mays
  Clone ID: MRT4577_32219C.1
ttgttttaaacattcagataattctattattttagggtgctttcatattactgttcgtatatgaccgcattaacaagcttgtatatctatgatatatatcgattaaagactttttttttgagctcgctccctcgaggcatctgcatgcctagatggatggtagtgacaaagtgaagcgtgtcggctacgtgttcggtcgatcgtggaccgaagcctatttattattgttgggccttccctagcggagcccattactggcccgtagccaccacagcgggcgttggtgtcagccactggtccggatccggaggcgaaccagcaaaagtgcgcccggttgcagtgccatgactgacgagaccagcacctcttggttgacttgtagctgccgtccggtccgctgctccgcttgcagcagcatgtggtt

SEQ ID NO: 110446 - DNA, 364 bp, Zea mays
  Clone ID: MRT4577_3221C.1
aaaacaaggccctccaaggggcggggattttaattaattattacaaaacagcatgccgattggccgatcctcattattacaatttggataatacgccaagattttccacttggacttgacaacaagtagggaatataaaggggcaggaaactccatttgcctagggaaaacaaacgctgcccgttcggaatttccatccaaaactgacaaaacccccccttcccgaagctggtttttggggggccctctggaggggggtgaaaaaaagccccctagccagggttttgcatgccggaggaaatgccctttatggggaggaggaacgtgttttccaagccgggcgggtacttatttgccgggttta

SEQ ID NO: 110447 - DNA, 394 bp, Zea mays
  Clone ID: MRT4577_32220C.1
gatcatgaacaaacattaatgatattaaattacatttgtaccttcggcttgacagaaggtaagaatccaagagtgacgtacgagtgattacaagtcagcgtgaacagtacgatgttactgttcatctatttataggcacatgacgtaggctgggtaaaattacattcatgtccctgacatttactattagctaaaaagtaagctgtcgagggctaagctgtcttttcccttttaagtcggtttcattctccatcgtcgtctttacgccaagccgaagcttctccgtccacagcttcggaactagtccatccttcttccaagtcgtgcctttcatactatgtacaccttcatctcaaagccgaaacctcctatgatagtaaatcggacgcgtggg

SEQ ID NO: 110448 - DNA, 275 bp, Zea mays
  Clone ID: MRT4577_32221C.1
ccgtccggtcaagattcttggggcgcacaaggcaacaacatgacgccactgtacatactccggactagacttgcactgcaccgcgtggagaccccccagcgccgcactcaatgaaaagaaaggggctaatgggctcaatggtatcagtccccataaacagaagggataaaagatgcatcaagccggtctaagtctgcaaaagcacttgattcaacactacctgaagacagggctgtactcacaattggagggctacttggtgcgcttccataact

SEQ ID NO: 110449 - DNA, 298 bp, Zea mays
  Clone ID: MRT4577_32222C.1
tcgcatgcacgcgtttttttagcttggttcttttaaaacccccgccctttttttttttttttcgagaaaaatctcaaccaatatattgattttttctaggtaaaacatgccggtctgagggcaccattatcgagttcatcttatatgtatatctaaaagatggttaccttcaacgatgggcttgctgctctcgacaagtacaggatttattaaagagaaccggttgtttggcagcaattgttgctgttgtaggaaggtatctactaatgggttagcccctgacaatggcattaagtta

SEQ ID NO: 110450 - DNA, 217 bp, Zea mays
  Clone ID: MRT4577_32223C.1
tcccccggcctgcaggatttcggaacgagggacgatgcagccggcccaccttcgctgatgactaggacacacagacacacaggacgggcgggctccaaagccattgcgcgtgtaccatgcttcctgctgcgctcgatcggcagcaggcagacaatagggtcgagaggagatgcaccaccacttacttgcaaccaccacagcgatggacgagggagca

SEQ ID NO: 110451 - DNA, 960 bp, Zea mays
  Clone ID: MRT4577_32224C.1
gaaccctcgggtgtcgtatgactgttgtactatactatcaaatataattatataccgtggtaacagtaaagatatagtactgtagggtttaaaataggagatgtagacgagagggccataccagtgcctgcagccagcaacccggcaccctccacaatgtgccctcgtcggtcgtcgccagaagttgtggtcgaggtcgaccaacactacgcactcgacgccccggctccgcgctcgagcgccgcgccacctgtcgcacgcgtgctcgatgccccgacacggtgcgctctacacgggcaggactgggcatgggtactcccggtagccaaattgattttatccacattaactgcctatttaaagtggaagcatacaaagttctgattaacatttttgaaaaacatacgaagaatgtcacttagccattctaagtagccatacaaagttctaactcataaatttttttacaaagttttgattcacattgatcatagttcatagactggcaggctggcagcatgaaaaatacattcaggttctctgcagtagtgctactgctattaccggttgcacacactcacagggagacagggacatctccaatcccaattcgccaagatccaagagcccaagacgccaatgccaaatagagacagggatatggctcatgcacacacagacaaagacacagtcgacacaggcagcagtgcagcacgccagcaccgattgtagacttccagtgttgcacttgcagacagggagacagggagatcgccaacgccaaagggggacatggacatgcacagacacacaggcagcaccggttgcacacagtccagctatcctgtcactttggagaagcaccttccaccaaatgagaatggcgatcttttttctgtatcttcagatagatatttgtcaagttcaccaaatacgacgagttgtcaaagttttagaaaa

SEQ ID NO: 110452 - DNA, 268 bp, Zea mays
  Clone ID: MRT4577_32225C.1
atcacaaattcacaagtatatagctcacaagagtcacggaatgtacatacgcttgtgcatactgctacgcatgacgtttacgtacacccagacccagctacgcatcgacccctctccgcgtacacgtctgagcaaacaaacgctcagcggtcgcaacaattcctctatatattgtacattgaatgctgtgtacacgcaaataaaacacacacaccatgaccccagtacgtattcatttcttggatcggtcgagtgcaaattcgatcat

SEQ ID NO: 110453 - DNA, 1740 bp, Zea mays
  Clone ID: MRT4577_32226C.1
aattcggcacgaggagctaccagtagatagaagggtaccatcaaattggataaagataaatagcacaaaaaaggccatcagataccacacccctgaaatactgaagaacctggacaagctattactggctaaggaggaattggctgttatatgcaggtctatgtggcataaattcctcacagatttcggcaagtactatgcacagtttcaagcagttgttgaatctcttgcagctctggactgcctctactcacttgcagttcttgcaaagcagaataattatatacgtcctatttttgtccatgataatgaaccaagtcagattcacatcaaagatggacgccatccggttctggagtctttacttggagacaactttgttccaaatgacacagagcttcacgccgatggtgagtactgccagattgtcacaggacctaacatgggaggaaagagttgctacattcgccaagttgcactaattaccatgatggctcaggttggttcctttgtaccagcttcatcagctatgttgcatgttgttgatggaatttataccagaatgggtgcatctgacagtattcaacaaggaataagtaccttccatgaagagatgaatgaagcttcaaacatactgcataactgctcatctcgatccctagttatcatcgatgagcttggtcgaggcacaagcacacatgacggtgttgctattgcttactctactttacactatcttctcaaagagaaaaaatgcattgtcatttttgtcactcattatccaaagatccttgatatacagagagaatttgaaggttctgttggggcataccatgtttcatatctagccactaggaagcttttggaagtgactggtaaacaggtggaaactagcccagaggcaaatgatcttggagaaattattttcttgtacaaacttgttgctggagcttcagatagaagctttggacttaatgttgccctgcttgcacagcttccgtctagatgtatcaagagggcatccgtcatggcagccaaactgcaagaggagttaagtccgcgggaggaaatcaagcttcggaggacaacggatgcacaaactgtggacggaccatctgaaagttccgcagaagttggtttgttttgtgcacatccttatcaacgattggcagaaacatgtcgcaggatactgctgaacatcacgttggctcaaagcaataatgatgtaacgaacacacttccttctttgaaaaatgcacaggaaattgcacagaagacgatatgatgcagcggtccatttgacaactgacatattcttcatcagtgtgaagggaacttatcaggtatcatgtaccttttttttgctacggaggatccctaatggtggtaagcattttgctggagccgtttgtgtaacccatactctgccaggatagcgtggttaagcattttggtcacaactcaaagcagtgcctgtgtgtagttggagtgaactccgtgatatatactggagtacttagggcatgtttggttcgttaccccaattgccacactttgcctaacttttctgcctaaggttagttattcaattcgaacgactaagcttaggcaaagtggggcatagttagccacaaaccaaacaagcccttagtatgtaactctatattccgttcattaatttatctagaactcgtttcgttgatgtaaatgcagagaagggatgcgtttactttttttttg

SEQ ID NO: 110454 - DNA, 481 bp, Zea mays
  Clone ID: MRT4577_32227C.1
gaagctcggaattcggctcgagcgctatgcaaaaaggccttgggctgcgtacgaggcacatatctagaggggaagttgctcctcgagaaaaagagagcatcactgatcctagtactccaaagcctaatccaaatgcgatcagttatgaacataaagctaaaaccgaccaccatttcaaactggttgagggcgaacttcatgtggaccccaataaagattctaaagaaagactatatccaggagccgatgcaactaccttctttactgatgtgcactacgaactcagtgtgggggctagctggggatagccgaaccgtgtgtgataaccgttaaaatcttctagagcaaagatgtaatctgcacttgatggacaatacggatagagaactgcttgctcagaaggctgcacctcaccggaacttatacattgttaggaaggatgatactccatgtcatgactcagcatgcatgaaccaaaagc

SEQ ID NO: 110455 - DNA, 458 bp, Zea mays
  Clone ID: MRT4577_32228C.1
attcggctcgagcgaaccatttgtcaaaacaccttgtttcaaaacaaggaaggcgctcatagttggctgggacccaagataccaacctctggttattcattgtaagagaggccagcaccgaactgcttgcatgatcccgtgcttgaggatgctgccgatacggtgcttgtcttcagtcttcgacgagtaccatcaactacgactgtgtgaaagcgcggatcactgaccagacatgcatcggagctgtgctacgtcttaagcttgaggcacctgccaccctcacatgtgcaaccccagggagcgtgtatccttgatgcccccatactgatgagacatctccaagggtatcatccgcagctactgcaccgattgagccgtgaacaatcgtggaaccccctagagtccatgaggtagtgatcagaccattgcagaacatgtctgctagagagggttacttg

SEQ ID NO: 110456 - DNA, 728 bp, Zea mays
  unsure (1)..(728): unsure at all n locations
  Clone ID: MRT4577_32229C.1
atggacaggctctgtcgccactgctacaccactacaccagtacaccctgcacgcgctgcgggcgtttccgccggctttgtgcctcctctgccctccccggccgctcgccctccgtccacgctcaagctcgccccgtcccggcgcctcgaactcgtcgtcctcgcttccgctgtcgccaccgcgaagcatgaggaggcgtcctgggatcactggcttgcagaatgtggcggctactctcaaccagttgggactggtcggggagaatatggccaaggtcgggaccgatgtcatgaagaagcagcgacttgggatggtccgatcacagctcgagaaatttgcttgcaagcataaggttttgagcaggtttggtgcaatctgattttgaacctgctatggacatcttccactcaagttcttgtcaatggagtgcctggacagcctataaatctncaagcgtgggttgcaacaagaaaacatccttctctaccngtggggttcgacctgcccggactggttcaggaacccaaaggatggttatccttgttccaggttggatggcaatggcgatgatgactttgtgctcccggccaaatcagacttctcagaacaacaaggttgctctgccaccgggtgggaggatccagtcccactgtcgatccttgccagctgccctgcatcccatgaagatgccgaatttgagcncgacatggatgaggtcagaaggattt

SEQ ID NO: 110457 - DNA, 159 bp, Zea mays
  Clone ID: MRT4577_3222C.1
gacaaccttagcacgattattcgcacaattctcttagataaaaaaccagaagaaatcccactgattgttgaatcactactaaacaaagttattcaggaatacgagcttcgctttgcaaatcagaacttgatggatgaagagaagcaaaataacttgact

SEQ ID NO: 110458 - DNA, 367 bp, Zea mays
  Clone ID: MRT4577_32230C.1
ggacgagctacaattacttgaaggagttccaccagtttctagaagttgtaaagaggtaaatgactttgttggtactaaacaagacccactaataccgataacgaagaagacacacagatcatgccgtcttttttggtggatcaggtttgcattccattacttattcctgccattgatcgcatggtgggtgcatcaaaatcttgataatattttgttatagtttcacctaaaaaacttgtacataagatgaatcagcaaaagtttcttggagaatgcaaatttttttagataattgaagaaatatccagcttcatcctttaaagagaggaatgggaccaaaattattataagttaaaccacaacaacg

SEQ ID NO: 110459 - DNA, 860 bp, Zea mays
  unsure (1)..(860): unsure at all n locations
  Clone ID: MRT4577_32231C.1
gccactgctacatcagtacaccctgcacgccccctgcggccgtttccgccggctttgtgcctcatcagccctccccggccgctcgccctccgtcaccgctcaagctcgccctccggtccccgctcaagctcgccccgtcacggcatctcgaactcgttgtcctcgcttccgctgtcgccaccgcgaagcatgaggaggcggcctgggatcactggcttgcagagagggggggggtactctcgaactttcagaaccagttgggactggtcggggagaatatggccaaggtcgggaccgatgtcatgaagaagcagcgacttgggatggtccgatcacagctcgagaaatttgcttgcaagcataagaaaacatccttctctaccgtggggttcgacctgcccgactggttcaggaacccaaaggatggttatccttgttccaggttggatggcaatggcgatgatgactttgtgctcccggccaaatcagacttctcagaagaacaaggttgctctgccaccgggggaggatccagtccactggcgatccttgccagctgccctgcatcccatgaagatgccgaatttgaggccgacatggatgaggtcagcaggattttgagatcccggtttgcttctccagaggctattgtgatcaccatggactgctgccctgtcagggtgtcagcacgtcttgtcagcaaggtcctgagcaggttcagcaatgattgggtggccgcatttgngttcttcatgtgnggcgngactcaggaaggctactgtcattgtgctgattcatatgacatgatggtagacatattgggcaaattcaagcagtttgatttgatgtgcgggctgatc

SEQ ID NO: 110460 - DNA, 443 bp, Zea mays
  Clone ID: MRT4577_32232C.1
gaccgacgcatgcgttgcatgttacagtctaatcatgtcatcaaagtatactgtgtcaggtctcttggacttctctggcgtggaaaggacattgaacctatcttcatgctgcagtcttcaatagggcaactcaccattacgtggccccaaaaccgttgggttcagaacaagctcatggaacgtccagattagggtcaggcaccaataccattgccttgatcgtatcgtatctgtgattctatactgagggcacatccataagctaaactgctttcaagtcagacacccagctaagtggtgatatgcagactgcaagtgcctgcaaaaggccttctacctctgttcatggaaaccgaacagtgaaataaccaaactgcatgtgttgttgcatcaatctacttgtcccccttctcttttgatgctttcctaagacttaatttgac

SEQ ID NO: 110461 - DNA, 336 bp, Zea mays
  Clone ID: MRT4577_32233C.1
gctattcgttcgcggacatgtggtttgccaaaggtttaatgagacaggtaaaccagtttatttttcaacaggcaaatttattgttctaggtagatggctggtaaatggaaatattgatggtgacgtatatctaaacacttacacttacactaagcttaaagagtcgaagaaattgaaagctcatgactacaatgatgaagtgtgggatagtctactaactgctactgaccttgtttataaataagctaatggtaaaacaacaaagtatcagatcttcggtagtgtctcaatcaggatgggccttcatattaaaacattacacgtggatcactacat

SEQ ID NO: 110462 - DNA, 407 bp, Zea mays
  Clone ID: MRT4577_32234C.1
ttttgttttttttttttttttttttttttttttttttaccacgcaccaagaaaaaaaaactgggacatacattatgggggggacatttaagtggcaaaaacaaacaggaatttttaagcaacaaatacaattctcctatttaacatttatctgacgcgcaccatgatcgaatgaaacctacaatcgcttgaggagcatggggaggcctttccttgcgcgcagggggatcaagtccatgggcgcgtggacctatttcggggacagcttgagtgcaaacctttgcaggatcatggggaccacgggctttgccttgatcatggtgaacttatggccgatgcacgaccttgggcccttggaaaaggataacaaggccgtgggggtgttatggccaacctttgaaaccccgt

SEQ ID NO: 110463 - DNA, 392 bp, Zea mays
  unsure (1)..(392): unsure at all n locations
  Clone ID: MRT4577_32235C.1
cggacgcgtgggcggacgcgtggggtacagcaatgtcccgcacacgaagctggtggaggtgaagggtcaccagaactgggtgaaggtgagcgggcagtacctgacattccccggcggcggcacgcagttcatccatggtgcgctgcactacatcgacttcctgcagcagtccgtccgcgccatctcgtgggggaagcacacgcgggtggtgctcgacgttggctgcggcgtggccagcttcggcggctacctgttcgagcgcgacgtggcgaccatgtcgttcgcgcccaaggacgagcacgaggcgcangtgcagatggcgctcgagcgcgggatcccggncatctcggccgtcatgggctccaagcgcctgcctttcccgagcaagtcgt

SEQ ID NO: 110464 - DNA, 512 bp, Zea mays
  Clone ID: MRT4577_32236C.1
atcggagcacgtcgtttgctgaggtagcaccggatcatgaagcgcgtgctggatgaaccgcggcgttggtacggcgatcaggagtccaggcaggcgttcggcgacacccccacctactccagcgcgttgcaggcgctccattgtcaccggcctcctccactcactctgcaacgagccgtacccgttctgctgaatcgtcttttaggccaggcgtcaccaccaacgtcacggagtcaatgcttgcgcgctctgggctcaatttggttcacgtccctttgtctgacgcatgcccacgaatgaccaccgcagccactgaaactgtagctccacccttttctactgtgatccaagcgaagaacatggatggcgtacatgtctacaacgtcatcagtgatgtatatagcatggacctggtcgatgaggcggacaacgcacagtgcatgggcgctgtatccgctagaatccttgctgatactgtctgggtagacaaagtaccgctgactgtggacgac

SEQ ID NO: 110465 - DNA, 594 bp, Zea mays
  Clone ID: MRT4577_32237C.1
ccggccgggcccgtcggcccggtcatcccggcgcacgaggccatggaggactgcaccgttggcgggttccatgtcgaacgcggcacgatggtcctcgtgaatgcctgggcgatccaccaggatcccaagctctgggacgcgcccgaggagttcaggccggagaggttcctggacgccgccggtacggtgaccgcggtcaccacgcccatgctgccgtttgggcttggacggcggcgctgccctggggaggggttggcgttgcgtctgattagcttgacgctggcggcgctcgttcagtgcttcgagtgggatgttggtgaaggcggtgtcgttgacatgaccgaaggcgttgggctgacgatgccgatggccatgcccttggctgctgtctgccggccccgggaatttgtcaagggcatgctctctacttgaacatgatgagttaaacaatggtttttttataaacaaaaataaaaagttatgctatcagttattatcaaggttatgccgccatgcccttgacgctaccttttatatggatgttatacatgttagtaaaaatatttgagaccacaaaacaaaaataaagtggcc

SEQ ID NO: 110466 - DNA, 390 bp, Zea mays
  Clone ID: MRT4577_32238C.1
gacccacgcgtccgcaagaaattttgattcttctagtaggagctatgaacttcgaagttgcaatgcagatgggttcagtgacctatcaccatctgaaggatattatcttggagaaatgaggctcagacagctgcaacattggagatcatggagggtttgctccaaatatttccagcatatctgaaggcctggatcttgttattgcggcaatagagagggctgggcattatggaagaataaaattgacaatagatgttgctgctactgatttttgagtaagttgcatgggatgacttgtagaagtctgaccctgaacgcattatgcgggctgtttgagagtacacttgcaatgctctagttctcaaggcaaatcatgtgggcactgtcact

SEQ ID NO: 110467 - DNA, 339 bp, Zea mays
  Clone ID: MRT4577_32239C.1
atgggggcgaacctcggcgcggccgcgcacaacgtcccaccggcgcacatggagttcccaggtgctcgtggcagcgacgtccgtggattcttcgccaaggacaacgtcggagcaaccgtccatgctacgactacgaggcaaggcacgtactacggatggtgtagggtctcgtttcgtttgcatgcgcggtcgtggatcagcagcaagcatcggcacggaaactgtggccgatcaaaccatgcacaacagtgggcgtggcctcggcgctgccggtggtggacagcagccgcgactcagcgcacatgggaaaatcaaatattgtattggtgctctatataa

SEQ ID NO: 110468 - DNA, 239 bp, Zea mays
  Clone ID: MRT4577_3223C.1
agacaccaaacacgaaaattttgaccataggactcgatgaacttcaacggtacagggacacagtgtacaagttgggccataaaattgtcgccttcagcgcagaatcgaacgttacatggagttgagggtgaccgcgcgctctccggagcccagacggaacctcctgccagagctgctgtgacgtggccctgcttggctgggcttgaactggaaagtccgggaactgggaagcaagaatc

SEQ ID NO: 110469 - DNA, 233 bp, Zea mays
  Clone ID: MRT4577_32240C.1
cccacgcgtccgcgcgcctttcagcccggaccaggaggacgcgtcggtgctgtggacggaaagcaaggacgtgggcaagggcttccgctgcatccgcatggtcaacacaccgcctcaacttgacgccttcacgggacaggacacgggcggcacacggacccgtggctctgagtggcaggcaacaactgaaactgcggggcaggactctcgcacgagcgacggctttgagcgga

SEQ ID NO: 110470 - DNA, 401 bp, Zea mays
  unsure (1)..(401): unsure at all n locations
  Clone ID: MRT4577_32241C.1
gcaccgctgtatcactgcactgtaacttagctcgtgtatgtagattctgcgcacacacatgagcccgctcaagctcataggcaagtgcgcgcatattgggctttcaaggctagcacggcttgaccatgctgacatgcgaacactatatacagggcctgtttgaatgctcacaggctgtgctgcctctatgtacatcgcaatcgtgcccagcccgcaatcctgactactctatatgtaaatacattgggttcagctcgtngccaaaaaaaaaagggtatgggttggggtggtccgctggccggcgcaccggggttttaataaacttatattaacctgatgaaggtgaaggtgaaggtgacacgggattaatggcaaaaatgctcctagtactatttttgtaa

SEQ ID NO: 110471 - DNA, 1863 bp, Zea mays
  Clone ID: MRT4577_32242C.1
aagtccgccttcccccgtctcctctctgcctccctcgtgccctcgccctcctttttttttagtttacccgccgtcccgcgcgccgccgtttcggttgctcggctaggggggactgggggagtgccagcgagtccatggcagcggcgagggcgtgcttcgtcgcgctggcgctggtggcggcgttcttcgtggccggatcggcggcagcggcggcggggaatgccggaggccgctcgcagctgacgctcaggcagcggcgccggcagctgctgcggcagcggcaggtgcgcagccacctcaagaggctcaacaaggcgccgctcgccaccatcgagagtccagacggagacatcatagactgcgtgcatatctccaaccagcccgccttggatcatcctttcctcaagaaccacaccgtccagatgcggcctgcataccacccggaaggtctgtacgacgacgagtccaaggttgcatcgcagcggaacgcgcagacgatcacccagatgtggcatcagaacggcaggtgccccgagggcacgataccgatcaggcggaccaaggaggaggacgtgctgagggccagctccgtcaggaggtatggcaagaagaagcgcaggagtgcccccaaccccatgtcggttgaccctgacatgctcaacgagagcggccaccagcacgccatagcgtacgtggaaggagacaagtactacggcgccaaggctaccatcaatgtgtggcagccgaagatcgagcaggccaatgagttcagcctgtcccagctctggatcctggggggctccttcggccaggacctcaacagcatcgaagcaggatggcaggttagcccagacctgtatggggacaacaacactaggctcttcacctactggactagcgatgcctaccaggcaacaggatgctacaacctgctgtgctcggggttcatccagataaacaaccagatcgccatgggcgccagcatcttccctatctccaactacggcggctcccagtatgacatcaacatcttggtctggaaggaccccaaggagggcaactggtggctgcagttcggcaacgactacgtcctggggtactggccgtcgttcctcttctcgtacctggcggacagtgcctccatgatcgagtggggcggcgaggtggtgaactcggagcccgacggcagccacaccagcacgcagatgggcagcggccacttccccgaggaagggttcggcaaggccagctacttcaggaacgtccaggtggtggactccaccaacaacctcaaggcgcccaggggcgtgggcaccttcaccgagcagtccagctgctacgacgtgcaggacggcagcaacgccgactggggcacatacttctactacggcgggcccgggaagaactcaaactgtccatagcccaagactgactgagctgagccgccgcctatcacactcactaccagagccgcctaaccttaacacacctcagctgtatcattcatgcatccggtcaattagtttatactgcctcagatttttaacttttttttcgttttgtttcgctctttcttgcttctacctaccccctagtttactgactcctaccctaggtgagtgagcgtgtgtgttgtagacatgtgagattgttctctctgcctcagagagagtgagatgaaggagagatgtcggtcgtctggttctagggaagagatgaggaggactgtggcccgttttctgaagagaaaacaaggcctctcatggttgctgtgccttttgcctgtcaaataattttgtttgtttcatcccgaaaaaaaaaaaaaaaaaagcccttgttttctgttaaaaaaaaaaaaaaaaa

SEQ ID NO: 110472 - DNA, 392 bp, Zea mays
  unsure (1)..(392): unsure at all n locations
  Clone ID: MRT4577_32243C.1
tttttnttttnntttttttttnnttttttttttttnnttttttttttttttnttttttttttttttttttttttttttttcaaggaaaaatcaggccggttaatgaatccaacttcaaaaaaaaaatccgggctcagggaccacaacaggaaattttccgacccttacaaaaaatttttcctgtttttagttacaaggcagtttttttacatgggggaccccaactccaaatttaaaaaataaggaaccccacaaacccctgggggttgggggttaaaaaaaccccgtttttttaaataaagccatttttgggggaaaaatttttggccattttgggctcgcccaagggaggattaacaaaaaactgcggcctctgttaagctgttttgacc

SEQ ID NO: 110473 - DNA, 536 bp, Zea mays
  Clone ID: MRT4577_32244C.1
gacgcctgcggtaccggtccggaattcccgggtcgacccacgcgtccgcgagaaacccatttagggtgcttaacaagaatcaaaaaacactcgaacgaaaacagtttgtcgaagaaggtgagagaaagacagctgataagaagctgagagaaaacaatgagcagctcttggatcaaaggaaagaacagaagcccaaatctaacagcaggatggagaaggacccctcatctgacctggtggcaactagacagtctggaggtgacagggaagaacaagagaaatcaaagttccagcccaaaactaagaaagctgaaggaatggcttccaagcaaggccatgggagaggtgcttcaaggaatacccaagggtcctcacatgtcagagagtgagagtcgaggggtcccgaacaagccagagactctgagagaaaaggaaacccagcttttggtgccaagtgttcctggtcagaacccagaaagcaaggtccagaaagagggacacgtcagcagggggcccctcaagaacggggagggccc

SEQ ID NO: 110474 - DNA, 1005 bp, Zea mays
  unsure (1)..(1005): unsure at all n locations
  Clone ID: MRT4577_32245C.1
tgcatgatgtctttctcgttaacctgaggcatttattgcatggaagacacctaatccattcataactcaagactgagaacacaacgatcacagtctccctagcaatctctagcagcagatcctcgttcgaagccaagcgctagccttcctactgtcccgatggcccgcacgaagcagacggcgaggaagtccactggcggcaaggcgccaaggaagcagctggccacgaaggcggcgcgcaagtctgccccggcgaccggcggagtgaagaagccccaccgtttccgccccggcaccgtcgcgctccgggagatccgcaagtaccagaagagcacggagctgctgatccgcaagctgccgttccagcgcctggtgcgtgagatcgcccaggacttcaagaccgaccttcgcttccagagctccgccgtcgccgcgctgcaggaggcgtccgaggcctacctcgtcgggctcttcgaggacaccaacctctgcgccattcacgccaagcgcgtcaccatcatgcccaaggacatccagctcgcccgccgcatccgtggggagagggcctaggcgtcgtcgcggtggaggtggaagtagtagtcgcagtttctgtcatcactgtctggctagaagttgtagagatgtgccggtttatgtagtttgggttattggtcgaatcattatgtagttgggtcttcactgctgtaatttaactatgactatgcaatggcaatgaagttctcggttatcacttcccgaataaaaaaaaaaaaaaaaaaaaaaaaaaaaaaaaaaccgtggggagagggcctaggcgtcgncgcgggggaggtggaagtagaagncgcagtttctgtcatcactgtctggctagaagttgtaaagatgtgccggtttatgtagttggggttattggacaaatcattatgtagttgggtcttcactgctgnaattaaactatgactatgcaatggcaatgaagttctcggttatcacttcccgaat

SEQ ID NO: 110475 - DNA, 346 bp, Zea mays
  Clone ID: MRT4577_32246C.1
agggggagaagggaaattgttttggaaacccaatctgggccagatccattcttgttcttgggccggacgcggaaaccggcttgcttgtgcttacaccatggaaaaaagaatggcggcctcaatccaaaattgcacacaaggcagttccctaacatgtacttacaccttaatgatgctgcgcctacaaacgaagcatttaaatccatgtgggcctgcctacactacacatttttttgacacctccaaccaactcagtttactaccagcctgacctgtctttgacgaagggaccaaggaccactcgggatccgacaccccattgaacgccatggaggcctgggtggac

SEQ ID NO: 110476 - DNA, 822 bp, Zea mays
  Clone ID: MRT4577_32247C.1
cattgggacctcgaggccggccgggacagaacgatctcaatctccctagcaatctctagcagcagatcctcgtgcgaagcaaagcgctagcccccttcgtactgtcccgatggcccgcacgaagcagacggcgaggaagtccactggcggcaaggcgccaaggaagcagctggccaccaaggcggcgcgcaagtctgccccggcgaccggcggagtgaagaagccccaccgtttccgccccggcaccgtcgcgctccgggagatccgcaagtaccagaagagcacggagctgctgatccgcaagctgccgttccagcgcctggtgcgtgagatcgcccaggacttcaagaccgacctccgcttccagagctccgccgtcgccgcgctgcaggaggcgtccgaggcctacctcgtcgggctcttcgaggacaccaacctctgcgccattcacgccaagcgcgtcaccatcatgcccaaggacatccagctcgcccgccgtatccgtggggagagggcctaggcgtcgtcccggtggaggtggaagtagtagtcgccgtttctgtcatcactgtctggctagaaggtgtagagatgtgccgggttctgtagtttgggttatcggtcaaatcatgaatgtagttgggtcttcccctgctgtaatttaactatgactatgcaatggcaatgaagttctcggttatcagttcccgaatatatgcgtctacaatctagatcaatctgaatatatacatgtatcgaaaccttatattctatttaatagaacattcagctcatttacaaaaaaaaaaaaaaaaagcggcc

SEQ ID NO: 110477 - DNA, 987 bp, Zea mays
  Clone ID: MRT4577_32248C.1
tttttttttttttttttcggaaaggactggaatcatgatttgccgctatcaataggtaacttaggtagtgctaggtacctactgtacagcatcatcccagggaatagtgacagtaaagtcctcccccctttcaattccaattccattctcttctgccctttcttttctcagtgatgaatgagagagagatagagataatataggaaatgcaaaacagcagtaaacctcgcttcaattttccttttccttttctttttcagccgttcaagactcttgctttcacaggatccagaccaaagccgcccacctcaatcctaatcccgcatgatatcgattctctttcttgttcttgttccattcaaccgaagctgaagatgcccacccccattcttttttcatagttaggggggccctttcctctttttttttttttttttttctccctttttgtcttgtttttttctttttttttttttgatcaattgccggatcaatgtggtatcccggaaagttttgttgttggttgtgccatattcataaaagttgaaatgaataaaataaaatcatcgcttgcgctgtcataatttcacgcttttctcacaaaagcacgccattcacacataggttaccgtgactttcttcagtgaaggataacatcatgaaagtcggtcttgtgctcatcggcatgctcgccgtagtgaacaggtccaagcttgaggatgcggtagctgttgttggagctggagctggagctggacgactcagtcgaggctcgtcgaggagcagagggacgagtgtgagagcgggcagccggcttctgagggtatgagggagaagtggctggggcgagagacaggaaagaagacttgggagccggggtgagagggaggaacttttgaggaggaagagcagacattgtgaattttgtagtagtaaagagttgctgttgtggttgtggttgcggttgttgatggtgatggtgatggt

SEQ ID NO: 110478 - DNA, 429 bp, Zea mays
  unsure (1)..(429): unsure at all n locations
  Clone ID: MRT4577_32249C.1
cgccgccaccgtcgggaccggggcggcgcgggggagaactggatcgcgcagaccactctacatgtcaccatccccttacatgctcgatgggggagcgctacctctcaaatttgatggttgccttctggtacattctccgtatctccttggttctggggagaatgtgaagactctttccagaggggaacaccttgggcaaggcagactaaccatgtcaaacaagactgcttatgatctttgccccagtaattccatgggtttaaataggtggtaactacctaaccgaggagctgagaagaagtaatttaagcaagtgttacaatggagccctcgtctgtatcttccctggaagcccataggctctagnggtaatttcaatggaataaaaaaaaaaccggtggcaaggtttgaaaaaattttttttttggg

SEQ ID NO: 110479 - DNA, 287 bp, Zea mays
  Clone ID: MRT4577_3224C.1
aaacggacaccattaacgccattaaccattatcggacgacctgtgaagaatacgaacggtagtgcaatagccacacttatgaacataactaaattggaacgagttgatgaacggagcattcgtacaagcaagagagaatcgcttattccgacactggtcaaagcgaaaccaaacaacccgataacatgtactttcaaagcattccgacgaagatgatgaagtgggccacggagttctgacagaagccaaaccttcaacgggcgccggcttttattgtgagctcaaac

SEQ ID NO: 110480 - DNA, 254 bp, Zea mays
  Clone ID: MRT4577_32250C.1
ggaacccgggtctgcccaagcagtatagctctgagaagccttccggaaacatgaacaaccgatcttttgttcaaaagggagcaagaatacaatcattttaagcaacagaaggagattattaggcccatgaggaagcaggcaaatacataaaatcgcagagggattacccaaaaggggtgggagagggtaacattcacattgtgacttgacgagctactgttccaaacattggagggagcacatggcaggtagcc

SEQ ID NO: 110481 - DNA, 114 bp, Zea mays
  Clone ID: MRT4577_32251C.1
aatgaaagtggtacaggataatgatggaggggattctttgcaaaatatatagcaacagatgttagatccaagatgattgggcatgatttaatatatgcatcaaagtgttatgtg

SEQ ID NO: 110482 - DNA, 271 bp, Zea mays
  Clone ID: MRT4577_32252C.1
caaatatcaattcttcacacaatttaaatcacctaataccatcgcgacttttacgaatccctttaacattacaaacgcacctaacaaccaagcagcaacccaaatatccaataacttccacattatctcactttttaacccactgatcaacttacactatccacatataacacactatctaataacaaaaactctacccaacttcactactaatcattctaaacttgttaattacataacatactacatcactatcaactaatacacattc

SEQ ID NO: 110483 - DNA, 1299 bp, Zea mays
  Clone ID: MRT4577_32253C.1
gcgttcgtgtcaacctatggtgttccggctgttctgccagtagctgcgccgggctccaggtgggtgtggaactctgcgccgggttctgtagtctacggagtttttaacaggcgggcaccgggtagtgaagcgatctcgggctacacgaagtaaacaaaccgaagtggcctcccgctcgtcctcctcctctcctcctggacagcagagcacagcacaacacgccgagaaagaccccgccgccggcgggggatccacccatcgcttctcccgctcgtcctcctcctctcctcctggacagcagagcacagcacaacacaccgagaaagaacaagcagccgccaccggagctcagaaccaccatcagcagcagcagcacacccggtcaaccttccacacacgcgcgcacacacacatggcgtcgcagcagaggcaacagcaggcgggagcggcggcggcggcgtcctccgccgtgggcttcgaggactacctgccggtgatggcggagcggctgggcgaggacgggctgatgcgggagctggcgagcgggttccggctgctgatggacccggcgcgcgggctcatcaccttcgacagcctccgccgcaacgcgccgctgctgggcctgggcggcatgtcggacgccgacctccgcgggatgctcgccgagggcgacttcgacggcgacggcgcgctcagcgagacggagttctgcgtcctcatggtgcgcctcagccccgagctcatggacgagcccaggcggtggctcgacgacgccgtcgaccaggcggcccgcttcctcttcaccagctgatgatgacgacgacgatgattgataactaataattaaggctactagatgatcgttgagatgtttcttcttcttcttcttcctcctcctcttgccgctgttcatatagctggatggatcaggacttgtgctgatcggtcgatggattccatccatgtgtactcgtctgctgttctttccttcccaattcccatgttccaatggagtctggattcattaacatgctttctcctttctgaccatcaaaaaaaaaacgacgacactgaccataactaataattaaagggctctaatcaatcgttcgcaaagattcttcttcttcttcctctttctcttgccgctgttcatatagctggatggatcaggacttgtgctgatcggtcaatagattccatccatgtgtactagtctgctgttctttccttcccaattcccatgtaccaatggagtctggattcataaacctccttccaccttgtgtccattaatcg

SEQ ID NO: 110484 - DNA, 471 bp, Zea mays
  Clone ID: MRT4577_32254C.1
catcctccatgaccttttttgttaaacaattctaaaaagaggttttggaatgcaaccttaaaaaccttggtccctgcttccaaaacccccggcccacgaaagcatttcaaaaaaaagagggggcaaaccggggggccaaaaacaggcacacgggggccccccaccaaaaaaactccccccccccaaagccccccaaaaaacggggggggcttcaacgaccccaaagacgtacccccgggcgcccgcctggggaccaatcccaaatccccgggccccccatcaatcagggatcttgaaaaaacccaaccaggccttaatgccagccagggcccccggaaaaaccccaaaaacgtgggcacccccccccacaagaaatgcttttcggcccaccacaacaaaatggccacaattatccacccccccaaaaaactcataaaacaatactaaaacctcccaaaaaaaaaaccctta

SEQ ID NO: 110485 - DNA, 362 bp, Zea mays
  Clone ID: MRT4577_32255C.1
gcaaaccctgccctggttcaactgacgtggccgcctcgttcccggacagtacaccttggcatcttcctcttcgactaccacatcggccgaaccccaaccggtgaggatggggaacattttcgcgaacaaacccaacattaccggactggacagggccatcctcaccctgaagacgcaccgccgcaagctcgcccagttccagcaacagcttgagaaggtaattgaagcaaaaaaggaagctgcactgcaattggttcaacagaagaagagagacagagctttgattgcactgaataagaacaaagctcaggaagagctgttgaaacaatgtgacacatggcaaatgaatgttgaacaacagc

SEQ ID NO: 110486 - DNA, 401 bp, Zea mays
  Clone ID: MRT4577_32256C.1
aaaggagtagaaataaaataaatcaaggctttcttttggccaaaacattgtgtcattttcagtagatatgtctagactcgggcacaatactgttaactgtgcgagcttcagactgctcctgaaggtcacgctattgctgaggccgaagatgcccttctggctgctgatcatgacttggggcaggcgccagtggtggggtggtggaaattgagcccaggaagcttgagagtgacttgctgaagcagcagaagtcgtaggctgttgattgcctacgtatttcgggatatatggagagtagcacgaagcagtatgcaggacctgcttcggctaattctgccgtgcctcgacttcagcaatttccttttgcttttgtatcatgacctggcacgtccttgttgtgt

SEQ ID NO: 110487 - DNA, 391 bp, Zea mays
  Clone ID: MRT4577_32257C.1
gattagctgcaaataaatcctgtttttttcacgggaaaccacactaggactatgggctcactactaagaatcaaactaggggtgcaccgcaaactgcagatcaacatacttcttttcacctcctgaaataaacacatagacgctaacctgacacagggaacttcaagaaggaatggatcatgatccaacttatattagaactggtgccgtacggagtagatccaaggagttatccatatgcaaaaagcttggaccatacttgggcataacccgtgtgtaagaatacgaatgagccagaaaagtcaaccactgaaaccttgaagacgaaaaccggaaattccacatcaacctttgcaagtgtaccagatttagctatagctagacccattat

SEQ ID NO: 110488 - DNA, 268 bp, Zea mays
  Clone ID: MRT4577_32258C.1
gctataactactatagcagtagctcaaatctaaaatactgtcaagaatggctaaggcagcatttcagccctttggtaatgccctttctccaattacgtgtgtttctacctagtaattaccatgttttgtatttacattgtctattttatacttatttatattgatattttattcattaattaatattttaatcacttgtttttttgttaatttttaatttatcgtttattcttcttctatattttgttttattttattcaattaattt

SEQ ID NO: 110489 - DNA, 369 bp, Zea mays
  Clone ID: MRT4577_32259C.1
ttaaaatccaaccaccccttccgtacaattgttgttaaccccaaaggccttggtgacaccataaacctcttcggtgagcgccacactgaccaaaggatcaccctagttgctgatgtgaaaactatagggttcattttaggtcctactatcactctagccatcggtgctaaatttgcacctttgaggaagccgaagaagttgccacgcgatgtcatctacgaagaatattctatggaatacggaactgacaatatagagatgtatgttgcaactgtacaagccaaccatcgaactctctgactcaatgatcttattgccaccgctcaaacactctgttcaactgtaaaacttattgaacgtatcttaaca

SEQ ID NO: 110490 - DNA, 521 bp, Zea mays
  Clone ID: MRT4577_3225C.1
ggtaccctccggggtcggccgggctacggcactcgttttcgttctgcgttctggtttatagatctttgcgaaggaggtttacagcgctcaaccaaagatgcagaacgaggaaggacagatcactgagctttacattcctaggaagtgctccgccacaaacagattgattaccgctaaggaccatgcttcggttcagatcaacattgggcatgtggatgagaatggcgtttacaatggccatttctccacttttgccctctgcggattcatccgtgctcagggtgatgctgacagtgctctagaccgcttgtggcagaagaagaaagttgaagttaagcaacagtagacacccatgatagtttgttacttcgttatgtattaatttctactcttgctagagatatttgagtactatgattgtcgttttgagcacaaatactcattctgaattttcgtcggcatttggtgcctccagctaaggtggttacttttttgacgaaaaaaaaaaaaaaaaagcggcc

SEQ ID NO: 110491 - DNA, 327 bp, Zea mays
  Clone ID: MRT4577_32260C.1
gggcaaattcccccccccactgaataaaaaaatgggcctgttccattccatgactgaattttacatgtccattacacccgatggccatacggttacaaaagaaagcaatctgatgcaatccttttttattccaagatgcccttaaagaaatgcatgggtcaaatttaaataagcttttttttggacaaaatccctaggttatttactaccacccccttgatggccaaatgtctgttaataaacaaggatgccgtgcattctggttcaaaaaaaaagaagtgtgatggactcatctgcctcatcaaattcttatttttaaaaccacaa

SEQ ID NO: 110492 - DNA, 204 bp, Zea mays
  Clone ID: MRT4577_32261C.1
aaaagaaacggggccgcccaaaaatgattttttaaactggcccgtttgcccgttttttgtaccattcagcattcaccggtgagatgacccaagggttatctcaaagccccaactgttttttggaatcaaccttttcctcaagactcttgtttcaaaaagggccccggattttgcgggggggggaaatgggaaaaaggccattcg

SEQ ID NO: 110493 - DNA, 536 bp, Zea mays
  Clone ID: MRT4577_32262C.1
cggccgcgtgggtcctctcctaggtcgactacctgactcggcaggcaggcctacgggggccagaccggactccgctggcgggttagagaccggagccgtgtgccaccgcgcatacgacgctgagagagctccaccgcgactgattggacggcaaggcagtactacatccttgtcccgtgcctcaccaggaacggcgtgacggcctacgagggctgcaaagcaccagctgataacgggcaccgtcctgcgacagtgagctgtacatctgcaaggcgcaggacgtcgacaagaggttgatcaagggcgccaggaacggagtcaagaaggccgactacttcttcaccgtctcatgatgatgaaattataaatgtttcatgggatgggatacacacactatgtagagagcttggattggccacagtctgggtgagacacgcttgagtgttacttccactgttcatgagaacaaacataatgatagctcattacctgttaaaaccatcaagacaaatgttattggtaccctgaacatgctg

SEQ ID NO: 110494 - DNA, 647 bp, Zea mays
  unsure (1)..(647): unsure at all n locations
  Clone ID: MRT4577_32263C.1
ggcgattgggtactcgaggcggcgcaaacacatctctagtagcgagaggcaatgggacgtnaagacgtcnntctaatctctctcggatccgacattaatacccgactctcatatctctccacatctcctataccttcagtacctgctctcctatcgtcgtnctcgcacgcgattctcagccccaactactctgccttcggtctatcccaggatgtctgtcacgctctcttcgaaaccgcctctcctctcctagtatcgcctctgcgtaccgtgtactcaagaggtagaggaccaccatctatgtcctacctccttgtctctacacgatctccatgaatcgtcgtccagatccatccgcaacacccttatgacgagcaggaactatctcttttttttaactcctccctgcgctacagtagaactacgaggttcccgaccgtaccgctcgtcatcgcactgttcatgtatatgccctcaccgttacaacgccatctcgttgtttactacggtgagcatctactatgtgcagatcctcatcaccatcgaccgcgtgctgatcacaccgtcatcatctgtcgcgccgtatcttcactccaacgttttcaactctttgctgccggccgaggtcgactccagcatctccttgc

SEQ ID NO: 110495 - DNA, 366 bp, Zea mays
  Clone ID: MRT4577_32264C.1
cattactacaatgagtactatacagaaccagacatgtgtcatgtacacgtaaggtaggtcttccccgtgcgtcgtatgtactagggggaaaaaagaggagagcccatgccccttgatcaggatcactcaagattgagggctgtttacagcctgacttttacaactagatatatagtgtggtgggggggcacactgattttttaggaacagctagctcttaacacattctgcatgttaagatcatttccgattgtctttgccttgtggatgtacaggatgtttattgatacctgaacctgcatcaattaaccccccttgtaaccatccggcttttgtcctggtgcggaccctgggtctgacgcttgg

SEQ ID NO: 110496 - DNA, 409 bp, Zea mays
  Clone ID: MRT4577_32265C.1
gaaatatagggctgcctctcgcggagctccgcaggggactgcaattctgctaatttgtgacagatcatgcaggaataggaggtcaagagagtttctgcaaccccaatgaagatggcaccaggacgatgaaaccctgtccaccggattttgtagctccttgaatgttgctctaggcaagttcaagaggcgggggacgcaaatactaagtggtggattcctctcggggcaccgcgggcgggcagccgcctgtggaacctgctaagatgaagggccttctcaagggcctccgatacatctcgcagatttttgatgcgaaggagccggagatgcagatcgggaagccgacggacgtgaagcacgtcgcgcacatcggctgggacaacgcctccgtcaccgcgcccagctggat

SEQ ID NO: 110497 - DNA, 560 bp, Zea mays
  Clone ID: MRT4577_32266C.1
aattaatacgactttttgattcatgccactcaaataaacaaccttctttctttgaccacacaacgctcaaaagaaatgagtaccaaatttgcaacagcaatggtaaaaaataaacatgtccaatgtttgcgaggagccatgcaactgactcttttctgaagtggagtggctacatccatgccaacaatagatcagctcacctgcccaaacaaagtcaagggacaagtcagttgagcctattctaggcaatagcatgacctgatgagtgatatatttcattatatatacaagtaaataacaacttcaaactaaaggcattaaatttcagcagcttttaacaacctgcaatatgcaactagtttttaagaatccaaagctaaaacaaacaggcgcaaaactgaataaaacaacttgatgcacatataacatacttataaattggagctgcaagtagaactaatctagaagtttggtttctaaaaactgaatattaacttttctaaaaaactgaacattaacttttctatgtaaacaacagagttcacatacagactaatgtg

SEQ ID NO: 110498 - DNA, 427 bp, Zea mays
  Clone ID: MRT4577_32267C.1
atacattaccaattacattttctgatccggaagcgtagaaatacattattactcttctaatacatatcataggcaacattctatgaatatacaggcacaaaaagtcgatgaccacaccactcatggaactggggtctggggacatgattggatcatatatagatagtaccagctacacaactaatagcaaaccagctctcatccggtccctatgggtaagattccgactcacgacgtgggatagaaactagacatcacactagtctacaactcgccacaaatgccaaagacaaaaacgataacgataacattcacagtgcatcacaccaccttcccttatttaatgggacaactgatccacttcttgaagagccacacccaggcccacgcccgggaggcttcctgatctgggccagaagcctttttt

SEQ ID NO: 110499 - DNA, 347 bp, Zea mays
  Clone ID: MRT4577_32268C.1
ccaccctccaggacggttccccaaatatggtcaacctgtggggtttgtgtaaggccaagcggcgagagaattataagatactggagaagctctgggacaacatgttggccgggcctcgcccggagacagggctcgagaaactccgcaaggggaccaccgcccgtctgctcgtcatcaacaaagacgcggacggcggcagctacaagcgggcgcagtcgatgccgtcgaccccgacgacgccggtgacgccgtcgtcgtcgtcgtcgtcgacgacgccgcgcggcgccggcaacatatggcgcaacgtcttccatccggggagcaaactggccaccaaaggcatgggc

SEQ ID NO: 110500 - DNA, 284 bp, Zea mays
  Clone ID: MRT4577_32269C.1
gttataataaggagggcaagatgcggcagacttaagccccgtttggtttgaggtgactaaactttagtcacttttagtctctaaaaaagcaaacatgttgactaaattagagtaactaaactttaattgtttagtcactaaggggtaactaaaagggactaaattaatgctcttctcctctttcttcgtgtagctaacaaccactaattaataggggtaatacattcattattcacactaattaatgttctttagtcaggtttaatcaatgtaaccatacatgg

SEQ ID NO: 110501 - DNA, 460 bp, Zea mays
  Clone ID: MRT4577_3226C.1
ccgagaccatgtcagcatacagaagaattttaagtagtaggaaagtggcttgggcctccggattatcgggaatcgcgggcctcttcgcgtaccatgtgtacctgatcaacagcaccttctcgaggatcgtcgagacgcaggtcctggactgcaaaaacagacccgactacatttacatcaattactccatctacaaggagtccctccagaagctgcagaggcgccaggaggtcaacaagaactttgtcaacatcatctcgaatccgttcatcaagtactggaagtcgattaagcactccttggcatggcgcctgctgaaaatggcccagacgggcgacaaacacgaccggataaaggccatccaccagctgtccatgctgagccacatgaaagtggcggacttccagcacctggcccagatttgcgatgcgcggacggccatcgccttggccagatcgga

SEQ ID NO: 110502 - DNA, 520 bp, Zea mays
  Clone ID: MRT4577_32270C.1
ctcacccttgcggtgccctgcgccggtgctgtcgactctactgtttaggccatggtccggcgattcgtccccccatccgtcatgtcgaagcacgtatggaaggacaagccgatgaacgcgcccatagtagacacgaaggagtacaacgagagtgatcttgcttattttcataataataaacatgaggaaaaagcactgaaagagctaatggccaaggtacaggaaggcgcacttggaggctcagttctaaagtaaagtctaaagaaatgagcctggaccagccactgacccatctataaaacactttgtaaaacaattaggcaaatgattagtatctttgttacgctttactatatgctgctgtaagacaatgctgcctatagtattccgtgttacatggcgtgccactcggtgtgctagatcctaagatgtttcagactatgatttactctcttatatgctaactttgatacaaaaaaaaaaaaagaaagaagggcggacgatttggaggatcctatat

SEQ ID NO: 110503 - DNA, 308 bp, Zea mays
  Clone ID: MRT4577_32271C.1
aggggggacaaaatctttgttgagacccttcaacttttttcagttttttggcaacaacttaaagggggaaaacctttccaaaaaaaacttttggggggaaaagcaagggttttacatatttacattctactacactgttggtggggttgccggcattggacggctaattcgcaaaggaagcttccgggcccttgaattatgattgtggtgaccccgcccttttttttaaatttcggcggaacccttcttacccgcttgtggggtttccaagggcgactgcccttggtgagccacgaaacgatttttga

SEQ ID NO: 110504 - DNA, 383 bp, Zea mays
  Clone ID: MRT4577_32272C.1
tgggaccctcgaggcaaagcccgggagcaaacgaccgaagtaccaatctacaactatcttcttttacatcaccaaaccatcacacttcaaagactcatcaaaatgaagggaggctgcggaaactctggatgcacttgcgccgactgcggctgcgcacagggtgcttgcacctgcggcaaataaatgtcgaatcttaattctactaccatgcgacaagaccaccccattcgactcacgccctgtccatggcacggaatgtttgaacattcatgtccgacccgagcgatcgctatactgaatttcaatatttgatttgaatgcatacgtatgggagaagcagaacgaatagtaaatataggaacaatagcataacatgactattg

SEQ ID NO: 110505 - DNA, 350 bp, Zea mays
  Clone ID: MRT4577_32273C.1
ctcggcacgagtaagaaacacttcgcttcagctggttgacagacgactcagagcaaaatgggtacttactgtgtgatctatcggttggatcctagtacttgctgctcgcctgcatgagccaagtatcactcaaggctcctggtactgtctcaagggggttttttttgcatcgagaaagtggagttcgatgacaagaaggagaagaaggtggtggtggtgcgtgggaagttcgacgccgagaagctctgcaagaaggtgtggctccaaggtccgggcaaaatcgtgaaggggattgtcatcgctgaggtgtggccaataccagtcccgcccaaggagtgcaagcctgaggc

SEQ ID NO: 110506 - DNA, 358 bp, Zea mays
  unsure (1)..(358): unsure at all n locations
  Clone ID: MRT4577_32274C.1
ctaaccacaactgagtaattttttaaattgccgactgatgtccatcaactttctgccgttcatacttagaaatcactggtatggttactttctttctttttggttccgatttccagaagttgctggggtgggaggatcttttgttaactggagaaatagtacttcagctcttctgggcgttgtttccctcccgttctttcctcagctgcngcgngaaatcattgttcacttggtcgtgntcccctttctcctccccctgctgggcgggttcnttggctttttccttctggtccccttcttggtngttctggaacttttggttctcgtcgtggttcttcggggggttctttttggcggc

SEQ ID NO: 110507 - DNA, 537 bp, Zea mays
  Clone ID: MRT4577_32275C.1
cggaaccgccgggaccacccacgccctccgcgggccccgacgaacagacagcggggcggaaggaagccaaccaccgccccggccgcccgaagaagggccggaaggcgcacaggggcaccgaaggcgagcaggacgagacggtggacgccacgcagcacaaggagactgagacgggcaccgaggacgccgacacgcccaacaagaggctgaacaagaccggcaagaagggagagccccggaagagacacccgcccgccaagaacagcgagcccgcgccggaggccccgccggcaccgcagcctgccggcgacagcggcaaggatgccgcagctgctgccgccgctgcggccgcggcggacaagaagacggaggaggcggcgaaggagccgcaaggcgagagccccgaggaggagaagaagaagaagaagccggggcaggagcaggaggacggggccgcagagaagaagcagcccgaaacagaggccgcaaaggaggcggagaaagtggaggcgaaaactgaccgcggagacagcgagg

SEQ ID NO: 110508 - DNA, 257 bp, Zea mays
  Clone ID: MRT4577_32276C.1
gacgaagcttcaacagtccgcagacagcttgacgcagaaggagacagagtgccagcaactgtctgaaaagctgaagttggccgaggaagaagcagcatcttatcaatcaagagcaactgcagcaacagaagaggtggaggccatgaaagtggagctcgaagcctttgaatcagagatttctactcatgaggccaccattgaagaactcaaggtcaaagtctctgattctgagtcaaacgcgggcatgcattcgctga

SEQ ID NO: 110509 - DNA, 546 bp, Zea mays
  unsure (1)..(546): unsure at all n locations
  Clone ID: MRT4577_32277C.1
gggccggtttcctgccccgatccacatttctcctttgtatctcccactccccggtgatgaaggaacccgtagacggaggaagagggccctcctgtgcgagaagctcttcagacgagtcttccccaagaaggagatgccgattctgatgggcggtctcgacaccgccgccaacatcccatcctctacagctcagctcggcgagatctcagaatcgatccccaccatcggttacagtgaagaaagggttgagtacaacaacattagcttcacggcctgcgatgcccggcatcaggacatatccacctctctggagggattactctcagaacacacggggtcttatctttgttgtgaatagcaatgaccgtgaccgcgttgtcaaacccaaatatgatctgcacgggatgctgaacgaggatgccctacttgacgctgtgctgcttgttttcgccacaggcnggatcttcctaatggcatgaatgctgctganatcactgacagccttggattacactccctgcgccagcgacactggcacatccagag

SEQ ID NO: 110510 - DNA, 806 bp, Zea mays
  unsure (1)..(806): unsure at all n locations
  Clone ID: MRT4577_32278C.1
tcaaaaggcgaaaccaaaaaagttgggagttctcaccgsccggtggggggcgtgtttttaaggaactcagtcggayctntgcgcgggctcgacaggaatttggggagagacgghmacaytkacgcgtanataccggacccactcgccytccctacggcsttcytcgtgcggggaaaatcgggtccctaccgtccgmgytctgttttcgtttggatcytcctgtctatttattmacggcggcttctccccctnttsgcscgcmgcacagcgttgcgccgccccggagcagcataccagcaacactcaatctgcacmattgagagagactccgtttgccctcggtggtgctctttggtagctcaagytcmyattttgagaaagccaggggcyaaacctyttnccctgtagccacyccccgcnaacmgaygttcamacytggaaatggactcctcactcaccsagttgccmccctgtchactctgctgtacgggaacaggccccgtstccsccaaatcttmatwtsacagacgcaaaagtctcaagcgctattycccttctytccgcacccgtattttgggtgtcgcgctsgsagttgccacaatcywccgtccmcmtsgcaaccacscttccagcccgcatgtttggcgyttgagagcgayttgctgaatcttatgaggaantgaatttnanggttcttgtgawtgtttcatsgttggtttgggttacyttgaaaaaaaattttaggtgvagttggaataaaatctttgtdatgttgavagakttntgtaataaagtaataagtaaaa

SEQ ID NO: 110511 - DNA, 968 bp, Zea mays
  Clone ID: MRT4577_32279C.1
aaaaaaacagcaaatttctccccaatacgataccacttcccaaaccctccgtcgacccctctacaccggcgatcggcggcgaacgatggggtgggcgacgcggttcctggcggcggtgtgcttctttgctgcgggcgtcctcttcgtcccagaggctatcggttccccctccggcgcaggagccgtcaccgccgccaagctagcccacgtcctctcctttgccacctcctggggcgccgccctctgggccaccttcatcggcggcataatgatgttcaagaacctgccgaggcacatgttcggcaacttgcagagcaagatgttcccggcctacttcacgcttatctctgcctgcgcagccatctcggtcgccgccttctcgcacctccacccgtggaagacggcgtccaccgtggagcgctaccagcttggattcctcctatcagcgctcggttgcaatctctccaacctgctagtcttcacccccatgacaattgagatgatgaagaagaggcacaagattgagcgggacctgagtatcggtgaggaagtgggatggtcaaagaatcagcaggtggctaaatccaaccccacccttgctgcaatgaacaagaagtttgggatgatccacgggctgtcatcactggccaacatcatgtcgtttggtagcttggccatgcactcctggtacctggccagcaagctggagctgtgaagaggagccaagacgtcttccatctccgcgttcttgtgaattttatcactatggtggtaatggtgcacgtcaggttgtcagatcgctagactaaactgtacgattgcgctattggcttcacaagataataaattgtactcctagttaaaaaagaaatcctgtgttgcatggagctcccaaactagttattcaaaatcagaataattcagccaacaacgtgataaaagtaaaaaaaaaaaaaaaaaggccccta

SEQ ID NO: 110512 - DNA, 416 bp, Zea mays
  Clone ID: MRT4577_3227C.1
ggaggcgggcccgtagtgtgcgctagcggaagcgcaagcggtaggagtactgggcatcgtacaagaaggagaaggccctcgcatacaggatgaaggcactcgagagcccaaagatcatcttcgcccgcgccaagcagtacgccgaggagcaccacgcccaggagaaggagcttgcgcagctcaagcgtgaggcccgagtgaagggtggcttctatgggagaccagatgccaagattctgaatggggggaccattcaaggtatcaatgccatacaccccaagacccgcacgatcttgcagcttctgcaagagaaggaaagctataacggcgtcttactcaagggtaacaaggcaaccatgaacacagctgtgctaggtggacacatatgttgaggacggataccccaacctgaatag

SEQ ID NO: 110513 - DNA, 332 bp, Zea mays
  Clone ID: MRT4577_32280C.1
tttttgcatccggaggggatcctttttctgtttttaacgcctacttgggtttgcttttgacattattccaagaaaggagcaacttttgtgtcgcatgacaaccctgcttggcatgccgaggagtatggtgtatctgaacctggcccagatttgtggcacgatagctacccatgtgaagcgccacgaaacagcctacaccaagatcggtgagatgctcttcgacatggaccctgattacacaatcctttgcgtttgctgacatgatgaggaaggacatcacgatgccatcccatcttatgtactacggtaaggacaacatcctgtttgagcac

SEQ ID NO: 110514 - DNA, 1442 bp, Zea mays
  Clone ID: MRT4577_32281C.1
gaccctcgaggctggccggaaaaaaaaaaaaaaaaaaaaaaaaaccggccgggaatatcccctccgtttgatcaaaaacatttgcatttgtgtacgaaccatcctcgaatccaacgtcctctcctctccgtacttcctccgcagctaccccgatcacattcccaaaccctccgtcgacccctcctccttacaccggcgatcggcggcgagcgatggggtgggcgacgcggttcctggcggcggtgtgcttctttgctgcgggtgtcctcttcgtccccgaggctctcggttccccctccggcgcaggcgccgtcaccgccgccaagctggcccacgtcctctcctttgccacttcctggggcgccgccctctgggccacctttatcggcggcatcatcatgttcaagaacctgccgaggcacatgttcggcaacttgcagagcaagatgttcccggcctacttcacgcttatctctgcctgcgcagccatctcggtcgccgccttctcgcacctccacccgtggaagacggcgtccaccgtggagcgctaccagcttggattcctcctatcagcgctcggttgcaatctctccaacctgctagtcttcacccccatgacaattgagatgatgaagaagaggcacaagattgagcgggacctgagtatcggtgaggaagtgggatggtcaaagaatcagcaggtggctaaatccaaccccacccttgctgcaatgaacaagaagtttgggatgatccacgggctgtcatcactggccaacatcatgtcgtttggcagcttggccatgcactcctggtacctggccagcaagctagagctgtgaagaaggggagacaagacgacacctttctccgccttgttgtgaatcttgtcagttgtcacgatggtgttgcttgctgctctcaaaccagtttcaaaattggaataactagaaaatggccagacacatacagacagggttttgtaaaatcacactatctccgatctcgaatattttgcaaaaccgcatgtcctcgtgcaaaaccatgccacatgatgacaccgttctcgaaaaaaaaaaaaaaaaaagcggccggcccaagattgagcgggacctgagtatcggtgaggaagtgggatggtcaaagaatcagcaggtggctaaatccaaccccccccttgctgcaatgaacaagaagtttgggatgatccccgggctgtcatccctggccaacatcatgtcgtttggtagcttggccatgccctcctggtacctggccaccaaactggagctgtgaagaggagccaagacgttttccatttccgcgtttttgggaattttatccctatgggggtaatggggcccgtcaggttgtcagatcgctagactaaactgtacgattgcgctattggcttcccaagataataaattgttctcctagtt

SEQ ID NO: 110515 - DNA, 2489 bp, Zea mays
  Clone ID: MRT4577_32282C.1
acgcaacttactggaagcatcccaagttcactgtcaaaactcgaaaacttaacagccatgtcagtcaacggcaaccatctaaatggagacctaccagacacttttgattcgctcaatagacttgtaaatttggatatttcttcgaacaacttgagtggtgtgttaccatcttcaatgaaaaacctggcatctttgacttcattgcacatgcaagataatcaactgtctgggacccttaacgttttgcaggatctcccactgaaagacttgaacatagagaataatcttttttctggaccggtgcctgcgagtttgcttaacataccaaacttcaaaaaggacgggaatccattcaataccagcatcgtcccatctgcatctccgccttcaacaggaccagctccaacaccagcagcatcaaaaccagctccaacaccagcacccaccacttcaaattcaacgcccccagcaccagcaccctcatttccttcaagatctcctcccccgcctaaaacaacctcaaactcttctgaaggatcaactacccgagatagcacttcaccatctaagaaacacagtacatcaaccctcaagattgttggctttgttcttgccggagtagtgctgtttattatcatagtcctcctagtattattttgtctatccaagtaccaagagagacggtcgagatatgatcataacagaagtcagcaggcaagggtgcatcatagggttgaaccgcaaatcaagccacctccagtgcaacaaagcaatgatcttaaaaaaggttcaggtgaggtacttgatagaaggggccatgaactaagttcatcaacggcagctctcgcaaagaaatctcctgaaaaccaaaaggagcatgtaattaattttgatcgaacagattcagatctgtttcctgtttctctacccccaccacctcctccacctccattacccccaattgaaagagttattgcaaatcccattgttccaccagaaaagcgatatagtcctccaccaaagacaagtagctctacttctgccacatcattctctattgcatctcttcagcaatatacaaatagcttcagagaggagaatgtgataagagagagtagattaggaaaggtttacctagcagagcttcctgatggcaagttattggaggttttgaagattgacaatgctaatggaagaatatcagtagatgacttcctagaagaggttgaatgtatcttagatatcaagcatcctaacattcttgagttagtcggatactgtgctgaatatgggcagaggttacttgtgtacaatcactttagcagaacgacactagatgacacacttcatgatggagaggatactgaaagtgcactgtcatggaatgcccgcctccaggttgctcttggttctggaaaagccttagagtatctccatgctagcttccaacctccaattgtgcaccagaattttgaaccagctaatgtgctccttgacaaaaagttctcagtgtgtgttgctgaatgtggactggcagaattgatgccaccaagttcagtcactcagctgtcaggtcggatgcgtgcattactgaactacgaagcacctgagttgcaggattctggggtcgtttcagaaaggggtgatgtatacagctttggtgtagtgatgctggaacttcttactgggcgtaaaccatatgacagttcacgcccgcgtcatgagcaacatcttgttagatgggccagttctcagcttcatgacattgaatccctgtccaagatggtggacccatctatacgtggacaatgttctgagaaagcattgtcacgtttcgctgacataatcagccgctgtatccagcagcagccagaattcaggccaccaatgtctgaaattgtacaagacctagctagacttgtaaatgccaccggtgaggaatcagagtaacccccaaaaaaagcatggagccatggaaggcatacaatacaaacgtcgcgaccaagttacgtgctgtacaatttttttgggaagataattgtcttgcttggtctggggagaatactgtgaagatgtattttcctcagagagcattgcacactaatgtcagattggaatttcatttagacctggctggggagtggaggtgcagccatctgtgcacctgattgttgatcaaatccatgtaatatttttgcagacatgatattatatatagcgacagtggcggagcctccgccaagcgccaaggcccggcctgatcgggcacgtgtccaggcttccgccgaggaacacttgggtgggctctcgatcggcctagcacacggatgtttggatgggtcaggcagtggtgtcgatttcaggccggctccgccactgtactgtatagcaaggtgtatatatagcaagaccccggattcttgtaataatagtcagggattcgttaaatttgttactctaaagctagtcatttacttgttcgcccgttt

SEQ ID NO: 110516 - DNA, 295 bp, Zea mays
  Clone ID: MRT4577_32283C.1
attcggctcgaggccgcccatgcgtttttgcgcacagagagacctgtcataggccggggagcgcgtcggcacagtcgggagcgaaggagaacggaaggcggctcatacagggcgggcgacattttaccaactagtagccagataggggtatgagatgctggatgctgcaccggcggtctacaggaggacggcgtctgaacaccatccttacgtgagtctcgtgactgccagggccataaacaccagtcgttttattcaaaggccagacgcttacaagacgctttcctagccaact

SEQ ID NO: 110517 - DNA, 486 bp, Zea mays
  Clone ID: MRT4577_32284C.1
caagtaccaagggagacagtcgagatacgatcgtaatagaagtcagctgggaggggtgcatcatagggttgaaccgcaaatcaagccacctccagtgcaacaaagcaatgatattaaagaaggcgagacaccggacaggagggtccatcaactaagttcatctgcagcagcaatatacagataatctcagagaggagaatgtgatcagagagagtagattaggaagggtttacctagcagagcttcctgatggcaagttattggaggttttaaagattggcaatgctaatggaagaatatcagtagatgacttcctagaacagattgaatgtatctcagatatcaagcatcctaacattcttgagttagtcggatactgtgctgaatatgggcagaggttactcgtatacgaacacttcagcagaacgacactggatgatgcaattcatgatggaaaggatactgaaagggcactgtcatggaatg

SEQ ID NO: 110518 - DNA, 271 bp, Zea mays
  Clone ID: MRT4577_32285C.1
tggatacaagagcgacccgccaccgccacactcggccgtatgccgagaagagtgcccggccgcgagaccggacgattattgaaccgtagcagatccgatcacggcggagacggcagacatggagcggatgctgacgcgagtggacaccaaccgggacagtcagaactcactgtctcagctgacacgaggcactacagacactacggtacacctgtgccgaccagagtcatcgcatgatggccgaaagcgacaccgaccgcgacggctgcaa

SEQ ID NO: 110519 - DNA, 345 bp, Zea mays
  Clone ID: MRT4577_32286C.1
ttttactagccttgggaagggcgggcttgggctcccgccttttgcggtttccaaggaggcccgggcccatccaagagttccgaaaagttgggggggttggttcacttgctagcggaggcagttcaccacggtctgttgccgctgccgacggcgcggtgcttctggcagaccccggagatctacgaccccggcgggctgacccggcgcgcgtgcggggacggcttagtcttcgggacggccgcgtcggcgtaccaggtcgaggggatggccaagcacggcgggcggggccccagcatctgagacgccttaatagaggctgctgggaccaatcctaacaatgccacc

SEQ ID NO: 110520 - DNA, 202 bp, Zea mays
  Clone ID: MRT4577_32287C.1
aaaaaagggggcggggcattatttttacggggctcggcccgtgggtttaaggccaaaattttttaaccgaaaccaaacttgggtccaattttttaacacacccttaattaacggggggggtcccaaataaccccccctaaaggtgaccttggaatacatgtgtaacaccaaaacagttctttatttaaaacaaacataaaac

SEQ ID NO: 110521 - DNA, 569 bp, Zea mays
  Clone ID: MRT4577_32288C.1
tttttttttttctttttttttttttttttttttttttttttttttttttttttttttttttttttttttttttttttttttttttaaaaaaaaaaaaatcgggccctttccaaattcccaacccattacataaagggggataccaaacacaaaggccccctccaaggaatccaaggcccccaaaaaaagaaaaaaaagcggcccggggacccaattttttcccaaaaggattttttttttaaaccccggccaaaccaatttggaaaacctttttttcccaggggtcccgccccatccccccctcaaaattcaaacggccttaagggggggcctggggagccttttcccttggggccataaaaccccaaaggtgagcgggggcttggggccccccccggccaggggggggttgcccaaccccccttttttggggcccactttgcccccaagcgtgggggctttgcacccgtcccccttgaacccccccccccccgcgtgccggggttcaaggaacactttttgaaaccccaaagggggtttccccgggcggtggggccccggcggggggg

SEQ ID NO: 110522 - DNA, 680 bp, Zea mays
  Clone ID: MRT4577_32289C.1
attgggacctcgagccggcgggacggaatacaactctcctacccaccgaaccacaagaggagacaagaggcacgctatacgcagcctagcacacaccaccacccaccatcgccaccgcgaacacagagctgacgagagagtgctgtgctttgctcatctaccgaccgatcgatctcccactggcgactgagggacggtgctgatcgcactgctgatattcatcctgatctccacgtgcctgatcttccagattcccgccaaggcccgtatcatctagctcacaaacttacacaccagctctctctcaatcctcgcgcactccaacatctacatccccctactcgccatcttcctcctcagcataagggtccacatttacctcaggtagctaatcctcggcggccggccgtctgcaagaggataactgctggcgcgcggcagacccacacgaatttatttgacatcatctggatggctgtattacggactgctggactgacaggcatatactactatatacatgtacatgatcatctccataagcttgctagatgtatgtggaataatttaactactactttatcaaccacgatctcgagatcagatacagcatatccgattaatcccttatgtacatgcttctgatgaccattaataacacatatgccgagcttttactt

SEQ ID NO: 110523 - DNA, 447 bp, Zea mays
  Clone ID: MRT4577_3228C.1
gaaaattggttggctcctatttaaaggcaccaactgaaaacatcaggggacaacccatagcatgaaggaaggacaagaaacgtggaacattatatataaacaaggttcactctaagacagaggactaggcaaactaatcaaatggtcttagccacacttcaaaaaatgaaaagtagactacttaccacaacaaaggcctgcctcatcactgcaagaaaggattggacaggataaactaatacgctacatgtgtgggctattagggagctagtccaacaggctcaaacaccatgatcccatcctactcttccaggggcagcatcatgttctcctttgcattatggataccattaagtgcagaaacgtaaactgaggcggaagcattatttggaacatcgcaaacatcatattcgacctagaggatgagattctgaacgtacatcttct

SEQ ID NO: 110524 - DNA, 369 bp, Zea mays
  Clone ID: MRT4577_32290C.1
ggatgggaccatttactaaaccagacataaactttcataaatagaaaacattgcaacaaataacaaaattctctaaaactttaaggggggaagggctctaaataacaaatattgagcaaaaacaggtgcttttgacaactaaaacaaaaaaaaaaattgaagtccttgttattaccctaaacaaattgatgaataaaccggcaaatgaaacattattaccaacccccaaaaattatttagcttggccttaaactcaaaaaaaggggacatttggtccttaaaacccttccttttgcggaaatgcaactccagccgaacaccctgtgagccggcctcaaaggatctgaacccatcttttccaaaggaaaa

SEQ ID NO: 110525 - DNA, 273 bp, Zea mays
  Clone ID: MRT4577_32291C.1
gaagctcgactgcttaggatgcctcacccaggcttattacaccgaccagatctccgtcaaccagggtgaatttaacaccccctggggggaaagacaccaccaaggcccaggcaaccacatacaatcctaatacatatgaaccatcatttgcagaagatgagatcgacaccctaccgggggatattcacaccaggaccgggaacaccagagatggatctcggactacactcaatccaaccaaccgacaagcggcaaactgaaggggactgtccc

SEQ ID NO: 110526 - DNA, 2463 bp, Zea mays
  Clone ID: MRT4577_32292C.1
gtgaaaagcgccaccttcggagtccgatgtttgaaattaaattgctgatgacgtggccgcctgaaccatttggattccctcccctggaattcgaaaaacggcgactactcccctagagcagatccatctagactctagagtacatccgagggggaagcgagcagatcgatggcgatggctgagaaggtgaaggagaagatgctgatgctccgcagcagcgacaaccaggagttcgaggtgaaggagtcggtggcgatgcaatcgatgaccctcaagaaaatggtcgaggacggctgcgccgacaaaggcatcccgctccccaacgtcacctcccacatcctcgacaaggtcatcgagtattgcaacaagcacgccgagccgaccgggccgggcgacgcggccggcaccaccaacaggtccgccgaggatgagctcaacatcttcgacgcagacttcgtcaatgtagagcactccaccctcttggacctcatcctggctgcaaactacctggacatcaaggggctcctgaacctggcccgccaaaccattacagacttgatcaatgggaagatgcctgaggaggtctgcaagaccaacatcaagaacgacttgaccatcccttccacgtcggccttggccaccacaatgccctcctccgagcgaaagcagatggaggccaggtttatcgcctatatgcaagaaactgctgaggagaggatgactgggtttgctgttcgtggtgaaaaatacagaaagcatggtgaacgtccgccacaaccaccattggagatagttaaatacccagctcttttggaaagagcttggggatgggattcgatactgccgtactgtcctgtgaattcttggcccctatacaagacttacctccaagaatattatgagcgcaattctcgtgaagtattggctcatcaagtggaagctaatgctgcctctggtcccaatctcaacggggctgatgagaatgatctggcaactctgttcaacttgtgtatcagtagggaggttcaacttttgaatctgctgaagcgccgtgatcaaaaacacaatgttgatgagatcagcctgaatgaaaagctcaccaactgtgcccgtcagataacttttgtggaatatgctggttttcctttccccagtgttgccttaaagtgcatcatggcggagtctgatctgttgtgcatgttgctgatgtgtgggactggaatgatatcccaagtcaacatttgctccaggattcgaaaggtggccttcagatttatgacctacaaaggacctggatgttttgctgctgctgccaccatgatggccaccacaaaggaggccaagttgatgagtggactgctgaggaacagatgtagggaaaataatggtccattttcaaggagtgtctttatcaggaaatggaccattgcagctatgttcagaatatgtgaggaatgttctcctgtggaagagtctacagggggctacactgctactaaattgatacttgatggatctgatgacaagaatccttgtgataaggaactagttaataaggacaacctgctgcagaggaacaagataaatcaaaaataccaaggactgttcaaaggaaaaacaactaaatgccgacaccctgtacaaaagcaagaaccaggagatggagcaacgcccgcatcacccagtccggccaatcccatctcaactgtggtgcaaaaactttggtaagaaggaatactgaaggaccttccaaactagcatgaagtgcgggcaccttgcttttcttttgccttctttttgtgaaaacgtgtgcttagcgacaatgctggctaagtgttagaagcatctctggaatgcttcgtgtagtatcttttgactctcttttcttttgtcgtctcaatcatgttacatgagaaatgcctgatggactcaaataatgaaccggtgattcaaaaaccaaaagcctctgatgaatctatttgagggtttggatcttgatcaacggaagaaaaaaaaaaagaaaaagaaaaaaaaaaaaccggctctttgaaggagaatgtagtagaacaagtcaacacgaagttaatggatcataagaagcgtagaaccaagcttgaacactattcctccttagggtttgatgaaacaacattgctgctcaataaagaaaaggagcaaggcaaaacacacacaagggttagtggaaaagcagatggcaataaagcaaagtcagcagaacttgtgagccttggtaatgaaaaggagcaacgaagaaatcacacgaaagttagtggaaaactggataatacggcaaagtccgcgagagtttcggctacctgcgttgcgtacttagtgtcttatgatggctttgcctggttgaacttttatgaaatgcttgtcttggtgagcttcatgcgacttatattatgcccttctattgttgaattctaaatgctttctgcc

SEQ ID NO: 110527 - DNA, 204 bp, Zea mays
  Clone ID: MRT4577_32293C.1
gcgcttaagcttattatgctaataggtttggtgatcatttcatttggtccaagttattcatatacccttctaaaattactctatggggaaagacacagtgatggagaggctccagttattcttcgttactattgtttatatatcatcagtttagcaatgaatggcacatctgaagcctttcttcatgctgttgcaaatgaaaac

SEQ ID NO: 110528 - DNA, 721 bp, Zea mays
  Clone ID: MRT4577_32294C.1
gcctccttccgttactctcctcccctctctcagatctccccacctcccgctcggttgccccgccccaaaccctaccccgctgtggatcggcagacctggctacgccacgaggagcagcggggcgcccgtggtcatgcggagctctatcgcgacctaccgggagagcctgctcggtcgcggcgagggggcgacgccgtgccgacaggtccctgggccgcgctcgccccggagctaggggcggggacatatccgccacgccaccgtcgtgggaaggcgccgacggtactcccgccctggccccggctccgaagccaccgagcccgacgagatttctaaactgagggatgacattcaaaagcttcaagcttctgagggtgaaataaaggcactatctttcaattatgctgcaatgttgaaggaaaaagaggagcaactgggaaaacttcgtggagaaaatgggtctcttaaaagaagcttggagagctgtaaggcagtttcagccaattctaatggcactttggaaagatcacctagagtgcaaaggaatgcagttcaggaaaattcattgaatctcaccaagcagaacggatatggtggtggttcttctcacagtacccaggcaaatggtctgcatccaatggcaggttatcagaagggaagcatatcggaggaagagagatcatcctttactaccaagcacgctagtcttggaatgaaatca

SEQ ID NO: 110529 - DNA, 296 bp, Zea mays
  Clone ID: MRT4577_32295C.1
acacaaaaaaaaacgttttattataagcggcgcatgtttgcgacaaacggtcctatctaaatgattgcaaactcgtaacatttgcctctaactaaaaaacacacaactctaacctcacgcgcacggccacgcacacgcggggcacatccgaacatgttcttgcaaaatgcgtgacaccgcacgagagactgtctgtactgccctgaaactcttttcactatggtgggggtacatagggtgaggcgtgatgtgtcgatatgagaactactcctaatctaacggattcgatgttggag

SEQ ID NO: 110530 - DNA, 2007 bp, Zea mays
  Clone ID: MRT4577_32296C.1
cgccgcctgaaccctttggattccctcccctggaattcgaaaaacggcgactgctcccctagagcagatccatctagactcgagtacatccgagggggaagcgagcagatcgatggcggtggctgagaaggtgaaggagaagatgctaatgctccgcagcagcgacaaccaggagttcgaggtgaaggagtcggtggcgatgcaatcgatgaccctcaagaaaatgatcgaggacggctgcgccgacaaaggcatcccgctccccaacgtcacctcccacatcctcgtcaaggtcatcgagtattgcaacaagcacgccgagccgaccgggccgggcgacgcggccggcaccaccaacaggtccgccgaggatgagctcaagatcttcgacgcagacttcgtcaatgtagagcactccaccctcttggacctcatcctggctgcaaactacctggacatcaaggggcttctgaacctggcccgccagaccattacagacttgatcaatgggaagatgcctgaggaggtctgcaagaccaacatcaggaacgacttgaccatcccttccacgtcggccttggccaccacaatgccctcctccgagcgaaagcagatggaggccaggtttatcgcctatatgcaagaaactgctgaggagaggatgactgggtttgctgttcgtggtgaaaaatacagaaagcatggtgaacgtccgccacaaccaccattggagatagttaaatacccagctcttttggaaagagcttggggatgggattcgatactgccatactgtcctgtgaattcttggcccctatacaagacttacctccaggaatattatgagcgcaattctcgtgaagtattggctcatcaagtggaagccaatgctgcctctggtcccaatctcaacggggctgatgagaatgatctggcaactctgttcaacttgtgtatcagtagggaggttcaacttttgaatctgctgaagcgccgtgataaaaaatacaatgttgatgagatcagcctgaatgaaaagctcaccaactgtgcccgtcagataacttttgtggaatatactggttttcctttccccagtgttgccttgaagtgcatcatggcggagtctgatctgttgcgcaagttgctgatgtgtgggactggaatgatatcccaagttaacatctgctccagaattcgaaaggtggccttcagatttatgacctacaaaggacctggatgttttgctgctgctgccaccatgatggccaccacaaaggaggccaagttgatgagtggactgctgaggaacagatgtagggaaaataatggtccattttataggagtgtctttatcaggaaatggacctttgcagctatgttcagaatatgtgaggaatgttctcctgtggaagagtctacagggggctacactgctactaaattgatacttgatggatctgatgacaataatccttgtgataaggacctgctgcagaggaacaagataaatcaaaaataccaaggactgttcaaaggaaaaacaactaaatgccgacaccctgtacaaaagcaagaaccaggagatggagggctctttgaaggagaatgtagtagaacaagtcaacacgaagttaatggatcataagaagcgtagaaccaaggtaacattccgaagggaagtgtaatgcttgctcaaatttgttaactcttttttatgttcttctcatggaactcctcactgacgccggttttatgctagcttgaacactattcctccttagggtttgatgaaacaacattgctgctcaataaagaaaaggagcaaggcaaaacacacacaagggttagtggaaaagcagatggcaataaagcaaagtcagcagaacttgtgagccttggtaatgaaaaagagcaacgaagaaatcacacgaaagttagtggaaaactggataatactgcaaagtccgcgagagtttctgctacctgcgttgcgtacttaatgtc

SEQ ID NO: 110531 - DNA, 782 bp, Zea mays
  Clone ID: MRT4577_32297C.1
ctcttcctcgcaattcactcccacccaaaaaccctagtcgctcatctctccgcccaaaaccctacgccgccgccgccgccgccgccgcccgtacctagtcgccgtgggtcgccggcgcgtccatggacgcacgctaataagacgctcgctggtctgttccgaatcctgcgcctgtgtctcgcgctctcggcggcggcggcgggataaaaacgctgcagacaggtaatctcttattgctgctctgtgtttctgttgcgcgttagcgttgacgatggaggagccgaatgcgggcgccgccggcgcggctgcggtggaggtggcggatccggctggcgacgccggagtcgggcctagcgcatcgccatggaggaagaccacgccacctccggcggcgtccggcgaggcggccgttatgggggccgaatcctggcccgcgctcgaggaggcgaggcagaaggctgcctcggagcctccagcaaaggcagcggcaggcaatgctgctggcagcgatttcgtgaaggggccgcagggctcccctctgccgtcggctccatcgcaggtggctagtcgtatgcacaagtttgatggccatggaaatggaaatcccaacagaaatcaccaagcccatcatagaaatgggcccaggcgacgttttcctgctgctaatggtgcaccaccttaccctccaccaatgcattatccccaacatccagggcaacccattttttaccccgtggttcccagtccaatgatactacaagaatattcttaccagccatttc

SEQ ID NO: 110532 - DNA, 376 bp, Zea mays
  Clone ID: MRT4577_32298C.1
ggaaaaacgaaggaaaaaccatatgatcaaacgatcatcagttacaatgggctggcaggcaaaaaaataaataacacattaacaactagcacaccctcccctaccactatggcatccatcatccccacccccaccatgaggcatcaaacgggcgaagcacggggacccatcaacaggggcactgaaacacggccaaggaacccggaaaaaaaggagagaacaattccttttaaaaagcacaacctccaaaggacgcaatccttttttcccccacctcccagaaattcactggcacaaataggcataataataccctccccctgctttggccaaaatcagggagggggctacccatgccctggcccttttccatccc

SEQ ID NO: 110533 - DNA, 337 bp, Zea mays
  Clone ID: MRT4577_32299C.1
cctgttcaattattatcttgaaaaaacgaaagaccagcgggggtctttgccaccctagacgacacactcgccctgcacaggaagaaggaggcgcgaggcgagcccaccaagcaggccgaggcggccacctccaacatcaccgaggtgcttaacgacagccttgagagcataacccagtgcatcgacttcgaggccgagatgcaaaacagcgagaagctgcaggagtccaataaattcaagctcaagacccaagtgcagagctcgcagcgaaaacaaaggcgggcaacgacagggggagacagagaaaaccgcgcaggatactgggtagatgaggagt

SEQ ID NO: 110534 - DNA, 585 bp, Zea mays
  Clone ID: MRT4577_3229C.1
cctcgaggccggccggggttatcgagctgtcttgtccccctcttggactcttctttgcggcgatgggagccggcgacctccacggagacgacggagtgctggaggcctcacctcgcagtacgtccgcctgcgagtgcgctctacctatcgctactggtccttcacgtccgtgcgctccatctccgtgccttcccgtgacctggtgagtatcaccgaatcgcgaccgcactgcacacccgacaacgttatacgcctcagcatcgagcgcaacggaccagaccgggcagctgtcccaggatcaggcgaacaggaagtggaaatcgaagttatatcgccgaatgaaggaggccgacggatatttaccagttgaaccgcaccgacgaacaagtgcaaagcaagatcctcgctgaggactgcgaggaatcagaagagaatatctagcgagcatgctcgacgcgagttacactaaggtagcgaagaacaatgcgagactagcatcgaccgagataatcaagttagaggtgctcctgaatgagtacacgaaaggaatgaatcggcaactgaatgaataatcggaggctgggc

SEQ ID NO: 110535 - DNA, 132 bp, Zea mays
  unsure (1)..(132): unsure at all n locations
  Clone ID: MRT4577_322C.1
atcagtgnttacgcgaaagaacatgcttcagcgaacagcgagcacattgttggttacaagcggagatatacaccctgatttattcaaattgcgaagattggcatggctcgcctggaccactgtggctgcacc

SEQ ID NO: 110536 - DNA, 174 bp, Zea mays
  Clone ID: MRT4577_32300C.1
cctcgaggccggccgggagcacgcgtgacgacgacacaggttgggaccatatagctggctttactgctgatactagatgcgtctcttcgaaccgcggcggccgtcgtagatgctaaggctatatctgagccatgagtctctggcagtaaggtggagggggatggcgtatgcagg

SEQ ID NO: 110537 - DNA, 224 bp, Zea mays
  Clone ID: MRT4577_32301C.1
atgctttcgtccactctttctttgacgcttggggtccgttcccattgtgctcttcaaacaggacagaacagcttagtgtttatatgaccacaagggctatgcgcaacaatctggcagaggatacatagcccgcccttattaaccccaaaggtggggggtgcatcaccgccagcaggtagggcacaccacttgcaaaggacacattaactgccaaatgaagccca

SEQ ID NO: 110538 - DNA, 434 bp, Zea mays
  Clone ID: MRT4577_32302C.1
tttttttttttttttttgaccacacactgcaacagcagtatgcaaaaattatctttaatcttccgacataggagtacaatttttttttctacacatgtgcattattatgtggcgctgtcatttatttgttgaaaccacatatttggaggaccgttttatggtcacgttgtgtgtagtagcttattctacactggtttcatacattctctgccgtcccaagtgcccaaaacctaatttgtaaacgaaaatagaaaaaaaaagaacaaatcatttgttacaatgaaaaaaatgtaatgaaatgaaccaatcccatccctgttaatgagtcattgtactataatatccacgaaatgcaggccagcgccaatagctgttggtctgaatagtttagcagatgctccgttaaattcacagcctttaaaggattatctggc

SEQ ID NO: 110539 - DNA, 489 bp, Zea mays
  Clone ID: MRT4577_32303C.1
cacctctgcgatctcagatcccatcgctacagagaggagaagcacactgcacgcagcgcaccgagtctagcagctaatcctagacatggaccacctgccgctgacctcgcccgccgcgccagccgttgcggcgtcgctgctcccgtcgcagggcggcgggagggtgctcgacgcgtacaagacgacgctggccacggcggcctcgggggcggcgtacgccgtgatggcgcgaagcatggcgcgggagctgctgcccgacgagctgcgcgccgcgtggcggtggtgcgcggttttcgcgcgcgcccggttcggtcgtggcgagaaggagcgccacaccatcgccatccgggaccaggtcgacacgggctacagggagaaccggctcatcaacgacgggcgcgcctacggggccctcgggaacgagcccaaggctgaccccacgtatctggctgcgtgcaccacgacaacacactggccccctacggcatc

SEQ ID NO: 110540 - DNA, 412 bp, Zea mays
  Clone ID: MRT4577_32304C.1
aaaaaaaaaaaaaaaaaaaaaaaaaaaaaaaaaaaaaaaagaaggacgatctaaagggggggagctaacttacgggtgcgtgcaaaaaaaaaaaatattttttatttaaagctgccttcattttattggccgcaggtttacaacctccggcctgggagaaccatgtcttttctaaactaacttaatttccttcccttgcccctttttttagctcgcttgatttggaaaaacccggccctgaccgaccttcctaacctttgggcactctccctttttgccggttcgcaccctcgctggagggcctcatcgcgtcggctttttaagtttctcccccctggcctgtccatttgccagcccccttcctcccgcttttaaccctggcttgcgtgggtttttctccccgttcgcccgt

SEQ ID NO: 110541 - DNA, 249 bp, Zea mays
  unsure (1)..(249): unsure at all n locations
  Clone ID: MRT4577_32305C.1
ccaaanaccgcagagatgtataaccctaggggggggggagcgggancgccgccccggcgtcggcgccgtccaagggcaagtcgtccgcggcgaaccctagcggcaaccacgctggcaccccggcgccctcggggacgccttcaaagggcaagtccggggcagcgcaggccgcgggtttggggcacggttcctcctcccaccaccactctgccccgcntntcttttgtcggcggnggcgggggggggggg

SEQ ID NO: 110542 - DNA, 646 bp, Zea mays
  Clone ID: MRT4577_32306C.1
aattcggcacgattcggcacgatcccgccatcgactcttcgcgtctccgccgccgccaggctaccgctgcgccggcgggtcggcgatggacatggacatggagatgccagatcccgacgagctcgagtggatggagagccacggcctagtccctgaggaagaggacgcctacttcgacgaccccgacgagggcttcgtcctggcccccggcgattcggatcaaccgtgcaattccccgcagccgcaggagtccgccgcgccaagagcaaatgaagcgccgggcggtttgaagcggcctccgccaccgccaccgccggagcaggatgaggaagaggagaggagcaagcggagaaacgttgagcaggaggacgaggattggctgcgctactcgccgcctcccgcccctgagattgtcgtcgccgagaagacaatcttgcggttcgcgtcggagatccatggagactctgtgcccgtaactgctcccaatggtgagagagtttatgccaagcttgcaatggagggggtggtcggtcgaggaattagcggaactaggcaaggggttcagttctgcaacccatacagcaatcacaagggcctgctctcagaatcctttgactcactaacaaggcgtgctgagcaggaggct

SEQ ID NO: 110543 - DNA, 244 bp, Zea mays
  unsure (1)..(244): unsure at all n locations
  Clone ID: MRT4577_32307C.1
gcacatattattgnanaccaactagncaacatagnaaagcacaatattgtaccaataatggcagccaaaatattttgcctcattatgttccttggtctttctgcaagtgctgctacggcgagcattttaccgcaatgctcacaagctcctataggttaccttgttgccccatacctataaccatagatgtattgagtatgtgaaaatgcaattgtagtaccctacaggaagcaacaggtaaaga

SEQ ID NO: 110544 - DNA, 385 bp, Zea mays
  Clone ID: MRT4577_32308C.1
gccgacgtcggacgtcaatcatattattctcatgacacacattggcaccatctatgatcatatctcaaggggcgacacggaatcaggatcatgagctgcactctataaagacggtacagcatacactgatcagttgttacttagagcagctaatattctggggaagattgcagcactacagccagttccccaacttaaatgattacctagctttcatgctagcccccggtgagggtaaatcaattgaagcttgacaggcagttggtctactactgaaaaacaatctgcgaacgacttacaactctatgcaaccttagtcccagcattatgctaagtctgaggtgttaccatatataggggcaaccaatatggcttttcgaaccac

SEQ ID NO: 110545 - DNA, 890 bp, Zea mays
  Clone ID: MRT4577_32309C.1
gcacgaggagagagaaactagtctcgagttttttttttttttttttacaaaacattgttttcatttctaaaaatgaaggttattacataggaagagttacatttattacaagtcctgatatatataaagtgcataacttattacaatagcaggaaggtaggaaccctccaaagcttatacacaagcctaactaatcctcccccagtactggaaatgccgtccagcctccgaatcactttgagtactcctcaacacctttgttgcggagacggaggtctaaatccctctattaaaccccagttagatggctccatccacttgatgagcaggcattggagtagagtcctctttagcaaccacttcatcttgaatcttcgctctttattttgggagctctgagatgattacggaacaagcttcatacgggccagcaactcctaaggacgtccgagccatggcgaggtgggagaactgcacgcgtggtcaccagcacagggggtggcacataccagcttaagcaaatcgatctagggactggggagaagattaatactagcaggaacacatgcgccacaacacccttcagttatctttggacagaattcgtgagcagggaggaaaccttcactgaacccaaccaaagggttgtatatatatgggcaggcatcactgattatgtaggtaggcatatggaactcgaccacaacttggtgaacatgaattctggggcatgccagcacagcagcactgcaggagcaactcaacgtggctcccatgcacatatactttgctggctcacatgcactgtccaaagaaacactgaacctggtcaagctctacaccaaaatatcacttgagaataactagagaagcagccgatcccggcaaaa

SEQ ID NO: 110546 - DNA, 543 bp, Zea mays
  Clone ID: MRT4577_3230C.1
gctttacttaccagcggcctgtttttccctccccctgacacaaaaaggcaaaatctatttttgttaattaggaaaaagaaagagcgcgtgtgaactggcgagggtgggaaaaaagggggatatattggaggctgtaggcaggaaactatgggagctgggtaggagtagctcaaaaatctgtgaattcgtttcttctgtccctctcttgtgatcttctccgtctgtagcgctggagtgagctcgtgatgtctccattttaggacggaggagtgtgcaagtgtgcttcttcttcttagtattattatcatttcttttctgtttgcaccccagatatttccttttgctgcaactgttgagctccaaatctgccgtggttcatttcgtctttgattccggagggagaaggggatctgccatttctgtgctcggttcaccaatttcttgctcaaactactcctcttgagattttaccgttccccttttcagtttcttggagcttcctaatccctatgcctaacttcgctttagcgctcgcaagctctc

SEQ ID NO: 110547 - DNA, 340 bp, Zea mays
  Clone ID: MRT4577_32310C.1
gcaacaccagaccaactggagggggtgcttttttacaggcgggggtggacgagacatcaggagccgtgggaggacatacaatggtaagcggcgaggcatcaggcgctgaagcattcatgatggttgggcattagactataacgaaactgacagctcagagcattgagaaggctactgactacagttaaaagaagacgataaacaagtcctacaggagcggtggcatgagaagaatttgtgaaacttacccttacacaaaaaagaggttggcgttgagcaacacatttcagcaacagtggacatagcctgtgcgaaggaaactgattgcgcacagcacgag

SEQ ID NO: 110548 - DNA, 284 bp, Zea mays
  Clone ID: MRT4577_32311C.1
attaggtcctttttttttatgtgtcggtttttttttactttttttctttttttggaagggctccaaccatgacaaaattaccatttaaagggtcccggggggtagaaatcattttttataaccaaaacgcttgggtcttttttaatcgaataccccgcccccatgttaaattacattgcctgggtgggctttaaccccttaaagggggccctaagtttcttggctggagccctatctttggggtcatctatggggaactaatttcactgggaggggaaccgtta

SEQ ID NO: 110549 - DNA, 296 bp, Zea mays
  Clone ID: MRT4577_32312C.1
ttatttactcaaacaagaaaagataaattacactggacctaacccagcaaggttctgatgtttgctgacagtagtcggcagccgagctttgcaagatcgatgcttggttgtggtttcaaaagcttgagtaaatattaacaggtaagagcagtctagcggccatccactttttaggcccccctcggtaatgcagttaaccaagtctagagagcaacaggggggcagtgacacaacacgagtagccgtacctgctcctggacgatggtatgtagcgtgcgatggacatctcctcgtgc

SEQ ID NO: 110550 - DNA, 2032 bp, Zea mays
  Clone ID: MRT4577_32313C.1
agacctgggctcagttctgctttttctcccggcctaacaaaagaaagcacgaccgaatagacaccgcgtcgtattccctgtgagactgatgaacattaagctgctgtttcctcaactctacacttttgaagagaactatcgggtgcatcgccttcgatcgctaccattgtgttgtatgggtcaacaagatcgttattaaaccttccgtacccatatccacctgctgctccgaccttccagtcttctccgtaggggcttcgctccatagatttcgccgcaaggggcaacggcacacccaccaactgacctgacccacgagggatccgcagatgaagatcattccggtcccttgcctggatgacaactatgcctacttaatcgtggacgagagcaccaagaaggcagcggccgttgaccctgtggaaccggagaaggttctcaaggcggccggcgaggtcggcgcctacgtcgactgcgttctcaccacccatcaccactgggatcatgctggtggcaatgagaagatgaggctgcaggtgccagggataaaggtatttggaggatccctggacaatgtgaaaggctgcactgatcaggtggagaatggaatgaagttgtcacttgggaaggacattgagatactatgcctacacacgccttgccacactaaaggtcatatcagctactatgttactagtaaggagggtgaagatccagcggtcttcaccggagataccttgttcattgctgggtgtgggaagttttttgagggttctgcagagcaaatgtatcagtcccttattgttacactgggttcgctgccaaagtcaacccgagtttactgtgggcatgagtacactgtgaagaacctaaaattcatgctgacactggagccagagaatgagaagacgaaacagaaactggaatgggctgaaaagcagcgcgaagcgaatcagccaacagtgccctcgactataggagatgagtttgagataaatactttcatgcgtgttgatctaccagaaatacaggcgaaattcagtgtcaactctccagttgaagcaatgagagaggtcaggaagaccaaggataattggagaggttgaggacacccatggccgccactagtctgttgaaccagcattccaaagtgaactaatgcagaaaccttgccctgtaggtgggaatgaggtttactgccgtgcaatgctttgagaaatgtgttgttgtgaaggagaagactcctacaataagctccgcgttaatgagtagtaacaatacgctccttgtaacttgtggtctgtttgccaataataatgtacgaactgtagtgcctatcttgaaaatatgaagagctataatgggtataacctgcctgcattttatatatgtgatgcccagaagcttttccttggacaatgctgcagcctgcagcttctaacctgtagaaccaagatggtcaggtttcaccgaacctactcactcttgtttccaccaggccaactcaactctgaatgaccgctggaagagtccaagtcttacttcagcttaagaatctagaagtggtttagtctctcggcctttttcgtatgatcgagagcagctgagaagagaactggaagattgctgaagttcggtttgccctgcagtgcaacttgtcaatattatacgtaatatacatgcatccggtgaaactaagaccttggttattactaggatttgctttcagagatcatttttatttctctatatttgagcgtatgttctttgaaacttctaagttagaactaaaatcctgcaagataccagatgtgctggattgaaaacgactgcagtcgaatcctttttgtgtggcttaatatttatttagtgcattctgagaagtttctgttgtaactagtgtactagaatctttctgaagagattcataaaacacagtattttgcatgtttttctaaaataaattgtaacgtgggctattacaagcagctactcggagcatttcaggaaaaaaaaaaaaaaaaaagcggcc

SEQ ID NO: 110551 - DNA, 294 bp, Zea mays
  Clone ID: MRT4577_32314C.1
gctccactgtgcagtgcgcgcgtaaatcttgcttatctagccgacatggcctgactagcaggcgtcttccccaagcccatgacgatcaaaattctcgccatcaactccatctacggaaggaagctcgccgacaccaggacgacggtccgctacatactcatgcccatgtcagccgaccagatggacatgttcggtgacaagcacctgtaccatgaccttgacctcatagacatcaccaccggacagtgggacctctactgatttgacgcgcactcgtcatacaaccggatacag

SEQ ID NO: 110552 - DNA, 559 bp, Zea mays
  Clone ID: MRT4577_32315C.1
cgcctgcgtgtaccgggcccgctattacacggtcgacctatgctttctttttgcgacatcaaaactacaacggctaacattatattactgcctacttgtgcttcttgctctgagagacttgattagttcacgctacagttttacctaattgctaacatggtaccatcgatggcgtgctgctgccataccgtggctggatgatagctaccaagtgggaaaaccggcctctttagccctatatgctagaacgggcaatggcttgccgcaacttccctgtataacacttgttgctccaacagttgccagccctgatgctctgtgggtcgtcggtacaaaccatcaaggcacaggatgtgcagcagctaaagctacctgtgatcaaccgagtagctctggctgaccttgcttcctactgtcaacaacaacaattggtggcatttaaccaacctgcttcgacgatatgctaccaccttattgcgaaaaaccaacactgttggagccatctgctagatgggaaatgctcgatactgcaacacttacgttctgatactgatatgtg

SEQ ID NO: 110553 - DNA, 1841 bp, Zea mays
  Clone ID: MRT4577_32316C.1
gtccggattcccgggtcgacccagcgtccgctccatatgccgcgaggagcagtttctgcaaactccgtggcgactcctgtggacggcggctatggagatgacaaccagaaattgaccctcattaagctagctagcatgattgaagtggctgcaaagaaaggcgctcgcgatctcaacctgcaaggcaaactcatgaaccagatcgagtggctccctgattcaattggaaagctcactggacttgtcacccttgacatttcggagaatcggatcttggccttgccggaagcaattgggatgctttcttctttggccaagcttgaccttcacgctaacagaattgctcagcttcccgagtcgattggggatctttccaacctgatatatctcgaccttaggggcaatcagcttgcatcattgccggccagtcttggtaggctggtgaagcttgaggagcttgatgtgagtgcaaaccatcttacctcactccccgactcaataggaagccttacacgcctgaagaagttgatcgccgagacaaacgaccttgatgagctgccatacactatcggcaattgtgtgtcactggtggaactgcgggtaggatacaaccacctcaaggccctcccggaggccgtcggaaagctagagtctctggaggtcctctctgtgcgatacaacactattaggggccttccaacaacaatggcatctctcacaaagctgaaggaggttgatgcaagttttaatgagctcgagtctattcccgagaacttctgcttcgtcacttctcttatcaaactaaacgtcgggaataatttcgctgacctgcaatccctgcctcgttccattggcaaccttgagatgctggaagagttggatataagcaacaatcagattagggtgcttcctgattcttttggaaacctgcagcgtctccgtgtgctccgcgcagaagagaaccctctccaagtgccaccaagagatgtagctttaaagggagctcaggccgctgttcaatacatggctgaatatgttgccaagaaagccacaaggtcacaaccgatgaagacaaagaagacctgggctcagttctgctttttctcccggcctaacaaaagaaagcacgaccgaatagacaccgcgtcgtgattcactgtgagactgatgaacattaagctgctgtttcctcaactctacacttctgaagagaactatcgggtgcatcgccttcgatcgctaccattgtgttgtatgggtcaacaagatgtgatgcccagaagcttttccttggacaatgctgcagcctgcagcttctaacctgtagaaccaagatggtcaggtttcaccgaacctactcactcttgtttccaccaggccaactcaactctgaatgaccgctggaagagtccaagtcttacttcagcttaagaatctagaagtggtttagtctctcggcctttttcgtatgatcgagagcagctgagaagagaactggaagattgctgaagttcggtttgccctgcagtgcaacttgtcaatattatacgtaatatacatgcatccggtgaaactaagaccttggttattactaggatttgctttcagagatcatttttatttctctatatttgagcgtatgttctttgaaacttctaagttagaactaaaatcctgcaagataccagatgtgctggattgaaaacgactgcagtcgaatcctttttgtgtggcttaaaaaaaaaaaaaaaaaataaaaaaaaaaaaaaaaagacaaacaaggggcggtctgtctagaggaattgttttttttttcgcgccgccctactacaacttcttta

SEQ ID NO: 110554 - DNA, 1430 bp, Zea mays
  Clone ID: MRT4577_32317C.1
cccacgcgtccgcccacgcgtccgcccacgcgtccgcgctccatagatttcgccgcaaggggcaacggcacacccaccaactgacctgacccacgagggatccgcagatgaagatcattccggtcccttgcctggatgacaactatgcctacttgtacgaatcagcccgcaccgcttgttttcactactctttcagttgttcgtttcaaatcgttgaattcttgattgctatttgtttcttccgttcgaagaatcgtggacgagagcaccaagaaggcagcggccgttgaccctgtggaaccggagaaggttctcaaggcggccggcgaggtcggcgcctacgtcgactgcgttctcaccacccatcaccactgggatcatgctggtggcaatgagaagatgaggctgcaggtgccagggataaaggtatttggaggatccctggacaatgtgaaaggctgcactgatcaggtggagaatggaatgaagttgtcacttgggaaggacattgagatactatgcctacacacgccttgccacactaaaggtcatatcagctactatgttactagtaaggagggtgaagatccagcggtcttcaccggagataccttgttcattgctgggtgtgggaagttttttgagggttctgcagagcaaatgtatcagtcccttattgttacactgggttcgctgccaaagtcaacccgagtttactgtgggcatgagtatactgtgaagaacctaaaattcatgctgacactggagccagagaatgagaagacgaaacagaaactggaatgggctgaaaagcagcgcgaagcgaatcagccaacagtgccctcgactataggagacgagtttgagataaatactttcatgcgtgttgatctaccagaaatacaggcgaaattcagtgtcaactctccagttgaagcaatgagagaggtcaggaagaccaaggataactggagaggttgaggacacccatggctgccactagtctgttgaaccagcattccgaagtgaactaatgctgaaaccttgccccagtagcgaagctagcaaataatttatcggggtcatcagtattatctactggatctttactatagaacttttgttattaacactgtttttctattagatattcaaaaaattaccggggtcagctgacaccaaaataagggctggctccgcccctgccttgccctgtaggtgggaatgaggtttactgccgtgcaatgctttgataaatgtgttgttgtgaaggagaagactcctacagtaagctccgcgttaatgagtagtaacaatacgctccttgtaacttgtggtctgtttgccaataataatgtacgaactgtagtgcctatcttgaaaatatgaagagctataatggataaaaaaaaaaaaaaaaaaggccccta

SEQ ID NO: 110555 - DNA, 540 bp, Zea mays
  Clone ID: MRT4577_32318C.1
ctagttctagatcgcgagcggcgccctttttttttttttttttttacccattatagctcttcatattttcaagataggcactacagttcgtacattattattggcaaacagaccacaagttacaaggagcgtattgttactactcattaacgcggagcttattgtaggagtcttctccttcacaacaacacatttctcaaagcattgcacggcagtaaacctcattcccacctacagggcaaggtttctgcattagttcactttggaatgctggttcaacagactagtggcggccatgggtgtcctcaacctctccaattatccttggtcttcctgacctctctcattgcttcaactggagagttgacactgaatttcgcctgtatttctggtagatcaacacgcatgaaagtatttatctcaaactcatctcctatagtcgagggcactgttggctgattcgcttcgcgctgcttttcagcccattccagtttctgtttcgtcttctcattctctggctccagtgtcagcatgaatttt

SEQ ID NO: 110556 - DNA, 873 bp, Zea mays
  Clone ID: MRT4577_32319C.1
gataccaccgccagaactttccttcccaaaaaaatacgaggcgccggaacctaattgtgcattccgattccgacgaggacgacggcgagggcatgaccaccgccacaacccccgcctcagtttcagcttccgtcgctagcggcggcgtaagcggcagcggaagcgtcggccggccctcgccccaaaacctcagccccctaccagtccccttcccgtcactctcgctatcttctgcccccttcgtcatctccgatgacgacgaggacgtcgacgagatcgtggaccctgacggggactctcccatcgttgacgcccctgaggtcttctccccgccagctcctcccgcgctccatgctcccgctcccgctcccccttcccctccccctcctatcactaccccgtcccagaccccaatcccgactccaccttcggcacggaccccgaccccgactccgccttcggcgcggaccccgaccccgactccgccttcggcgcggaccccggcctcaatagcgcctccgcacccgtccccgctgagcggccggttgcgcccggtggacgagttcctgcggcggctcgggttgcttctgcggccggactggctcgagtcctgcgctgcggggattcccggcttcgacggcctcggtggtgttgaggcgcaggccaggcggtgcttcgagcagtttctcttcgccgatatgaactcttgcggtgctggggtgctgccggagggcgtcgggggcatgcacgctgagttccttgatggccccttcgtgcttcaggttgatgaagttgccaatatttcagttcctttaaaggaaaggtatcgtgaagcaccggcaggacccaaaaggtggttaaaactatcaatga

SEQ ID NO: 110557 - DNA, 390 bp, Zea mays
  Clone ID: MRT4577_3231C.1
gcgcgtgcgactatgcacactatagaaataaaaaaaggaaagaaagagcaaatgcgctagtaaagaaacacgctggtctaccaaccagccagctaactaaagactacaaaaaaaaattggcttcattcaaacagcaggcagcaaaaaacgcttttgattatccacagccgcaacaactactaccattcagccagctagctggtgtgagccctgggaccttcttgatacaaccacaattgttgccgctctaccatcacgctgcgcataacgctggcaccctcttacaactgcaacaattggtgccattcaaccaacttgctgtgacaaaaaaagcagggttgtaccaacaaaacatcattggtggagccctcttttagatcccttatgagt

SEQ ID NO: 110558 - DNA, 448 bp, Zea mays
  unsure (1)..(448): unsure at all n locations
  Clone ID: MRT4577_32320C.1
catgactagctcagttactagtttttagcagcttgatcttgatcagactctgacgctgaccccaacctgatcattgatgcttaccaaagcagggactaccccacccgcctggtgccaaccaggctctacaggcagcagccttccgccaggcagtaccgtctgcagcccaccagctcaggcagtatctccgtcatgactgagccctagtgaagtgacagagcagtgctgctgccccgtgacttactggtccaagcatngcacgacaataccactcactcactcactcaaccaagcccgtcggcaggcagaccggttgttctagagaaaagagatgtcttgcggcacagccattctagactgcatgactgcagtcgcttcgacaatagtgcccttctagagagaccactatcgtccgattcgacagacaggccaagtgccatgctagact

SEQ ID NO: 110559 - DNA, 297 bp, Zea mays
  Clone ID: MRT4577_32321C.1
accataaccaaacaccacctttttttactttattacaaagatcacccacagcggcataccattgaaacgcgggtaggcgcatcaccatatcatcccattctatatctcaagtgctaacacacacaaactctctaccacaccctcaacccaaaaaaacaatatttcaacaaagaacccccttccttcccaatctaatctaaaaaattctataaacatcacgttttattactaaaacttcattcatcttcttcctcaacttattctatcttattttaaatcaaaattcttcactccttt

SEQ ID NO: 110560 - DNA, 245 bp, Zea mays
  Clone ID: MRT4577_32322C.1
cccacgcgtccggctagttaatgctaaagattttgccatcgtttattgtaacctttgatgcggattgtattgtctaaattttctttagtcttatagcttgttagattggatcatatgcattgaaaccaatatataagaattgctttaaaaaaaacaaagaaaaagctatacattcttattaatgaaatctacaaataccatcgatgatattaaaaaaagatacatgaaaaacagataacacaatc

SEQ ID NO: 110561 - DNA, 337 bp, Zea mays
  Clone ID: MRT4577_32323C.1
accaattcccaattccacccacgcgtcacgccacccgtccatttctacattgagagcttaccttctttgactgtgtatttatatatatgtatatgggttattccattacaaaatagatccaatacataatctaaaaattcccacattaaaacacaaacccgaactacattgaaatctaaccgattttatactaaaaaccggcttaacggcatcctaaaacataagtgttacagtgatacaaatacccaactaaccagattacacatcttaccaggcctgttttcaactactagcctttttatcttcttgcagactctaaacatcatgaatcattaac

SEQ ID NO: 110562 - DNA, 160 bp, Zea mays
  Clone ID: MRT4577_32324C.1
cccacgcgtccgaagagatcatgtggtttaatttgctgcatcttcattatgttgcaaccattcgagggtgggtagttcatatgattcgtcgatgtcaccccacgaaaatttactgctgcgccatatgaatacctgccttatcacggtgtttgaacataat

SEQ ID NO: 110563 - DNA, 331 bp, Zea mays
  Clone ID: MRT4577_32325C.1
gggggttacgaatgcgacctcgagccggccgggccgggctttctactctaaccctcaccctagagccagagctgcaacgtcgcgcttagacgttcgagatgaagtctatctataaaatcctgcgagagctggcgtcatgccggccatgagggagacactctacaacttccctcccaatgagcgagcacgagatcgagtagacctgttctagcgaatggacgccatgggagaacaaaatccctccatctaggagatcccctggggcgtcgggtcatacactggtgtgcttattctcaaaatcgaccaccgcatggcgagaatgctgcgtgtc

SEQ ID NO: 110564 - DNA, 314 bp, Zea mays
  Clone ID: MRT4577_32326C.1
aaaaaaaacaggaaagggggtttttaagaaagcccttttttacagggatccctcacgtttggagaaattaagccccccctggcagggcttttaactgaactgggttcccatggtggcccagcgtgccccaggttttttttatttgtaatacaacgggttcagggggcttttgcagtttccctaacaggcccaaacttggcagggggcccaaaagggtgaaaaaatgttccccccccctcccaggtttttatgggggcaaatcctgtttccttcagcttttccggcttaagattttcagccagtgtataattttt

SEQ ID NO: 110565 - DNA, 282 bp, Zea mays
  Clone ID: MRT4577_32327C.1
atttcttattcaaggaatctaacaaaaccatttttgaggaaggtgaacagtctgtacgattttgtttaaatgccttaatatatagagactgatcacaagatattaaagtccaaggcattattggaacatgcacagcttggtagaagaaaggagccatgtcctctgacacaattgtcgttcaaggaaatacatcagcatggaaaacgtgaggacttgatcgaaggactggtcttacagcattcatagacgactcaccgagtgaacggatccagccagacagga

SEQ ID NO: 110566 - DNA, 3893 bp, Zea mays
  Clone ID: MRT4577_32328C.1
aattcggcacgaggcttatgtaaagcttgacaaacacctggctactgaggagcagaagatgcatatactttcacctgccactgcttcaactgcgaatgcagcttttatacatgcagccccagtcgtaatagaggaacattgggtgtgctgtgacatatgccagaaatggcgtctcctaccttatgaaatgaatccttcagatcttcctaagaagtggaaatgtagcatgctacagtggctacccgggatgaataggtgtgagattagtgaagaggagactacgaatgctctgaatgcactttatgtccctgcccctgcaaatggtattcctgcagttggtcatcctcatgttgcttcaacaggactagtaacatccagcactcccaacatgaatggacatattgagcagaataggaaaagaaaaaatattccaagtgatggaaattttgtggctgagggttctcaccaaacacaggtttcaggtcatccaatgagcaaccaacatgctcccagtaaaactaaaacttatactgatggtatccagtatccggctgagagggattctgtaagcaaatcagttgacccaataattgaaaagcaaaggtccaagagcaaacatcacagtagctattctgatggaggagatcttgttgaaagacctaagaagcattctaaagtgaaaagcaagagagacttagatcatgatgaatacaaagcttctaaaaaaaaaaaaaaagaagagcgacaccattttgatgtagatcggatccttggatctgatttagctagcggagatgttcctgatgaggccaaggctttgcctgcgaagtcagcaacctcaaagggttcaggtgaaaggactgacctttcttcatcaaagcaaaaaagtgcctcacggcataatcgtttggaaacttccaagaaagcaagacaagatgatttagttggtcctgaagacgagagcaagggatattttcaccagtcagatgtacaaagatcagatttgtctagtaagaagaggatagtgaaggaatgggaggagagccagcacaattcagtagctcatgtaagcaaaggagctgtcaaagaaacctatagggaccagaacttaaaggaagcaaagttgaaatcattgaattctgaagagctgttttctatgacgagcaccaaaccaccaaaagttcaacatgctgatcaggttttgtcttatgatggggggcgtatgaacagtgagttagttgaggataacacactctttagtggcaaaagaggtctgcctgaacaagaaaagagcctttctgatcaggctttggacttgggtgaacctgctagtgatgtggcctatattcagacttcagctgtaacttcaagttcttcaaaggcttcggtctcacaaaaaaagaagcagaccactcaagctatgaagacatcaccaattgagtctctttcttcatcaccacagagaaactctaaaattgacaaggtctctgcctctcatagtagagtttcaggtaaggatggatctctgaatgctaactcaagcactgtgccaaccatggcaaaacaactaaatactgaagttcgtgtagcaagcagtgatcaatggtctagtgaacctatttcggttggttcttcccgaagaaaatctgatagagataatggactggttcagttaactcaaggtcatgcctctgatggtattcatcttgaaaggggtttcaatgaggacctgcagcctgaatctgggagaaaggattccaatgtaaagagctcccatattcctaaagcttctcaccatttgcattctggtgaaaaaaacaactacaatacagatggctctcctatgcaaccaggaaagcatcctgttgatccaaagacatcagtcttggataaatgtgattcaagcatgcatgaaagtaacaaaagcacaaattctcttcaggatagaaatggatcaactcattgcccaccagatggaaatcctctgctcggtttaccatctggaaaagagaaatcatatatcaacagcaacaagcaagattcacagaagcctaaaccccagatggtctgctcacctttgaaagaaaacaaactggattctcactccacaccattaaaacctaatgggtcaaaattgactccacaatcaagacaatacaatgctcaaaatggaggacgacatggcactgcaaagcatgcaattcctagtcctgctgatacttctagtccagctaggaaggacaatacttcaactgcatatgctctcaaagaagcccgggatttaaagcataaggctaatcgtttgaagggagaaggaaaagagcttgaaagtacaagactctactttgagtctgccctaaaatttttgcatgttgcatcacttttggaacctcctagctttgatggattgaaacaaggtgatgcagcccagagcatgtattcagatactgcaaaactttgcaactttgttggtcatgcatatgaaaaatgcaagaagatggctgctgctgctttagcatacaaatgtgttgaagttgcttatctgaaggctgcatactacaaacacccaactgcaagcaaagatagacaagtgttacaggcagttgtacagactgcaccaggtgaatcaccatcatcttcagcctcagacattgataatttaaataacaatggattatccaaggcctcttcaagcaaggatgctaattcaccacaagtggctggaaatcatttgttgctggccgctcgaaatcaaccacacttgatgcggttactagcttatacaaatgatgtcaatagtgcctttgaggctactcggaagtcacacatggcaattgcttctgctgctggcaatcatgaaaatggagtcgatggtcttccttcagtaaaaacagtactggattttaacttccgaagtgtgaatgatctactaaggcttgtgcgaatttcaatggagtccatcagctgctgacgtgttcagaatctgagaaagtgccacccgttggaagttcctgttggatgtttaatccaattaacttttcttgatgaagtagcatgaaactgaatagttcaacagtgaacagtgtaaaagcataggtcttctcatttgagcttgctggtcaatttgtacagagactgatcgtggaattcttccttctttcttattttgatggcacccagttagtatacaaagttgcatatccacttggatgatttagttagtgaggccacaggttaagatgagctttgcactgctcaatgctcgtaatagttttgaggaagaaggatgctcttgcgcatgcagttgatgattcatttgagcagtgcaaaatggtgtgtccctatcttgcgcatgcagttaatgattcatctggaaagcggcttgctactgagcattctcttccgaccgtatcatagtttcctttgagcagtacaagatggtgtgtcgccacttcaattttgatgggagaggacagcaaagccaactaattgtgctaaccaagaaatcagctactatgccatgtcttctggatgaagttcacgcaggtttcaaataagaaatcacttggactatcggacttgtatgaatgttgtacaaagatctctaatgtacattaaccttttttttttcagccagcgcatgtacatggtggggcatttgttaccacgtgctggtctctatgtatgacgcctttggttctgccaagcctgtctttcattattcttcaaattttgtgatatttagttgtttattaaggtatataacgtttagtactgggaatttgttgcagaatgcaaaaatgaattccgtgctgtgcaacttgtatcttaaccttagtttcagctttcagtagggatgataatttaatccaaaacctgacaggtacctgacc

SEQ ID NO: 110567 - DNA, 289 bp, Zea mays
  Clone ID: MRT4577_32329C.1
gtcccacatttttctttacatcaacccacgggttcagaagctactggcggttatgtgctcgaacgaaccaaatgctgacatcgaactacagctgatgatattgccaaaagtgtccaccatgatggagagcagcccaaccgcgcaactaacgctcacattaaatcatcacctactcttgacacaggattacggttcaccataaagggaacattggaccaggcactaacgggaaccgatctgagcgccctaaccgcacaggcaaaaaactgcacaatgggagagtggcccc

SEQ ID NO: 110568 - DNA, 529 bp, Zea mays
  Clone ID: MRT4577_3232C.1
agatcaaagatagtcacctgcctatctatctacccagagagagagacgaacgcttctcatctatcaagtatcgtggaacccaaaacgaactaggcgaagtctttctcctcctgcttctccagatgacgataaatgataccacgccaaccctcccactgcagcacgtttatgacctccaccgggcctggactgcacatcgtcgcgaggcaactcctccatccagcgaaagatctcctccgacgagaatagctgaggactcctaccaggctatacactcgccatgggtggtcaatgcttcgggcaaatctgcatgacgtgagatctgtactaacgctatacgtaataagcgccagctagaaacactacgacaacaccatcgcggtgcaaatcattcgctgccgtatagactgatctaataagtaaagtatactaagaccttatatggagtccgtacatggacaatgatattctcggcgcctacgatccatcgagctgcagcctcagtgcactacatcgactacattgcgac

SEQ ID NO: 110569 - DNA, 605 bp, Zea mays
  Clone ID: MRT4577_32330C.1
gtcatctgattacattttttattgacaagcattgattgtggttttttcacaatactgtacatgattgcatggaatggaaaacatttgcggttagatgataagatcaaagctagcgaaattgttgcatgcagaatgaaactcacacatatgctgatcaaatctaagcaaaatagtgctgatccatgtaatgtggttaaaaaactagatgtgaatataaagaaatatagcgttagttcccgaaaggtgatcacaagtaagaatttgacgatgctgatgggactaatagatcaagagattgaagagattaatgcaaaaaagagaaagcgaagtggacatccagcaggacaaccagaactgaaggacgatgacggtcaactaagggcaaacgcagtcaaggctcgcgacgctgaattgggttgtgaaatgtaaagctacggcgactatagcactttgaaaccgctgttgctccccctgacagagaaagcagtttgaatttgacgatgctgtggctacctatagcttcaaagctagacaagactaattcgtccttcagtagagctgattgacataaacgtagttgcagctcttgcgcgttctgctttttc

SEQ ID NO: 110570 - DNA, 901 bp, Zea mays
  Clone ID: MRT4577_32331C.1
ggcctctattttccctattcccactctctcttctcccctttctttttctctccgcacaaccttcttccttctctgttcctggcgtagcagcagggagccgtgctcctctccatggcgcccaggcctgctcctcccctcggccagccatggcgtcccctgcccttctcctcccatgggcgtgagctccacttcccctgcaggcgagcagcaacttcggccagcaagcagcccacgccccttgcttccatcgatggccggcgccctgcacaatgtccgactccctctccttcccaaacagatagcgacattcatcttcctactccaggcgagcagcagcaaatcaccatggcgcacttcctctctctgctgtccatggcgccaatcagcagccgtgtcctccttgcagcgcccctgctccattttttctccctctgctccctgtgcggtgtgctcacggcacctctccctgccttctctctgtccccagcgaccagcagcaaggacagcccccttccctcgctcctttccgatgtgcctcgcgtgttcaacacaatgcctgcgaggaagatgtgttgttgcagccccgtcgacgctcgccgggtgtttgctgtttttggcgcagacccgctcgcgacgtcgtcgaccctcgccaccgtcaaagtcgcgcttcgtgccttgcagttcgacgaaatgctgagccacgtggacagtccatgcggctaaatcccgactcgttcaggttgaatccatgtgattgacttacttgcacatttgtcattgtcatatatatatatatgtatgtgaatatgttgtatgcgaattaaaactcatggaggagaaagtggtacgcgtagatgtgtttgcgattggaatgacaaaaaaaaaaaaaaaaaggccccta

SEQ ID NO: 110571 - DNA, 237 bp, Zea mays
  Clone ID: MRT4577_32332C.1
tgatagtaatcagctcgaaatctatagctacgtacccgaaactgtactcacgctactctatatgcataacaagcaggctatgctgacgactgcagagattcagaattactaacacaatccaacctagaatgcgaaggtgaaactaactcgaactgctatggcctgcgagatgattgatgcagcatcaaatgcgacttactgagcagtggctagacgactgagagagatggacataca

SEQ ID NO: 110572 - DNA, 320 bp, Zea mays
  Clone ID: MRT4577_32333C.1
gattaaaagtctaggagcataggcaggagtttttatgaatccagctactacactcactgcagtggattacattcttgatggcgatgacctgctcttcattacgtatggcactcttgtctacgaagaaatgagctttatgtgtgtgcaagttcggtctgtatgttttctttagatttgtttagtcattaccttatattgggcctttactctctatttttatgcattttgtcttttttttattttttctcttctttattttttacttttgttgtttttttttctttagttttgtctttatttttttttaatgttatttttaa

SEQ ID NO: 110573 - DNA, 538 bp, Zea mays
  Clone ID: MRT4577_32334C.1
acaccgagtgctagaagctgatgtgagtaacgattaatttactcttaacgtgggcaactatacaacgatgtccaaagcaccatagccagcatgggaacttacaaaaaacccaaaagctctgcatatctaactcgcggcgaagcaggccaagcccaggcgccctggaaacaaggtcccacagagcctatctcggcaaaacgaatagaggctacgaggatgaagccctggcctagaatcacggtggaattgacagcggcagctttatcgttcatggtgctcggcaaaaggccgtccaagcgctgagaaaaaatgaagcgcttaagctaatttttttttgaaaaaaagacacatctttggcaaatggagatgttctatctaatgctatccaaacaaaagctacttgcaaaggggccagcttaggctagataaaggtcatgcacatgacgagaactagacaagaaggtaaaaacccacttagctacacattgggtgcgcatcgagagacgcactgatctgagagcaaactagctagggagga

SEQ ID NO: 110574 - DNA, 186 bp, Zea mays
  Clone ID: MRT4577_32335C.1
gtaagctcggaattcggctcgaggtgagcttgcttgctagcgggtctaagccggtacgacaggctcatcgacccgggatatgtatagaattacttgcggacaagggtagccgcaagagaaatcaccccatgcacccctgcggggatccactggtacgacgcgtcaggacaaactggggtcagtatc

SEQ ID NO: 110575 - DNA, 319 bp, Zea mays
  unsure (1)..(319): unsure at all n locations
  Clone ID: MRT4577_32336C.1
caggaaccggcccggaagaaccggggcgacccacgcgatagatacacccccccaaaccaagcccccctgggggaagggatccgaagggccccggggaagaacnaaagcggcggaagacggggaacaccgaaggaacgtgggcaggcaaaccggggccaccagcaacgaggcgcggagaaagccgacggcggccaacgagagaagcgcgacgacaaagaaaacaccgaccgggagacggggaggccccgcggcatcggcgacacaacccacgcctgcgagaacaacaagcacgacgctaacgagaacaagaacggcaagg

SEQ ID NO: 110576 - DNA, 540 bp, Zea mays
  Clone ID: MRT4577_32337C.1
ttgggtacctcgaggccggccgggaaacctattacccctctgatctccctctcgcgccgccgcccaccatagtttttttcgaaggatccgccgcccaccgtgtcgacgacgcagccaccacacccggcgccccgagagacggcggccagcgctgacgcttccctgacaacgaggatgaagaagcgcgctgcggaggcgcgcccgaacctcctcgccgacgagcgcgacgacatcaaggtcctccagctctcgctacgacgaatccccgcctcgagcagaaccaagtcgcgcctcctcccgatgccacatccccgttgcatgggcactgacggcgactgcgactgcgttatctcggacgaccgtaccaagtctcggtcaccttccgcctccgaactccacgagtctatgtcgctccaacgattacccgactccgaggtcatgccgctctccacgctccgcgcggattaccgtccgtaggaatcgcggcgacgactccgagtctcacacgacctctgcgtcgacgagcgtgacatcctccct

SEQ ID NO: 110577 - DNA, 316 bp, Zea mays
  unsure (1)..(316): unsure at all n locations
  Clone ID: MRT4577_32338C.1
aattnccgggtccggacccatcgccgtccgctagtgcgttgcggcgataattatgttacccccatgtttgggtacctanntctatgtacctannttattatatgccgaaaatctattatgttgtnncctggctnnngaattgaaccctcaaatagaggtttggtttggagaatataaattgnntcccaagattgggattgggcttgtnntaaaagctcaatatnttngttattgaaagtnngttattgggctttaaaaaaaattaaaataaaaaataaataaaaaaaaataaaatataaaataaaaaattataagg

SEQ ID NO: 110578 - DNA, 373 bp, Zea mays
  Clone ID: MRT4577_32339C.1
tcttatacgacttctatggggaaagctggcgcgctctgcaggctccgatccggtatagcgggcgcgatccacgcgtccggcggccaggtcgcggagctgacggcggcgcagatagcgcagtagctgatggagatgtgcggtctgcaggagacgactccatgctggtacgctgttgccgttggtgttcactactgaagagactatgtgctgaagtatatccgttggctagctatctagtacgagtcatttagtcgttgatgatggagacataatgtgtcacgcatcacgatggttgagagtgttagtgtgagcaatgacctgaatgaacaatggtgattatatgaacaaagtattgttcccgagacctgaccgc

SEQ ID NO: 110579 - DNA, 483 bp, Zea mays
  unsure (1)..(483): unsure at all n locations
  Clone ID: MRT4577_3233C.1
tgagcctttgattagtaagcaatggtttgttacgatggagccattggctgaaaaggctctccatgctgttgaaaaggggcaattaaccattcttccggagagatttgagaagatttataatcattggctaacgaacataaaggattggtgtataagtagacaattgtggtggggtcatcgtataccagtttggtatattgttggaaagaaatgtgaagaagactatattgttgctagaaccgaagaggaggcacttgcagaagctcatgaaaaatatggaaaatcagttgaaatatatcaagaccctgatgttcttgatacttggttctcaagtgctctgtggcctttcagcacgcttggttggcctgatctttccaaggaggattataagcatttttatccttcaactgttctggagacaggccacgatattttgttcttctgggttgcacgaatggtcatgatgggaatngagttcacagg

SEQ ID NO: 110580 - DNA, 520 bp, Zea mays
  Clone ID: MRT4577_32340C.1
agtgggcaaaccaggcaaccatttgataacataaacccaggaaacatacagaactagcacttattgcaacacggtctttaactacgacagaacaaccaagcactgcatgtcataaggtaaaatggtactttagtgttacaagtagcacataacttgacacaacagacagctgctcaaaagaaaccagagatccttttagttacagcagctcataacttgcaccttgtagcttcataaatttgaccgttgctgcagtacctcaaaagtcaacgaaggtttccctgcaaggccctagttattttcagtcatcaaggtggcaaccctggtctcgttttcgtggttctccaccaactttaaattcttcgagttcttagccaccccctccaacaactggattgtttccattgtctccatcggaatggttttaaagtcgtccgactaatcgcgattagtcgcgattagtcggacttatcgctgctgcaaggccgattagggccaccgacgcgattagggcgactag

SEQ ID NO: 110581 - DNA, 508 bp, Zea mays
  Clone ID: MRT4577_32341C.1
tccttgtcggttcaaggcgtccttcctatttcatgctctaggctttcgagccgggttttgttttggaagcctgacgcggtagcgcaatcgaccattccggtggcggcggcgctgccgcctcctcgccgagggcagcgaggaaggcgtcgccttctccggtgttcctgggaaccgcgctgtttgttctagggtttgtgtccctctttacgggacacgtggtcaccgacgctgactgggcgcggatccgcagtcgatggcgacccaaacaggtaatttgttgcagacttgactgctgtactgtctaattccacaaattttgtcgttgcgtggtctcttccgtgttatagcctgatagaagtgaaagaagaaagttctttttgagccgcttggggaacaatttgaggaattgagtgcaagagtttagtattttctggcattgccaagtttcactaggaacgtcgtttaaattgtatttttggtatgccttaaatgctctctatactgtttt

SEQ ID NO: 110582 - DNA, 404 bp, Zea mays
  unsure (1)..(404): unsure at all n locations
  Clone ID: MRT4577_32342C.1
aagtgatccgaggagtaactcggaatcggctcgaggcagggaagtactccgcatgcgaggaaccatctcgcgggagcacncatgggaggttagggctgatctttacttctacagnggaccagaggagattgagaaggatgagcaggctgccgctgagaaggctgtgaccaaggaggaattccagggtgaatggacggcaccagcgcctgagttcactgctgctcagcctgaggtggccgactggtctgagggtgtgcaggtgccctctgtgcccattcagcagttccccacagaagactggagtgcacagccggccactgaggactggtcagcagctcgcacagcacaagctactgagtgggttggagccacactgagtggtctgagctctctgcaggtgctga

SEQ ID NO: 110583 - DNA, 375 bp, Zea mays
  Clone ID: MRT4577_32343C.1
cccacgcgtccgaaatcgagccaggaaatgcgtctgctcttacacattgtgggatgatttacaaagatgaaggtcacttggttgaagcagctgaggcatatcaaaaagctaggatggctgatccttcctacaaacctgcttcggaatttcctgctattgtgttgactgatcttggaactagcttgaagcctgcgggtaatacagaggaggggattccaaaatattgtgaagctctggaagtagacaaccactatgcgccggcttactacaaccttggagttgtttattcggagatgatgcaatttgatatggctcttagttgttacgagaaagctgcactggagagaccattgtatgctgaggcctattgcaaca

SEQ ID NO: 110584 - DNA, 403 bp, Zea mays
  Clone ID: MRT4577_32344C.1
tcgggcgacggtccgcctcagcgcatcgcgggcggcgacctcatggatcacctttagccctcaatcatggtgagttccccgccaaaactgtattcaccttcaagatccacggggtgcttatgactctcacatgtactaatcagctttgctcaagccgacgtcgatagtcgaaccggacgttgccgccgtagctgccaacaagagtacattccataagtacagctaccgtggcgtctgacctagatgcgcttctcgacatgtccactgactaccttgttcagcttttgcgcgggcgcaccaggagaaggtttcagacgcgtctgaagaggaagcccatggcgctcataaagaagctacgcaaggggaaaaaagatgctcctgcttgtgagaagcccgagccagt

SEQ ID NO: 110585 - DNA, 378 bp, Zea mays
  unsure (1)..(378): unsure at all n locations
  Clone ID: MRT4577_32345C.1
cccccaaagccgggcgggcccgcgggctcngccttcctccccttcacgcggccgctgcgctctgtgtccgggccggggccagcgagggggggcttccagccccgggggcggccgggggggtccnnatacgggaccgagggcgcggagcatcagggacggggagttctccgagggacctcaagcgtggcgtcgggaacctgccggtcagcggcnacagtgcgcagctggccgggctcttcgagcaggcgggctccgtctagaggggcgagggtggatactatagaatgactgggcggagccgtcgatttngattcgtgacaatggcttcanctnaagaagccggggctgctgtccagcaattcaacgggtatacatttc

SEQ ID NO: 110586 - DNA, 928 bp, Zea mays
  unsure (1)..(928): unsure at all n locations
  Clone ID: MRT4577_32346C.1
cccacgcgtccgctcagcagcactgaacagcctcttcgccattgggtgtgccagcggagcatttattggcggggtgatagcagatcacctgtcaaagtacttcccagattcggcacgggtcatgtgtgcccagtttagtgccttcatgggcatcccgttttcttggatcctcctcacagtcatcccccagtcagttgactactggtatgccttcgccgtcacgcttttcttcatgggcatcacgataagctggtgcgccacctcggcaaacaaccccatgttcgccgaggtggtccctcccaagcaccgcaccatgatctacgccttcgaccgcgcgttcgagggctcattcgcctcgttggctgcccctgcagtgggcctaatcaccgagaagatctatggctatgataccaagaccgtgaaccttgcgaacgggtcagcggaaggggcgtacgccctctcaagggggctgctgaccatgatgatcgtgcctttcggtgtatgtgtcctgttctacagccccctgtaccttgtgttcaagcacgacagagagaacgctaaatttgccagcttcaaggagcaggagttagtatgatcaatgatcatacgaatgtgcttccttggtccgcattcataacctctcgtcattccgggctggagctttgcgtgatgattatgaagataactgccttgatcggcattcagaacatctggtcataccgtcctgggtcattctgagtttcttgttgagattctggcaattgtgccacggagaggtgtggatcaacgtctgttctggcagattttgaagattgttataagccgacctttttttttttgtgctgatcacctatccagaaagccatggcttctcctgacgactgatttgtgttgttaagggatgatttgcttttttgcatggctnccc

SEQ ID NO: 110587 - DNA, 546 bp, Zea mays
  Clone ID: MRT4577_32347C.1
aattcggcacgaggcagtagcttgctttacctggtccccgcccccacacctcttcccttctccctcccatcacacaactccatctccaccccgtgaccgacccacccatccatggcggcggcgcccaagtccatcgagcggctgccggcgcgccgggtggtcccggccgagcccacgccagccggcccgctccgcctctcctggctggaccggtaccccacgcagatggcgctgatcgagtcgctccacgtcttcaaggcggcccctgaccggccggccgccgccggagccagcccggccgggaccatcgagcgcgccctcgcccgcgcattggtccactactaccctctggcgggccgcctggtcctgtcggagtccggcgcgcagcaggccgtggactgcagcaacgccggcgtgtggttcacggaggcccaggccggctgcacgctcgaggacgtggactacctggaggccccgctgatggtgcccaaggacgacctcctcccgcccaccccggccggcgaggacgagcgcgcgctgggcctg

SEQ ID NO: 110588 - DNA, 1008 bp, Zea mays
  unsure (1)..(1008): unsure at all n locations
  Clone ID: MRT4577_32348C.1
ttgaattcggcacgaggcccgttcttccttttttctttcttcggacctcgcgccccgcctcgcctctcccaccatggcctccgccgccgccgccctctaccggagcccctccttgctgagccgccgccacctcctcatccgcctcctctccacgcagacccagctcgtcaccccaccgacgcccaccaccccggccgacctgtcccgcctcaagtcctccatccgcgacgccgccaccaccccggacgcgcttgccaccctgttcctctcgggcctcccgcacccggccttcctcgccgaccgtccgctcttcgcgctctccgtgcaccgcctcgcctccgccggccgccgcgacctcgtcgcctccgtcctctcctcctccctcaccgccctccccagcccacacccgtccgagggattcctcctacgcctcatctccctctactcggccgcaggtatgcccgaccactccctcgccgtcttccgcctcgtcaagcccgcctccgaccgcgccctctccgcgctcctatccgcctaccacgacaaccgcctttacgaccgcaccgtccgggccttcaacaccctccccgccgagctcggtatcaagccgggactcgtctcccacaacgtcctcctcaaggccctcgtcgccagcggggacgtcgccgcagcccacaccttattcgacgaaatgcctgacaccgctggcgtccaaccggacatcgtctcctgcaacgagatcctcaagggctacctcaacgccggcgacgccgacgcctttgatcggctagtcaaggagatcgctggtccgaaaaggcgcctgaagcctaatgtcgggacctacaacctccggatggccctgctgtgctccaaaatgaggagctttgaagctgaaaaactgttggatgtcatgggggcaaacggcgtcccgcccaaccgcacgagcttcaacacggtcatcaagggctctgaaccnaaggggggaggtgggcgctgccatggctctct

SEQ ID NO: 110589 - DNA, 301 bp, Zea mays
  Clone ID: MRT4577_32349C.1
tttttttttttttttttttttttttttttttcggtttggttttttttttttttttttttttttttttttttttttttttttttttttttttttcccctcaaaaacaccctttttgaaatccccccccatttggtaaaacaaatttgattttacatccttgtcttaccccttaacattttgcctttaatattttctggaaagtaaaaaagccccctttcaggtaccccgcccattattttctttaaaggttttctcccaatttttgtttgcaattccttcccaaccgttttattttttttat

SEQ ID NO: 110590 - DNA, 1701 bp, Zea mays
  Clone ID: MRT4577_3234C.1
ggcttgggaagtgctacaaactggcagcaaagctagagttgtgggttctacaaatgctaatgagcatagtagtcgatctcactgtatacattgtgtaatcgtcaaaggagaaaacttgatgaatggagaatgtacaaagagcaaattatggctaattgaccttgctggaagtgaacgggtagcaaagacagatgcacaaggagaaagattgaaagaagcacagaacataaacaaatcactttctgcacttggtgatgttatatctgctcttgcaacgaagacctcgcacataccctttaggaattcgaagctaacgcacttgctccaagactcactaagtggagattccaaaaccttgatgttcgttcaaatcagtcctaatgagaacgacgtgggtgaaactctttgttcgttgaacttcgcgagcagagtgcgaggcatagagcttggacaagctaaaaagcaagtcgatattggagaattgtcaagatacaagctcatggttgggcgagccaaacaggacagcaagaacaaagatgctcagattaaaagcatggaagaaaggatacagatacttgaagcgaagaataaggccaaagacttgctcactatgaatctccaagagaagatcaaagagctggaatcacagctcctagttgaaagaaagatagcacggcagcatgtcgacaacaagattgcccaagaccatctgcagaagcagcacggcatgaaagaagagaactcgtacccgagaagcccgatggccgagaggaacctcaactccacagcagagaaagcagcagcgcctaaagacttggggggcatctcgaagcagatgttctccgacagcaacactgacacttacagcttcaagcagctgatgtcactaggggacgagaaggagaacgaccctgaagctgctgtgcagctgccgccgacaacgaaggccaggcgagtgtccctctgcaacggtggagctcaccagcggccgttgaacccagcttcacgcaggacgtccctcataccgctgccacggcgcaactcgctgctgccaatgcccgtagcaaagcctgctgcagcggtgttgccgcttgacaagatcactgagaacctgtcctcgcccccgctgtgctctcctccggctgtatccaacgacaggggcagccggagtaggaggatcaacagcatactgcggcgaagcctgcagaagaaggtggtcatccggccgtcgctggcagcgcaggcagggaagaaaaccgccggtgctgctgctgctgcccggggtactgacagcgcacgcagggcggcgcggcgggtgcctgtgagcgacggcgctggcgggcacaaggtacagcagaacagggacaaggagcgggggtggagcaacttttgagcgcgtccgatgagatcgcggcacctctattgttaaagaagcctgtggagatttaggtgtttattattttaggttagttgtacaaaatttaggtgttattattaggttgggtttgtgagttctcgcgtattgtgagagaactcgaccgtttgctgctgaccccgatcaggtcaggtttttacaatgcttccagggactttgtgggaggctgggagtgttcatgtaatgatctcttatgctgattactgacacagtggacagtgctttcccgatgcgtgaagaaaatttgcagggattttttttcgggt

SEQ ID NO: 110591 - DNA, 1128 bp, Zea mays
  Clone ID: MRT4577_32350C.1
atggcccggctagctgacctacaaaggaagatagacgaagcctctgaagaagttcgtcatcttacgcaagatgagcagaaccggaggccccagtacagagagcttcaccaagagggcttcgtcaacgaggatgactggtatgaggatttccatcatggaaattttgcttttgatgatacttctcctctgttagcagaactgcaggctacaccttggcccccatcttacaaaccacttcagctcccaatgtatgacagacactcagatccgaagcaatttctgatgagctacgaagcaaccatatcttcatatggtggcaatactgcagtcatggcgaaatccttcatcatggcagtaaaaaatgttgcacaaacctggtactcttctcttcggccagggatgattacatcatggcaaaagttgaaggacatgctcatcactagcttccaagggtttcagacgaagccggtcactgctcaagcattgttccagtgcactcaggatcatgaagaataccttcaggcgtatgcccgaagattcttacgactgagggcacaagcgccaacggtgcctaatgaaattgttattgaagccatgattaaggggcttcggccaggacctacaacccaatacttcgccaggaaaccccctcagaccctggagaaactgcttcagaagatggatgaatatatccgagcagataatgactttcgacaaagaagggaggaagcttacaggttctccgaaatgaccaggggcttcggagggagaatccaccctaggcacgtcagatccatccactctactcagaatgacgacaggggaagtcaacaacagaggccgcagtactcctctcaagcttcgggacagcaacagaactatccctggcccccagctcaaaggggcaaagagtatgtgggtaaccatcctgcagtttctgttgcttcggcaagccaacctcaggcatcttggcaacagcccccacctccaccaccaatgcaacccgcttatccccaaggccagcagccaaaagggagccagcacaatcaccagcagcgagacttcagggagcagtccgaagctcgcacagtcaacaatactgtgccagaatcgaagcacatccactaa

SEQ ID NO: 110592 - DNA, 1681 bp, Zea mays
  Clone ID: MRT4577_32351C.1
atgtcgggagatcatgccaagacagagatcgtgaccggcgacaagcccgcaagctcggggagaaccctttcaagggagtccagccacaagcataaggaggaatcctcttcctccaacaagacccatcgaaaggatgacaagaagaagatgatgaagaaggtggtctactatgagaccgactcttcgtcaccctccacatcgtcaagctctgactcattcgtcgcttctaagcgccatgagcgcaagaagtatatgcaaaggaagaaagaaaagatggcccgactagccgacctacaaaggcagatagacgaagcctctgaagaagttcgtcatcttacgcaagatgagcagaaccggaggccccagtacagagagcttcaccaagagggtttcgtcaacgaggatgactggtatgaggatttccatcatggaaattttgcttttgatgatgcttctcctctgttagcagaactgcaggctacaccttggcccccatcttacaaaccacctcagctcccaatgtatgacggacactcagatccgaagcaatttttgatgagctacgaagcaaccatatcttcatatggtggcaatactgcagtcatggcgaagtccttcgtcatggcagtcaaaaatgttgcacagacctggtactcttctcttcggccaggaacaatcacatcgtggcaaaagctgaaggacatgctcatcaccagctttcaagggtttcagacgaagccggtcactgctcaagctttgttccaatgcactcaagatcatgaagaataccttcaggcatatgtccgaaagttcttacgactaagggcgcaggcgccaacaatgcctaatgaaattgttatcgaggccataattaaggggcttcggccaggacctacagcccaatacttcgccaggaaaccccctcagaccctggagaaactgcttcagaagatggatgaatatatccgagcagataatgactttcggcaaaggagggaggaagcttacaggttctccgaaatgaccaggggcttcggagggagaatccaccctaggcacgtcagatctatccattctactcagactgacaataggggaagtcagcaacaaaggccacagtattcctctcaagcttcggggcagcaacagaactatcctcggcccccagctccaaggggcagaggcgccaggggcttcggaggaaggtttggggatcagcccaggaaaatttactgcctattctgcggtgaggacaagggccatactaccaggatgtgccatgtcaccattcaaaaacagaaagagatagcagaagctgcagcccaacagagccagccgaagcaggttatgcatactgcttcgtaccactcaccatacattccagagtatgtgggtaaccatcctgtagtttctgttgcttcggcaagccaacctcaggcatcttggcaacagcccccacctccaccaccaatgcaacccacttatccccaaggccagcagcaagaagggagtcagcacaatcaccagcagagagactttagggagcagtccgaagctcgcacagtcaacaatattgtgccagaatcaaagcacatctactaagatatatcctacctttgaaacagcttttacatttgttatcatttgccttttcaataaagagcaatcattgaaaacctag

SEQ ID NO: 110593 - DNA, 294 bp, Zea mays
  Clone ID: MRT4577_32352C.1
tagccaagtactgctgactcggaggagctcacggtggaggagcgaaacctcatgtctgtgcctacaagaacgccaccggacgccgccgcgcctcatggcgcatcatctcctccatcgagccgaggccgaggggcgaggcatgaggacgagtaacactcataagattaatcgtgccagattgaactgcctcgcaagatctggtctggcaatccccaacctgcttgagacccatctttgctgccgtcatccacccccccccggaggccaacggtcttctacctccccgatggaagg

SEQ ID NO: 110594 - DNA, 344 bp, Zea mays
  Clone ID: MRT4577_32353C.1
gaatattgatctattcatgagccccaaactctgaaagaacagatgttgcatggtacataggaaagaactaattacacactacgtatcagtcttcgtcagaaaagagcttcattattacaggaaagctcacagcccaatgaatccttgacagtccacaagcatctgtaaacagagtgcctcaaaaggctgcctttcacagcggtagattgtagcatactccaaatgtatcaccaaatctgaagaaaatagcatgagtaccaacattgcgatctacaatgtactgtccccttactagctcaagctcgacaccaacatcagttgaagatccatgagcaacacgcctg

SEQ ID NO: 110595 - DNA, 217 bp, Zea mays
  Clone ID: MRT4577_32354C.1
catggtgacgcggggggtgggaacgatacggtgcattttcttctgctgtgagggaaacaccctctaggagcacctggggcacgccatcgacactctgatgttacaagttcgggggcgcaactgcaactagagctttagggagttcaacggcaacaacaatggggacacattccgggcctacctacagatgaacgaggtgctcaagctcggaggccag

SEQ ID NO: 110596 - DNA, 201 bp, Zea mays
  Clone ID: MRT4577_32355C.1
ccagcattgtgcaaggctcggaagagaaacaggaagtgaaactgggtgcaaacagaaagctcaatggatgggctaggttcccagatcattagggcagagtttgcacgtcctctggtcactggaatccacccagcccacgaatcatctccctcttgaaggattttatttctactgggttttggaacaaactctgctgagacc

SEQ ID NO: 110597 - DNA, 170 bp, Zea mays
  Clone ID: MRT4577_32356C.1
atcattgtgtcgtccttggtccttgctactgtacggtcgtcctcaagcagtagtagagacactggcataaccgtcagcagttagctacatgcatagtccaggatgatctgatgttacgcagagcagatgttgtagaacaggcttttgtattttgctgccggttacatgtt

SEQ ID NO: 110598 - DNA, 517 bp, Zea mays
  Clone ID: MRT4577_32357C.1
gtgccatgaccaaataaataaataaatataaacaggatctttgagatcgagccgggatgccaagcatatgttctgcttcctgcgcgacgccggtgacgcgccactggagaaacaccgcaagctcaaggcccacgccgtcaccggcttggctatgggcagtcacctggatctatctcgtcgtccccacgtcttcctcgttactgccgggctgctgtactgtactcatgtttttattctcatctagctacctgctgttttgctttaattgtggtacaggcatgcgagtctgagacgcacctgagaagcaccggcgacgtaaaggagagggaagccactctgaaccagctaggcgcgacgcacgccagggcaggcgtattcgacgcgcatttcataggtaacttgattaacacgtgtttgtatacatggggcgcaatgaacctatgtaagtgcaagctagatcggacagcttatatattacagcgctcgcaagtgccgtaagttgcagtgagtgagctgt

SEQ ID NO: 110599 - DNA, 448 bp, Zea mays
  Clone ID: MRT4577_32358C.1
gagaattactaagggaaaaagtccatattgctgcaatgaactattcacgttgtccaccttacctatcatattcagtttcatatcattaacttcccttggcgacacgtcatgtcgtaatctgggtacaatgtcaagtgagtaaagatcgaattgttgctcgttacatcggtgcctttttgtagtgaaaaaattgcaatggtcttcacatcatcgataggtgtgaagggtaaagaagttagttggaccaattaggatctatttaggtagttggaatgtagggttgcatacaggtaagctaagggggttagttgagatagcgactaggaggcatgtaaataacttttacgtgcaagagactaaataaaagtgttagaaggtgaaggaggtggacaataccagcttcaagctttggtacatagagacaactgcaaatagaaatagagtacac

SEQ ID NO: 110600 - DNA, 291 bp, Zea mays
  Clone ID: MRT4577_32359C.1
gtcggagggaaccgaaaactcacggtctcgaatttcctaggagcggaggccatggctgggaggggaggaaaaggattgttcgccaccaatacaacggcttcctagtccgcgtataaggacaagggctaaaaaactactatcttatggttcatctgctaccctcaaaaattctattttattccaaaacttctcttttttactcagccccaaaagtacacttttcccaactaaatttcttggtattattcacaccccttacacacaaactcattttctgaatgatccttcttt

SEQ ID NO: 110601 - DNA, 611 bp, Zea mays
  unsure (1)..(611): unsure at all n locations
  Clone ID: MRT4577_3235C.1
gtaccctccgggctcggccgggttcctcccttcttacagccgccgccgccgcatcccagcctccatcaccgtttccgtctcattgccatgggtaaggtgcacggatcgttggcgcgcgccgggaaggtccgcgggcagacccccaaggtggcgaagcaggacaagaagaaccttctgtagattcggttttgttgtccatgtgctcagatgggaacttgagattgtatgaatttgagatatggtgatatgagctgatgatttttattaaaaaaaaaaaaaaaaaaaaaaaaaaaaaaaaaaaaaaaaaaaaaaaaaaaaaaaaaaaaaaaaaaaaaaaaaaaaaaaaaaaaaaaaaaaaaaaaaaaaaaaaaaaaaaaaaaaaaaaaaaannttttttttttgaaaaagggaccatttgggggcccccttttttgcggtaaaaaagggtttttgaaaaaggttttccccaggggggtttttttttttaaaaaataaaaccccccccttgggctttttttgttttgaaacatttatttccccaaaatttttttttgggggtttgggaacccaaacgtgggaattttcccccttttaaaaataaaaaaaataaa

SEQ ID NO: 110602 - DNA, 203 bp, Zea mays
  Clone ID: MRT4577_32360C.1
agagtctagagcccacgtacgtgcgctcagaatagggcacgagcacgagcaaaaagatgtgggggcttgttctgcagcagctgcacccagcagcggatggttttccgtggacagggtgattcacctgttagactttgtgaacctagcaacagctagaggaagaagcacgaccatgagttgagatatgggacccaaatagagct

SEQ ID NO: 110603 - DNA, 590 bp, Zea mays
  Clone ID: MRT4577_32361C.1
catcacggcttggaatctagaagataattttgcaacagagaacaaacctgaagaacattatggtaacttagtcagtattactgaggtcaatggaaaggattttacaggcttacaatcatctttgtcagatcatcattatattgggaatgaagagatacaaagaaaagtcagtggagtatccggaatagtagagtttgataaagagacagtaaaggaaattttagaagaagataaggaaggtatatagaaccagagataagcaagaaactattacaaactcgcaagttgaccaatctcaactgatactgcttgaaaaatacgaggttttgaaacttgagaatggcgagattcttagaaagtgtatgcagttggtggaagatagctctaatgtagtcataatctctactgatggtatcaaccatgagaaagtagatacaaacactacatcttcagattttacctttgaagccaaccactaccaaaaggaagtcacagaaggcatttcagctgcagcctttactgctcaatgcaatcaggtgaaagtcacaacatgttttggtacggctactgaggaacaacatactcatcca

SEQ ID NO: 110604 - DNA, 1382 bp, Zea mays
  Clone ID: MRT4577_32362C.1
gacccccgaggttggccggggccgagacgcttccccttctcctcgccgatggagtcgcttgcctcgcaagcgaggccggcggcggtgctctggctcgccggcttcttctaggccgcgcgcctccaccgcgttgtctccttctgcgccagctcgaaggcactatccatcaggattgcacagtgcttcctgctgaacgggcttatcttccttgggagcttgcttacacttacatcggtggtcattccaactctactgtggatactacctgagcgatgcaatcaaacagcaggacatctttgtgaacacagggcagccatatctatctattcattcttgcgctccggccttgttgagattttttatgtattttggttttatccactttatgtcttcagcttcatattaaggaacattttatgccaggtataatgacattgccaagcatgcattggatgttgtgaaaagtaagagcctagttttgactcaatcactggatgctcacaacataactgaaacaaaagagcagcctgaaggatttgacagtgattggttacataccttactttggcaaggcaatgaacttcctgctcctgtcattgatgtatgcctactactgctttgagtacaagtggaacttctttgcagtgagtctgcatgagaggcttgatttctttgaatcaaactgggcgttctttgctggatttggtgctccatgcgtccttccaattttcttcttctctcctcttataagctatgggtttctggctatactttatccgttgtttgtcttgactgccgcaggcactcaagctgagcaagtaattgatgcactgaaacctgcacacgaagggaaactacaaagaatacctgtgttctttgtcgcaaagcgactgacgacaaaagtactgcaactgtttccggtggcacagaaagaacaatgaaggatccacagaaacaaaccaaggagggaaggccgctgtgtgtgttgggtgtgctgctaatcacaatgccccgctcgaacgaacgttgcatccgtaaggtgcgcacgccctctccgctctccgtaacgtggaagggaggggcttgccgccttcacgctgtaaatatcctgtaacaagcatttctgtcgaatgggaactttgaaaatatagagaattgcactttgttatttagcaagtgttgatcattcaagattaggccggcgagtcggcggcaccaaccagtaatgattggttccttggtttcatcttggccatgacagaacagtagtgctctctctctcttttctttttgctgaatgtataactcaagccgcccttgagattaattattattgagaggctgctagctttcgtaagatgctggacaggctccatagtttc

SEQ ID NO: 110605 - DNA, 1338 bp, Zea mays
  Clone ID: MRT4577_32363C.1
ttgggtccctcgaggccggccgggccgatcccataaatcatgctcgcgaactaaatccaaaggtgagacgcttccccttctcctcgccgatggagtcgcttgcctcgcaagcgaggccggcggcggtgctctggctcgccggcttcttccaggccgcgcgcctccaccgcgttgtctccttctgcgccagctcgagggcactatccatcaggattgcacagtgcttcctgctgaacgggcttatcttccttgggagcttgcttacacttacatcggtggtcattccaactctactgtggatactacctgagcgatgcaatcaaacagcaggacatctttgtgaacacagggcagccatatctatctattcattcttgcgctccggccttgttgagattttttatgtattttggttttatccactttatgtcttcagcttcatattaagtacgatttggtataatgacattgccaagcatgcattggatgttgtgaaaagtaagagcctagttttgactcaatcactggatgctcacaacgtaactgaaacaaaagagcagcctgaaggatttgacagggttgcacttggtattggggaacaagtctattcaattcttcttttaaccattttctttgttgaggtttcagtgattggttacataccttactttggcaaggcaatgaacttcctgctcctgtcattgatgtatgcctactactgctttgagtacaagtggaacttctttgcagtgagtctgcatgagaggcttgatttctttgaatcaaactgggcgttctttgctggatttggtgctccatgcgtccttccaattttcttcttctctcctcttataagctatgggtttctggctatactttatccgttgtttgtcttgactgccgcaggcactcaagctgagcaagtaattgatgcactgaaacctgcacaccgagggaaactacaaagaatacctgtgttctttgtcgcaaagcgactgacgacaaaagtactgcaactgtttccggtggcacagaaagaacaatgaaggatccacagaaacaaaccaaggagggaaggccgctgtgtgtgttcggtgtgctgctaatcacaatgccctgttcgaacgaacgttgcatccgtaaggtgcgcacgccctctccgctctccgtaacgtggaagggaggggcttgccgccttgacgctgtaaatatcctgtaacatcgcccttgttacaagcatttctgtcgaaatgggaactttgaaaatatagagaattgcactttgtacaaaaggtagtctacgtacaaattgcaccgtgtccttttcccgacccttcc

SEQ ID NO: 110606 - DNA, 258 bp, Zea mays
  unsure (1)..(258): unsure at all n locations
  Clone ID: MRT4577_32364C.1
acgaagtattcattcctgccgtcaagtccttgttggtggaagtagaaccgggcgtctncaccaaaattagttcggtccaacaaaaaaaaccccctaccnatgtaacaccattcccagaatctccccacctacctcggttcccgaacctccccaacatttctccaaagaacgttaaaacaacccataacgtgtacatttcaccactacccccacctaaaatatacactctcctctccccgagctccaacacctactaca

SEQ ID NO: 110607 - DNA, 531 bp, Zea mays
  Clone ID: MRT4577_32365C.1
cgcacgagtcccaatctgcctgtcgcctaactcaacccccggaagatccccacgcgtgaggacgttgctgagtctggtggggaccgcaccggagtatgcactgccaggccaatgcagctgcacatgtaagaggaccagccatcagagggtgcaatgactaccaccactgacaacaacaccaatcttactacctacacctaaaaaggacaagttcacactgcttgtaaacaaaagaaagaatgcttgctcctccacaaacagccattctacattagagaacaggaacataacaatactatgtgaatatcaaactggctggcaaacatcatttacaacaattactggtcatcaaataagactcaccatggatcaagaccactatgaatgtatactgggcctgattagaaattttaacatgatgaccagcagcatctgcattatcaagcttgagttaatggaagcatctgaatgaaatgcaatgctgaatgcaatctctttgctggctttgacactaaagctgttacatgtgga

SEQ ID NO: 110608 - DNA, 355 bp, Zea mays
  unsure (1)..(355): unsure at all n locations
  Clone ID: MRT4577_32367C.1
ggtgtgggggggttttttttttttttttttttttttttttttttttttttttttttttttttttttttttttttttggacaacctaaactgcccagttaggccccctttgaaactttgaaatttttgtttgttccaaaggggccctttcccggaaaaacggggcaacttttgggcggtccaaacaacatgggggactggctgctttttgctgggggggccccccacccggggctttcccccgggtttgtttccaccgccttacaccnggagtggtctgcgcgggctaaatttttttccggagctcggggcttttttcaactggggggttggggttctcaacctcggttttttcct

SEQ ID NO: 110609 - DNA, 451 bp, Zea mays
  unsure (1)..(451): unsure at all n locations
  Clone ID: MRT4577_32368C.1
gccaggtggaggtggaggcgcaggcaggggaggaagacatacacacagacacaggctccccccccgcacgcgggcgtcagggaagggaccagccccaccaccgggctacttggttgggtcgggagacgcaagacatgatggatcaactgagcctggtgccctacgatggggtcggcggcgacgccccgggcgggaagtacaaggagtgcatgcgcaaccaccccgggggcatgggcgggcaagcgttcgaacgctggggggagtacattgggttcttgccggacacacttaagtgcgcacagtgcgggtgccaccgcagatttcaccgccgcgcgcttgcggcggngagcccctgcgcgccgcccgtnttttttcgnccgccgccgccgcccgcgctgtccgcgccgccgcagaagnacttttaccaccaccaccaccaacagggcgcgct

SEQ ID NO: 110610 - DNA, 448 bp, Zea mays
  Clone ID: MRT4577_32369C.1
ccccgactgaacgttgtatatgccctaacctgtatatgacttttatttggtgtgtaccgctcagtgccgagacaaggggtaccttgtatacaataccgattgataatgacatcatccgtgacagccttagacggtaccatcacacggtcgatgacgctatcatccgatcggtacagaacgatatttgtcatagtgttggctgttgcctacctgctgctacatgtcatgtttttattggtctatgtcatcttgatgtctaaagttttaaaaattcaaaaaaaactagaaattctaaaaaacatttatgaattatgtaacttttatttctagatattacatattttttatgttttatgacttatgtcaatcttatttaggaattataaaccatgtaacttgtattcgttttcatgaattatataatttttattaaaaagagaaaagagaa

SEQ ID NO: 110611 - DNA, 750 bp, Zea mays
  Clone ID: MRT4577_3236C.1
attggtaccctcagccggcaggccgggttacaatccagccacttaatcataaacttcctcccctcttacagccgccgccgccgccgccgcatcccagcctccatcaccgtttccgtctcgctgccatgggtaaggtgcacggatcgttggcgcgcgccgggaaggtccgcgggcagacccccaaggtggcgaagcaggacaagaagaagaagccccgcggccgcgcgcacaagaggatgcagtacaaccgccgcttcgtcaccgccgtcgtcggcttcggcaagaaacgcgggcccaactcctccgagaagtaggcgccgctcggctcgtaccggttcctcatccttcccgctctccgtatgcttatgctcttgatggtactagtttcgttgttcgcaagcagaggaagaaccttctgtagattcggttttgttgtccatgtgctcagatgggaacttgagattgtatgaatttgagatatggtgatatgagctgatgatttttattatgcttattgttgctcctctgagctgtcttttttgaacgctatccaaataaatttgaaaccagattgctgatgcataaaaaaaaaaaaaaaaacctaggttcaggtagttgtggatggaagtggaaccgatatgcttcagctattggctctatcgtgtatgccatgttctgtacgcgagcctgatatttgattgaaatgctggttctatgctaaaaaaaaaaaaaaaaaaaactcgactcgtg

SEQ ID NO: 110612 - DNA, 619 bp, Zea mays
  Clone ID: MRT4577_32370C.1
ggcggacgggcacctcacaccaggggtgtctggggtgtgagaacacccaattcttcaaccatatgagacacaacaggcactcggaggtggtatcatacctatatcccccttgcctcctacacaaacatcagccatatcacagcagacacctggggcgcatatagtggcacaaaacatcggggcacaacatccacaacaacgtgcgctagcaaaccgtggtgtatactctcagaaacaacagtttcttacattcaaccaactaggtgcagtgaactgtgctttatatgtgcaacaaccacaactaccattcagccagatatgtggtgtctacccacagcaatttcttacattcaaccaagtgacagctgtgaactcttgtgcttattcacaggagccacatctactaccattcacccagctatgtggtgagagccctgctaccttcgtgacacaaccacaagtggtggcgttataccaacacgctgcgcctaacgctggcacccttttacaagtgcaacaagtggtgacattcaaccaacttgctgtgacaaacccaacagcattctaccaacaacccatcattggtggcgccctcttttagatctcttaagagatatag

SEQ ID NO: 110613 - DNA, 332 bp, Zea mays
  Clone ID: MRT4577_32371C.1
ttcgatgcggatcgccttcggttcctggggccggctcctcgagaggaggcactgctcattctcttaattgctacaggtgggaagaatgtgttgtaacaacatcctaggcagatcatagattttgctgcaaacgttcttcgacgggcatacatctgttgtccactttgcttcacagatcctctggtgattttttgcggggcgcacctctaccggagtagaacacgtttttttttaacgtttcttaattttactaaaaggggcttgcccttctttttatgacagttgcctaaactgatttttttggaacaggtaatctttctggtctttcccac

SEQ ID NO: 110614 - DNA, 317 bp, Zea mays
  Clone ID: MRT4577_32372C.1
aaacaaaaaaaaaaacctttttttgttttaaaagggacagtttttttttttggctttccctacctttttttaaaggttgggttcacctaaaaagggggttttaaaaggttcctttccccttttcccgggaattaaaaaccccctacactggaacaccggccctccggggcggaagcccggccccacggggaacccgacctttggggggggggccggttttccgggtttcttttttcccgggggacccttggacgaccggaaaatgtttttcatgtacacaattgagaactttgggccccgggcaacctggaataccc

SEQ ID NO: 110615 - DNA, 570 bp, Zea mays
  Clone ID: MRT4577_32373C.1
tcgagcggccgcccgggcaggtacaagcttttttttttttttttttttttttttttttttttcttttttttttttttttgaattttttaaaggtcgggaagaccccagggaaaccacaaacctcacccaaaaaccaaaaaaaagaaaaaaaacggaaaaaagaaacccaaaagagggcgccgaccaaggccggaccctggggagaacgaaaaagaaagagggaaaaaaagcagaaagaagggcagaaaaaggagccggcgggagaaggggccagcgggaggcccaaacgacagcaagagcgacaaaaaaaggaaggcagcgaagaacgcaccagggagcagaccaaacaacacccggagtgggagcagaaagaaagggggaaaacacaacgaacaaggccacgaccacgcaaaggaccacccccaggacaaagtccggcaaaatggcagcccccgcccggggaacccaggggggaacaaacccgggccaaaccggggccaaaggggaatcctgggcggaaccgaaatccaccaacaatcccaccacaaatcccaacccggaaaaacaggg

SEQ ID NO: 110616 - DNA, 111 bp, Zea mays
  Clone ID: MRT4577_32374C.1
tgattggtggacaagcctttcaggcagctgctgccattggtactgccctgtagcaggcccaatggcagcagctgcctgaaaggtgtgtccacctctcacggacgcgtaggt

SEQ ID NO: 110617 - DNA, 300 bp, Zea mays
  Clone ID: MRT4577_32375C.1
aattcggcacgagggaggagacagagcttaggtgaggaagcaagagcgagagacaagacaacagatcatcagatcggacccatatggagctggtggaggccgctgccgcgccggcgacgtgctgcgggagggacgggaggaagctggtgaggtgcccgcggctgcagctggacaccaagacggccacggccatcgagcagtccacgggggagagcatcgccgactccgcggccgccgccgagggcgcgatgcgcgtgaagatcgtgctcagcaagcagcagctcaagcaggtggcggcgg

SEQ ID NO: 110618 - DNA, 249 bp, Zea mays
  Clone ID: MRT4577_32376C.1
gtggatttgaagaatcatcctggtaactggaatctcaagtgacaggcggctggacagtcgaggagcacaaggtaagaggtaagagaaatgggctgaggaggcatccagtttcgtgtatgcgtaaagtggatttgccctcgtcgttagtttgtgtatattaaaggcatccagtttaggaactaagatgtttgttgtagtatatattgcaacttctactttttatgaaaaaataaaaagatgatttcaagg

SEQ ID NO: 110619 - DNA, 274 bp, Zea mays
  Clone ID: MRT4577_32377C.1
aaaaaaaaccccaggggctcaagcatcccgggggggccttttcctggggtgaaaatttgcccaatcacagtacacaaccttttcccccttcagttttaggtgggggtacactttcccaacacccatttagggccgcactttttgcacccttttccagaatttacccttacacacacccccacacaccttatttttgcacaaaggggggcgccccaacttgccgcttttttggctttctcaaattaaaattcctggaaaaaaaggcttttttaac

SEQ ID NO: 110620 - DNA, 407 bp, Zea mays
  unsure (1)..(407): unsure at all n locations
  Clone ID: MRT4577_32378C.1
cggacgcgtgggcggactcgtgggcgcaaagcacgccgacctgtacacgatgctgaacaagcaaagctacagagggcagaatggcagtggcattacagatggcaaatcgcacggacgagaaagttgacaagcatcgggagaattaccttggtcatagtgttaaggctccggttggtatattgcannnaggaaaggatctctactggtatactcgggataagaaatccgacacggaagatgctctttaggaagaaattaagagagtnnnntttgaggaggaacaggctatgcgcaaggatattgtcttagctaataatctcnncaatcgaactgagggtaatcgcttggataagcatgaatatgctgagctgattaagagaggatcaactgcggaggacttgagagca

SEQ ID NO: 110621 - DNA, 206 bp, Zea mays
  unsure (1)..(206): unsure at all n locations
  Clone ID: MRT4577_32379C.1
gtttgcccaattcccccactccctctcccagagagganactagctgttcaggggtgtatgtgatggccgcaagcagtatgaaggatgagagagtgagcgaacacttcacaaaacaggaaaacaactacgacaacgtgcctcatctcaacacatcggctatggaagcgctccagtagtttctgaccgaacagcatcacacggaggat

SEQ ID NO: 110622 - DNA, 626 bp, Zea mays
  Clone ID: MRT4577_3237C.1
aaatgtaaaaagagaatgaatgtataggcaggcttcgcttgtggcagtcttctttgcgaacccatatgagtggtgggacaaccgacgatccaaaccatgggccaactaccctatttcaagcacaaggacactcgtgagaaaatatggcttcgtccagatgaccctccttgggtacgaaagcagcttgaattatatgacctggaagtagcagagaatggccataggtgtaaaagtcgactgtcaaaaaaacaaaattggaaaacccaagattttgactactttgatgatgaagaagtacagcatttagcggaagcatgaataggacgcatggcattgtctgccaagaatgaagaaattcaccaggccatttgggtggtttgggggtgggggcggctgtttctttgctcagggatcgtactcaattgtatcgatgtatgtttggtaggatgtggatatgttgagtcttctagtttgtaattttatttatgcgtattttgagatgcaagtgtgagggaacctcgacagtcgacatattagcgaggccctatcaattaacatgcctcgaagtttgctaagtgatacttgggcctgtttggttccctgtattcatttttagaattgccctc

SEQ ID NO: 110623 - DNA, 130 bp, Zea mays
  Clone ID: MRT4577_32380C.1
actcttgggctggtctctttggtttttactccggttaatttcttttactcggtaccacgcagggcggcaccacccttggcctaaagcgggtgaattccagaccggggcctaaagagggccaaagctgccc

SEQ ID NO: 110624 - DNA, 462 bp, Zea mays
  Clone ID: MRT4577_32381C.1
aacggggccaactccgaactcatgacctccgccttcctcaagggcatggaggaagccaacaagttcctgcccacccaggacaagcttgtcatcgatctcgacccgccagacgaccccaataggttcgtcctccccacccccgccgcggacaagctcgcgcccggattgaacgcggccgctcccaccgtccatgtggccgtggtcgtcaaggaggaggaggcgatccttgctgcgcctgatgccgcacctggcagcggcggcgccgtcttgggccgtggtcggaggaaccgcttcgacgacgaggaggacctggaactgcagcgccggagcagcaagcagagcgcgctggagggggatggcgacgagcgggacgtcttcgagaagtacatcctcgcctcccccgagatgtgcacggagcagatgcagaagctgcggatcgccatgcaggaggcggccgccaag

SEQ ID NO: 110625 - DNA, 239 bp, Zea mays
  Clone ID: MRT4577_32382C.1
ctgggccacttgtctttctcgtatggatggcaaactgattctgtcttattgttagtatcctttaagcatgagtgtgagaactctgtaataatgtcgactgtgatcccttgctcgtaaatgcttggagtctgcatttttcacaaacgcacatcgggatcaataggctcatctaaatataatgtacttttcttgtggcagacaaggttaggccaatcgagctgtcagagcgaggtcgcttc

SEQ ID NO: 110626 - DNA, 190 bp, Zea mays
  Clone ID: MRT4577_32383C.1
attcggctcgaggctgggggactcacgtttggttgacaagcacctgcgggcgctcgtgaacatcatgcctctgtacccgtgctacacgtccacccagaagatcccggcgcagacactccagtctgagtccatgcccaaggacacggaccggctctgtttgggatgcacccgacccactgtaatacactcc

SEQ ID NO: 110627 - DNA, 261 bp, Zea mays
  unsure (1)..(261): unsure at all n locations
  Clone ID: MRT4577_32384C.1
ccgctcccccacggcaagctaccttcgccgtctcctccgacgtctccgttgantccccgcccgctccgatcagctgcacctcgcgtttttgaggatgtcgacgagatgcgggtcctgttcgtttgctgcgaccggatggagatggtcgttaggtacgggctgcagaaggatgacgacaaggagtggaatgatgtgggcactgtatttatcacgtacgatcagaggcacatgtgctatttgccggtcaacatcagcgtcgcc

SEQ ID NO: 110628 - DNA, 450 bp, Zea mays
  unsure (1)..(450): unsure at all n locations
  Clone ID: MRT4577_32385C.1
ctctcttctgctcttctctactcttctttctatggtctgggttcgctctctctgctctggactctttctctctghctswgggmtctgckadgctcaggctcactctggctggctctcttctcactcgsgctctctctctgtcacdctctggaactctctargcttagggagtggstgtggggactgctctawaggyaaactahtgtaatggctgtctggctctgctytgggactckctctctgtgtctcactggggcctcgtggctcactctctkggactgtgctctttctgggckctaactaggtamctctgctgtgnggaaaggaatgtaagctactctaaagggwagtgctktggactgtatgctaggavtgctstgtacactgctctctagnacactaaaggacactctctkttctytttactttttctgctgtggaggctgtgta

SEQ ID NO: 110629 - DNA, 253 bp, Zea mays
  Clone ID: MRT4577_32386C.1
ctcggattatgcctttgttctagctcttcgatggcaacatgcacaggcacgcagcagactgggactgcacggcgtcccatcacctcaacctcagccgcctagacatatgccagctgctgaccgagccacgtggagttgctgatcgtcgcactggcggcggcggacgatgcgactacgcacctctcgcgcgccgcggttgctcctcgttcggcggcggctttcgcgctgctggctccgacgtgcgccctggtga

SEQ ID NO: 110630 - DNA, 357 bp, Zea mays
  Clone ID: MRT4577_32387C.1
caccgtcctaatggtctttagtgggttctttccggagtttttttggcgggaaaacggctttaaaactctgtttgggcacggaaagacccgcgtgccctctccccagctttggttttcgagggggacaacaccaacgtggtgtaactggccaccctgcaccgaaaaaatgaacccctgggagttggagatctcctaatcgtgcctggtgcctttcaacaacaatttggggggcgcgcttaaaaaatgctgaacagctgaggatgaatacgtcaaccaaaggcttgttagtatgccccttacccctgccaatgttgttacctagcgaggcggcctgcaggctgatccaccggatccctc

SEQ ID NO: 110631 - DNA, 522 bp, Zea mays
  Clone ID: MRT4577_32388C.1
ggttgtgtgtttttttttttttttttttttttttttttttttttttttttttttttttttttttttttttttttttttttttttttttttttttttttaaaacggtattattggggtacccctccggggtcatttttcaccaagggaaaaaaggggggggcatttttttccagagcatccatccaattttaacccaaatgcgtgcaaccttaacccaaaaaaaaacctttgtttaaaacccccaaaaacaaaagggggggaaggggaacctttttttaactaaaaaatggtttattaaaacaggggaacaaaaataaacttgacaaggggctaaagtttaaatttttttaaaaaagcataaaaaaaaggccgggaatcgcaaaaggggggggcacttaatttgctcgggattgaccaccccggggaagaaagggtaattccaacaatgagaccgtacaaagaaagggcttttggaaaaagagggggagggtcatgcccaaaaaaaatttgggtgttgggcat

SEQ ID NO: 110632 - DNA, 421 bp, Zea mays
  Clone ID: MRT4577_32389C.1
catacgcccggatgaacaatggacatattatccttgccagacgttgctagcacgaatgcttgtaacaaactcaatgacatgtttatcagtaccataaatatcagaggacgagtggttgaaacaggtgcatacaggctcacacaatttgatggacacgctgacaacacattggatgatgtgactgaccgtttgcatgattcaaaggagcacgactttgcatggaagaatgacgaagctcgcttagctctggacgcattaaaactgatttttgatgtgtgggtcctaaaccatgaaagcttatgcgacttagagcgagcacccaaaagcgtaacaggtggtacatgaaaatgtgacgccaaagatattgtgcagatgatcgacgtagctgcgcaagctgtatgatgtgatggtcagaagaaaa

SEQ ID NO: 110633 - DNA, 276 bp, Zea mays
  Clone ID: MRT4577_3238C.1
agcctacgggtgcggacgatgtgatcggtttacctggcgagccaacaagcaagcaaaagtaaacggggcgaggagctggagagacgccggcgacgtgaagcaaccgcccaatcggtgccgaggctgagcaggaggagggagccggagatggtgggtctcgtcggcggcagcacggcgcgggcggagcatgtcatcaacaacgccggaggcctggcagaggacgagcgccgcatgtaccggcacgcgccggtcgagcacctatgcacctgcaccctt

SEQ ID NO: 110634 - DNA, 840 bp, Zea mays
  unsure (1)..(840): unsure at all n locations
  Clone ID: MRT4577_32390C.1
cccacacgtccgcccacgcgtccgcggaccgtggcgacctggcgcgccttcatctcccagccgatggaagcctggaggcttcatctgctcacgacacctccctctgcgctcagctcccgacaaatcttgcctccctccgcaatcagctgctggagcttctctccgcgcctctccctggagttgagtccctcacgctcggcctcttctccaccttcctcagctcgcccaaccgagctcccggcgttggatcccctacgagctcccctacagctcgtccccatcttccatggccgcgcgcgaggctcctctgctcggccgcgctctctgctggctcgcgctctgtcgagctcctccccgaactccgccccgctatggcgctggccgccgcacccttgccggttctttgctcggccatggaaatcgcgacccccaccttcctctgccgagtccggccggagctccctcctgctttgcttgtcggccgcgcgagctcgccggcgtgctcctgctccagccttaacgcgcgcgcctgctccctctgtccggccaccctcgccgcacctctctcctttgccggtgctctgcccagtctcctccatggccgcgcctgctcccttgtccactcagctctttgctcgccggttgctgctcccggttgccgcgagctccagctcggattcagccctgcgcgccgtctctgctccctcgccatggtcgccgtgtttcctgcatgcgacgcgcgctctcaccagccgcgaagttcccatggcgcgtccctgcatccttgctccctcggcgcccctgctggtcagncttggacgctggatccccttgcgctct

SEQ ID NO: 110635 - DNA, 308 bp, Zea mays
  Clone ID: MRT4577_32391C.1
tttttctttttattgtggtcactttatacctatgggggaagcctagctttgaaaggtataacctgcctcttttctttgagcaaatgaacgggctgatacatatatgccgcttttgcagctcggatttaaaaataaaggcgcactctgtcctttcaaacgattcggtgaatataccactagctagtcacaggggggcttaaccttattattcgcaggggaatataccactcttttttgcggggggggattattattaaccttagttcactggggagcagtgaaaccttatctggccctgaaatccgggg

SEQ ID NO: 110636 - DNA, 182 bp, Zea mays
  Clone ID: MRT4577_32392C.1
gtggagatctcatcacacaacagactctattctacgccatgttcaattcagacgcaggtgatgtttgacagaaccgaatgtccaataacgcctactatcaggaggcttactagctcgggttacatcttgagcagactattacggaagctcgctccgaccgttcagcaagaaactacacgata

SEQ ID NO: 110637 - DNA, 349 bp, Zea mays
  Clone ID: MRT4577_32393C.1
aaaaaaaaacaaaaaaaaaaaaaaaaaaaaaaaaaaaaaaaaataaaaaaaaaaaaaaaaggcgctggccttttacaagcacccaatttaacttcctcttcctcccaaaaaaaataatttttctataagatgcccctaactcctataaaatgcacccttttttaccaacctcgtaccgaaaaacatcctctttttttttcccccccaaatcactttctaccctacccccttttatccacttggtaaattaaaaaacctgcctaaccccatctttttttccctttgaatccacccccttttttgccaatgggataaatcttaaaaaggcccattacttcccccttttaaa

SEQ ID NO: 110638 - DNA, 276 bp, Zea mays
  unsure (1)..(276): unsure at all n locations
  Clone ID: MRT4577_32394C.1
aaaatggggtgggcccaaaaagnngggaaaaagcatgattccccccagaagggcttaaccagggcacagggccttttgttaagcgggaaaggtgcccctcaaattttgaccccagcttaaaaccaccttttggtaatccaaggaggtagaagggccaacttcaaaacttccaaaatttagggcatggtataaacgatgggtccctttgggcaatggtaaacaggttttttattgatggggctgaatatgccaaccattgagccaaccccatgccca

SEQ ID NO: 110639 - DNA, 1031 bp, Zea mays
  Clone ID: MRT4577_32395C.1
ctggaattcgctcgagagctcgataacctcgaaccgatccatctcgtctcttccgcgttgcttgcttgcttgctttagatgtgctgactgctgttggggtagggcagggggagaggagaggaggaggaggaggagctcgtagcggaatcagatcagatggtgcgtcgccagagcagagaaggccggggcctgggctggcctgcgtgctgcctcggcttcctgctcaagctgctcgcgttcctccaggccttcgccgccgtctccgccctcatctacgccgcttggatcctctcccgctgggcgcgccaccaccagctccacctccgcgaccttctaagcccggacctatggttcccgtcgctcgtcatggcggcggggatcttctactgcctcctgctcctcgcgggttacttggcagctgagatcaacaccggatgctgcctctgcttctacaccatcccagccatggctatgatgctgctggaagctgctctcgccgcccatctggcgctcaaccagcactggatccaggaactgccagaggaccgcaccggcgagctccacaacttactctcctttatccacaataacctcgacctatgcaaatgggctgctcttgccatcttcgccacgcaggcactctcgcttctcctggctatgactttacgggccatgctatctgcccggaccatggactacgacagtgatgaagactttgtggttatacggaggccactactggttgcccagcctcctgcaccttagtccaactccagcaacgcgctccgtatcacacccgaatccgtaaaatacgcgcccgtggacactgtttaggcttcgaccaactcctgcaagggcgccctccgtctctgtatcctagggaggagtccttgcgtttgcggagccggttcactactttgcaacatgtagcaacgaatttgaggactcccaatgtaatgggttatcctatcagatcaaattagaagaatgaatatatgatactccacctcgtctaaatgaagtagttcctt

SEQ ID NO: 110640 - DNA, 339 bp, Zea mays
  unsure (1)..(339): unsure at all n locations
  Clone ID: MRT4577_32396C.1
ttggcggncgccgggcggggctttcagcagcggtggatagacagggtgttacagctcaaggattttggatggtgagcaggagcttggtgtgcccaggtcttgtgacgtgctgagaggatagatggcaagcttgactctggaggacatatgagacgagggggggggggagagctcggactcggttgtgcgccgtgcgggatccagagcagaggggatgtggggcctggggagggggcgcgggccgggcgcgtggggggtgcgcgggtacgggggcctgggagaatgggggctgggggggctgggtgtgggtcgtggggcgggggggggtggggagcgggt

SEQ ID NO: 110641 - DNA, 217 bp, Zea mays
  Clone ID: MRT4577_32397C.1
cagattaaaaatctcattgaggcaccggaccaggattttgaaagggaaagctccatgggggggtagcaaagcttgctggtggtgttgccgtccatccaggggggagcccaaccggaactggactaaaaggggaggagttaagaattgaagatgccctaaatgccacccaggctgctgttgaaggaggtattgttgttggtggaggatgcaccttttg

SEQ ID NO: 110642 - DNA, 310 bp, Zea mays
  Clone ID: MRT4577_32398C.1
ctccggtcatctttgcaggtggtcaggacaggtacagcacaggcagcgacagtgcgagctttccccacaccaccccgtccatgtgcctcaaccctgacctggagggaccacctctagaggcctataccattcaaggacagtatgccattccacagccagatttgaccaagctgcaccagttggcaatgcaacagtctcattttcccatgacgcatggcaacaccggattcagtggcattgaatccagctctccagaggtgaaaggctattgggcaggtttggatgcatctgctcagactacttctcatga

SEQ ID NO: 110643 - DNA, 206 bp, Zea mays
  unsure (1)..(206): unsure at all n locations
  Clone ID: MRT4577_32399C.1
gtcatatctagctagtagctcccttataagttcactagagaagcatntgagggaggagccatgtctgttgagaagcaccaccaccacctgttccaccaccgtaaggcataggaggtggaaggcgcctttggctaggttgacttttagttgaaagtgaattttcatacatctcatggtatctatttgttttgttcgatgtatttttc

SEQ ID NO: 110644 - DNA, 1364 bp, Zea mays
  Clone ID: MRT4577_3239C.1
cctcgaggccggccgggtccagtctgaaaagcagaccaaacaaaatacgatgctgcggcgccttgtcggcggagccgccgccgtgcgttcgccgctgccgccgccgttctgtcggctgcttcacaacggcggcggaggtggtgggtgtagctcgggggagccggagagcgtggcgtaccgcatgtcgatgctgcggcgcccctctaccgtcagcaagaaggggctcacctggaactggtgcagcctcatcggtcgcctcgccgcaccggtgaggccgatcgacactagctttcttgaagtccccagggcgtacaccttcctctccgtcaccctctcgtcgcccgcgccctcttcgagctcgtccaacataaatgtgacattgcagctgactggtgagctggcaaatgttggcctaaagcatctgaagcatgatgacctcgtttatgtatctggtcatctgggctcttatcataaagtcagtccaagtggtgaacggcacattgtctataagatttatgtcagagagctgaattatgttgttgatcaaaataagaagcctcagaatgatgcagactcaacaagtccaccatcaatgacatctgtcacccttcaaatgctaaaagagaatgaatgtataggcaggcttcgcttgtggcaggtcttctttgcgaacccatatgagtggtgggacaaccgacgatccaaaccatgggccaactatcctgatttcaagcacaaggacactcgtgagaaaatttggcttcgtccagatgaccctccttgggtacgaaagcagcttgaattatatgacctggaagtagcagagaatggccataggtgtaaaagtcgactgtcaaaaaaacaaaattggaaaacccaagattttgactactttgatgatgaagaagtacagtattcagcggaagcatgaataggacgcatggcattgtctgccaagaatgaagaaattcaccaggccatttgggtggtttgggggtgggggcggctgtttctttgctcagtgatcttactcaattctatagatgtatgcttggtatgatgtggatatgttttgagtctgctaactattgggatggcaaggttatgtgtagtttgtaattttatttatgcgtattttgagatgcaagtgtgagggaacctcgacatattagcgaggccctatcaattaacatgcctcgaagtttgctaagtgatactgtcaactcacagaagccctgtatgtattcttagaattgctctcagttttttactatcatgaatctgttttgcagcaaaaaaaataagaatggatagagcactaaaaataaaaggggggcccccccattttggatctatcttctttt

SEQ ID NO: 110645 - DNA, 643 bp, Zea mays
  Clone ID: MRT4577_323C.1
cgactacgcgtccggcgagactagtgggagcaggagccccctaattgagcatcgcagagataggcgtcttcgtactcgcctacctccgcggctcaaacctttcccccttctcccaattccttccgccggccgcgcgctccacccgtacgacgacaccatgtagggagtgcatttcgatccacatcggccaggccggtatccaggtcgtgaaacgcgcgctgggagctgtactgccttgagcatggcattcaggttgacggccagatgcccggtgacaagaccattgggggaggtgatgatgctttcaacaccttcttcagtgagactggtgctgggaagcgcgtgccccgtcgctgtttttcgctgaccttgtgtaccctgctgctcatcgcatgacggtgtagaactgagcgcctatccgcctcactcttccgccctgagcagctcatccgcggaaacgaggatgcacgcaacaactatgctgggggccactacaccattggagggcagattgcggacctgtgccttgatgctgtcgggaatcttgacgaccactgcactggtctccgtcgcttcctcggactctacggtgataggtggaggaacgccgatctgaccatgaatacctcctccgatagcgcct

SEQ ID NO: 110646 - DNA, 395 bp, Zea mays
  Clone ID: MRT4577_32401C.1
ctcggatggaggctcgactcgagccacgcgtgcgaccacgcgtccgaagaacactttaccgagaagcgatcagagcgaggcacggcgagggcaacgacagagccatgagttaccagaaggtccctgagttttatccgccaccagggtactcgcatccgcacccaccgccccaggctccaccgcaagggcctgactacccgccgccgcagcaaccacctgcggggtaccagggctactttaacgacggccagcaaccctacggctatccgccgccacaaggctggccgctctttgctgctgctgcatggtggacgagtgctgctgctgctgcttctgacatacatgcacctgaagctcgctgggtcttggcatcgaggcacggcaacatttgagcg

SEQ ID NO: 110647 - DNA, 185 bp, Zea mays
  Clone ID: MRT4577_32402C.1
cattactgttcatttgttcaggcacaacgcggcggcatgataggacaaaattagctgcctacaaatacctcagatcaaaacaatgtcgcctaggggccttgagggcgccaactatggggacaccaggtgttccaactcctaatgcaacggtagaacggcctcttacacggtgacagaatcaaacg

SEQ ID NO: 110648 - DNA, 692 bp, Zea mays
  Clone ID: MRT4577_32403C.1
gggtcgagtccgcgtccgcccacactcccgtccacgcgtccgtagatctgcagcaacccctcccagaacctctgactttgcttcccatcgcttcgtttccaagaggagaatgtttctctcccttgcccagtcgcctgcctgcgccgtcgtctccttcccatggaggtcctcgtcccaactcatcccgcgggtcccctcccgctgcaccctcgcatgccacgcagcggtgcccaaagtgcccctccccatcgcctcgccggcctccctcggggacgaccctagcaagtgggatcccgccgagtgcgacgctctcctccgcggcggggagcaggtcgcctccgtgctgcaggagatggtcacgctgatggaggacatggagatggatggtgcatttgagccggttgctgtggagctggtggcacaaggagttattgggaagagggtggatgagatggagtcaggttttcttatggcacttgattacatgatacaacttgcacagaaggacacagatgatgagcgtaagtctattcttgaggtaattaagcagacagtgctagaccatctgacgaagaaatgtcctccacatgtccaggttgttgggctactttgccagactgaaaagaaagagagcagacatgaattgctgcgccgcgtagctgctggtggaggtgtttttaagaacgataaag

SEQ ID NO: 110649 - DNA, 840 bp, Zea mays
  Clone ID: MRT4577_32404C.1
ggggaccctcgggctcggccgggccgggaggcatgcgagcctgtgtgcggcccgctttcgttcgccgagtcaacaacaagaagccacgcgacgataacgcggccggtcgtggaagattggaagaacactagagcgagaagcgatcagagcgaggcacggcgagggcgacgacagagccatgagttaccagaaggtcccggagtcctatccgccaccagggtactcgcagccgtacccaccgccccaggctccaccgcaggggccttactacccgccgccgcagcaaccacctccggggtaccagggctactttaacgacggccagcaaccctacggctatccgccgccgcagggtgggtattaccatcacggtcaccaccaccataacgaccaccatcaccatcatcatggtcaccaccaccaccaccacgaagatgatgactgctgccttggcttcttgaaaggatggctggccgctctttgctgctgctgcatgatggacgagtgctgctgctgctgcttctgacatacatgcacctgaagctcgctgtgtctgggcatcgtggcacggcaacatttgagtgattatggttgctggatagtgtttacttgaattttctctttgttattgttcgtaaataatctgaatagtacatcgtgttaataaaagggtatttgcagtgtttcaaaaaaaaaaaaaaaagctgctagggccatggaaaagacccggaatcctttcgtagatccctgtatcgttgaataacatatttgttttttttctccgaaaaaaaaaaaaaaaaaaacggatcatgagcgaggaatctaattcatccatatagc

SEQ ID NO: 110650 - DNA, 295 bp, Zea mays
  Clone ID: MRT4577_32405C.1
tgcggagggagtcgagccagcgtcgccgcgatggtgttgttggagagcgctcagttctcgacggagctgatcagacttttccagaagtgccggacgtcgggcagcgtctatatcaccttgaagaagtatgacggtcgaaccaaacccattccaaagaaaggtactgtggagggctttgagcccgcagacaacaagtgtctgttaagagctaccgatgggaagaagaagatcagcactgtggtgagctccaaggaagtgaataagtttcagatggcttattcaaacctccttagag

SEQ ID NO: 110651 - DNA, 268 bp, Zea mays
  Clone ID: MRT4577_32406C.1
gggtgttatttttttatttttgttgctgcaaaccaatgggaggacttgacattaatacccgcaaaacaaaaacagctgatgggtcagcactatccttttttcgaacccatttaaaaatattaagaagtaggccacccacaaagggatttatgtagggggggcacaggacatgactgcagggcgtttgtttaacaaactgggaacaaaatgtgtggattaagcatacactcctctacttttaaaaagaaaactttcctttcttcctagg

SEQ ID NO: 110652 - DNA, 237 bp, Zea mays
  Clone ID: MRT4577_32407C.1
ggctattaccgaactctaattgatatcgtaacccagcatctgccgagagtacaaccaactcaatacatataatagacacatatcattagcctgagcgcacaatggatcaacctgggatcattaatcctttggtaatgagacactgaccactatcagttgtgccacaatgtacaaccagacccgggtttacctgccgtatatggtaccagggggcattcattaaaaacataatattag

SEQ ID NO: 110653 - DNA, 474 bp, Zea mays
  Clone ID: MRT4577_32408C.1
tttttgtttttttattttttttttttttttttttttttttttttttttaaccagctggaaacaaaaaccaccacttttgcacaaacatggttcattttagtgtacaacgccaacttttttttttgtcttgcctatgcaatgcaacggggaaacaaaggacacacatgcttttcggagcgtcaatcaatccacgtgcggacaccctctccgatcccaaagacaatgaagttgcatagcatagccggcgagcttaaatgccggggaccaagttggaggcgtaagcccaagccttgatcaaaaccgggtcagcgatgccgccaacgagggggccaaaccggccctttcccgggacgattggccgggcgaagaaaccgaacatggaaaacatggcgagggggcccctcttgggcccccccaaaaagaaccccggaaaaggccccgggtcggcggccaccccccggggggcgaaacccc

SEQ ID NO: 110654 - DNA, 395 bp, Zea mays
  Clone ID: MRT4577_32409C.1
cggacgcgtgggaaaaaaaaaaataaaaaaaaaaaaaaaaaaaaaaaaaaaaaaaaaaaaaaaaatggaaagaaaaataattaaataatcatacataaataaataaaaattattatataattacatctattttcgggtgtcgtgttttaaatttttcaactttagttactggtaattccctggcgttacccttttttttggccttgtaatacaatttacttgccccagtttttataattgggaagagggaaaaacctgtggctctcccaattttttccttttaatgaattgccaatttttctcgctttttttattagcattaaggccggaagttttggtctttacaaacattgtacactttaaattgccatgggcctactctttttctttttttt

SEQ ID NO: 110655 - DNA, 1105 bp, Zea mays
  Clone ID: MRT4577_3240C.1
gcacgagtgatggccatcgcgggcggcgcgctcaagaccaacatcacgacgctgggcccgctcgtgctgcccgtcagcgagcagctcctcttcttcgccacgctcgtcgccaagaagctgctcagcgccaagacgaagccctacatcccggacttcaagctggcgttcgagcacttctgcatccacgcgggcgggcgcgccgtcatcgacgagctggagaagaacctgcagctcagcccggcccacgtggaggcgtcccggatgacgctccaccgcttcggcaacacctccagcagctccatctggtacgagctcgcctacatggaggccaagggccgcgtccgccgcggccaccgcgtctggcagatcgccttcggcagcggcttcaagtgcaacagcgccgtctggcacgccctgcgcaacgtcaagccgtcgcccgatagcccctgggaggactgcattgaccgctacccggtggagctcgtcgacggcttgcccacgcagcaatagtaccttcttttcgctatattcccctcccaccaccgcacagaaatctgatgagtccgagcgagagcatggtccccggcggcccgtccgtcccccagcttgtcgtcgctgcacctgcacctgaaccagaaccagaacctgcggtaagtttgagtagtcctgatgattgctgtactatttgtctgttcagccatattgctgccagccgattgtcatttagtggtggtccaggcggaggaaggagggccgttccttctcactcttactaccagaaaggtcatgcatgctgatgacgaggaagggagtgccttactcttgcgtgtgtgtgtgccgatccatctaggtagcctctgtttgtagtgttcattttgaaaccttgctcttgctcttttttaactatatatatacataccgcatgcctgcctttaatgagcttgtcgtatgtatgcaccatggttcgttcgttgctgttttccttcgtcagattatcttgttaaatttcgtaatctctgagggttcgttggatcttgttcagacaagttgtttcacttttctctctatcagtttgttcggtttaaatccaagtccatcaagcgcc

SEQ ID NO: 110656 - DNA, 851 bp, Zea mays
  Clone ID: MRT4577_32410C.1
atttctcctcggtccttggaactaagaaacagagaggttgctgtctgaatttcattgaattgggcataaaccaaaaagatctctcgggtctggagtgccccttcactaagcaggaagttaaggctgcaattatggacctaaacccaagaaaagcccctgggcctgatggattcatggcactgttcttccaaaagtgttgggacattgtaaaaggggatgtcatgctggcgatcaaggcttttgagtgttgcaatgtccgaaaccttgctagtcttaacaatgcaatcatcattctcatcgccaagggagcagatgcggaagaggctaaagactataggcctattagtctgctctccttctttgcgaagattatcatgaaggtccttgcaagaagattgcaaccaatgatgaaagacctggtgcttccttcgcagagtgcattcatcaagggcagagcaatccacgacaattttgtctttgttaaaggaatggtcagatcgctatacctgaagaaaatcccttctgtgatgctgaaactggatattgaaaaggcgtttgatagtgtctcatgggagttcctgattgaggtcctcaccgcgaaaggttttggacaaaagtggagaaactggattgttgcgatgcttgcttcttcttccactcgggttcttgtcaatggcgagctttctgagaaaattttccatcacaagggccttaggcagggtgacccactttcaccactgcttttcgtccttgtcatggacttgcttgatgcaatggtgcgtacaacggtgcaagctggcgtgctgggcccttttagccgctgcatacctaacctcagatctcattatatg

SEQ ID NO: 110657 - DNA, 528 bp, Zea mays
  Clone ID: MRT4577_32411C.1
atgcctcgagtcgacggcggtggactccggctgcgcaagaaatgctccagtgagcgcggaccagatgcaccagaggggaacagggcgaaccaaggagtgtcccgagttgctgacggtgaggcaaaactcaccgaggcaacggacgcagcgggggctcaacgacggtcgtggaatgggcgacgggcttcggtgagtggcggcggagctgcctggttgcgcacgcagggcgaaagatggggcgagggagctcggctgagggcgcaaatgagcagggggaactgggcgagcggggtgcgggctctaaaggggcgagggtgtgcggaggtggccgagaaacgcgcgaacgtgggcccgtccacggcgagggtgcgtgggcgagagcttagggacgaggggggtatgacgggtggggtccgcaggccagcgagagaggacgtgcgcgtgctcgaagaaaacgacgccgacaggcctggcccaccgagcagcgggagggagagaggggggcgtgggctgggcctgctgggctga

SEQ ID NO: 110658 - DNA, 150 bp, Zea mays
  Clone ID: MRT4577_32412C.1
aattccgaggtttaacaattcatggagattggaactcaagttttgaatttggggaataacccctttcaacataacattacaatgtttgcatgacctacgtaactagaggctggatttaaccaggccatccaacaagtccacaattgctag

SEQ ID NO: 110659 - DNA, 412 bp, Zea mays
  Clone ID: MRT4577_32413C.1
taatatttttttatttgacaaacatccctcgcatagatattcgattgaaaaggaaacatgggccaataatacaaaaaagatactgcttactccatcttctacagttgtactagaggcacacttttatactagggcattcaaaaaaccagatttcactaggaaccggttttctttctttttcgatggggagacgagaacatcaaacacctgattcctgcccacaaaaaaaaacctggagggaattgggatgaaatgaaacatggcctttggctatttgcaaccaacaaaacagtgtttaaaccttaacttgaccagactgcattctttgctgcaacttgaatatcgaaatcctcttgctggtttgcttttccctccaaatctttgagcgcccgaaccatccgctttaaatttg

SEQ ID NO: 110660 - DNA, 235 bp, Zea mays
  Clone ID: MRT4577_32414C.1
tttccgaccagccgtacgacaggactcaagcggacgtcagaacgggcctccttatcctcggagtgctgtgccagtcgctgccggtaatgctgcgatacgcggagagatcgaattgaatgaggagactgtttgcaacgacattaattatattacttcattaagaacacatggggctggcacaatcgtataacaaatgtgtagtccaaaagaaaaagagtgacaacataaaattatt

SEQ ID NO: 110661 - DNA, 297 bp, Zea mays
  Clone ID: MRT4577_32415C.1
gggttgggtttttttttttttttgtttttttttttttgggggcgcaacggaacgacgggcgctggtcgttaagtcaatttggatgggggacgggaaaaagttcgggaaacagaggccgtgtgaccggcaccgttttattgacccatagggggtcgggtgggtgcgtggactattaccaccgccttttgggggcgtgcactgtttgctggggacagggtcattcgttgtttactcgaccttgatcgggaacgggctccccgggatcgggctattttaaccccagttgagctcgagctt

SEQ ID NO: 110662 - DNA, 280 bp, Zea mays
  Clone ID: MRT4577_32416C.1
gtggttggttttttttttttttttttttttttttttttttttttaccactgctatgaagcattacattaccactcgttatttgtttctggcgcgtcgtacatgtaatcttgcctttgcatacacagatcacatacccagagaccaacattcaggggtatataccatgcacgtagattgctagatataatacgctgctcttagcttcacatgtcgacgttgcagctcgggtcaccaaaaagcggcgccaggggcacaccgccggcgccgcggacccgtggg

SEQ ID NO: 110663 - DNA, 228 bp, Zea mays
  Clone ID: MRT4577_32417C.1
gggaaaaaacattttgttataacaatataagacatattttgttataaaagatttattttatatataagggattatattattataggtccccgtggttacgcacgggcgctcaccttaaattaagggtggttaacataacgatacttcgaggggggaatggggcgcacacacaaactttttacgggccttgggaaacaacttggtgggggggccttttttggggggggt

SEQ ID NO: 110664 - DNA, 485 bp, Zea mays
  Clone ID: MRT4577_32418C.1
gtccggaatattccaattttgtccaccaaaatgtgttactgtgttgtaaatttggcttggttggcaaaaacatctgtcttggatttataggaatttgggattataaactagtaccaacgttctcgaatatttgttgtccgctagttcaattttgaagtaaaacgcaacaaataaaaaagaatggagggagtatctgaaacaagctgtacattctgttgctgccatttgctctatggcatgcttagctgtttataggatacctgaggtcatgatctacagtaatctgaactgcgatttaaaaatgaatgtagatcatatgctgatgatggtcctgaaacatctattgcaagtaggtctgggtctcttagtggtaaaatcacttggtccaggttgtttgttttttgaagagggttaaccctgctctttcgaaaacgtataagtctcacatagagcctcgatgattctgctggggttaccaatttacc

SEQ ID NO: 110665 - DNA, 553 bp, Zea mays
  Clone ID: MRT4577_32419C.1
gtaccgggccccctcttcgagttttttttttttttttttttttttttttttttttttttttttttttttttttttttttttttttttttttggggccccacaaaaaagggggtaatttttaaaattttcccggttaaaaaaaactggggggggggaaattacaaaaatcgcccccgggcccagttttttggccttttttgggggggcccgccaagggggaaggcccaaaattaaccggcccgggccccaccgggggggggggaccatttttaaaaccgccctcccaaactttaacccacctccatttccccccaaccatttggaaaaaatggcctttctttttcaggaccgggccaaaaattacccggccccccctttggaggctacagggggcccagggggccgtaaatgccctttgaaagctgggaaataaacggccccatgggctggaggacctggggcaggaaaggtccccctataagggcccccgccgggggaattttacggtacagaggtgggggggtctaatatagggggaggacctcctccgggg

SEQ ID NO: 110666 - DNA, 333 bp, Zea mays
  Clone ID: MRT4577_3241C.1
gccattctttccgtctcgctcgccgacgcgggggccagcagcggatgccccgtcgtggaccacaacgtgacgatcccgcaggacgtccggctgtccctcctccacagcatcgactacctcctcttcttcgccggctgctccttcggcccgggcgccggccccgaccccaggccgccgaagccgccgtccatcgagcccgtcacctgcggtgagtctggtgacctgggcaagccggccgccgccatgacgttcgtgcttccgcgcgccgaggtgcctccgggcgactgggcgagcgcgtgccggaaggtctttcaggtgccggtgcttaagggc

SEQ ID NO: 110667 - DNA, 831 bp, Zea mays
  unsure (1)..(831): unsure at all n locations
  Clone ID: MRT4577_32420C.1
ggcaattctccaggctccagcagtccaccaccatggcattgcgtgccatgagaccgctgctgcctgctgccaccttcgtcatggttgcaatggcctcctggggagcgcacggcggtgccagcgatgatgccagttctctacttgccttcaaggcagagctcgctggcagcggctccggtgtgctggcctcctggaacggcacagccggcgtctgcagatgggaaggcgtggcgtgcagcggcggcggccaggtggtgtcgctgagcctgccctcctacgggctcgccggcgcgctctccccggccatcgggaacctgacgtccctgcggacgctgaacctgagctccaactggttccgcggggaggtcccggcggccatcggccgcctagcgcgtctgcaggcgctggacctgagctacaacgtcttttccgatcatcagtcagctgtgaaaacgttttcctagcaggtgaaattgggagttcaaggtgcgtaccgatatccaaatttatttaatgtgttgcgcaagaaacaaacaaatgtggtgggagcacttaaattctacaccttttaatgtggaatggcaaagttttatttattagattaaacaaggatatggatatttttatctagaacctaaataaaaacggcttgttctaatgacangttcagtttgacgaaccctaattaactgtcactgtgcttgcaaaaccttgtttggagcgttgccgctgtctcgcgtcacaggaattaggcttagccaagaaagacggggttcttgtgtattagaagcgggtccaggcttacgcccttggggattttgcactgcaagc

SEQ ID NO: 110668 - DNA, 256 bp, Zea mays
  Clone ID: MRT4577_32421C.1
gcgtccgccgatcccacccggcagcggcgctgctctttggccacccacgcagctttcgccgtctggcgcatccccgccggcgcccggctgcacaacagggcgcctgcgtcttccatgcacggcgtgcagaggctggacttcgccgacttctccgggctcatgccggggtcgtgctccgtgagcgctgccgcgcgggaggcgtccttctaccacgtccttggcgcgcagctcgtcgtcaaagccaccggggataacg

SEQ ID NO: 110669 - DNA, 174 bp, Zea mays
  Clone ID: MRT4577_32422C.1
acttggccttctgaacattgctctgattctagagttttgggtgcgaggggctcaatctttttttgtgccacacaacaacttcatgctttagtgtttttccctttctgatgcctgcaattgtgctcaccggtctatggttttcccatctattgcctaattatacctctattttac

SEQ ID NO: 110670 - DNA, 363 bp, Zea mays
  Clone ID: MRT4577_32423C.1
ctaatgatagatcgcaagtggccaccctgatttgtttttttgcccgtgaaaccaaggaaatcggcattaaaagaagggagggacacaagcattataagcagcgtaccatgtgactcttaacgaccactatactgtacataaaggcacactgaagagtcgatgctgcacataaatactctagcggtgacggctggctaacaggtgatggtgccacacaagtgtacaatgcgatacagaccaatacatgcaatgtgatgatctcacacacgacgttggtgtcgttgacaacacacaagaactgcacgggtgaaggtggtgccttcatcttctccatggtttcaactgtcattgtcaccgcagtga

SEQ ID NO: 110671 - DNA, 519 bp, Zea mays
  unsure (1)..(519): unsure at all n locations
  Clone ID: MRT4577_32424C.1
atattttgcctgcttatgctccttggtctttctgcaagtgctgctacggcgaccattttcccgcaatgctcgcaagctcctatagcttcccttcttcccccgtacctctcaccancnntttctggggggggtggggggggcaattcttcaaccctacangatccaacangcaatcacaactgacatcttacctttatcacccttnttcctccaacaatcatcanccctattacaacanttacctttnntncatttattggnncaaaacattaggggacaacaactacaacatctggggctagcaaaccttgctggctacttttagcaacaggaggttgttccattcaaccaactaggttcattgaactgtggttgttattttgaacaacaacaactaccattcaggcagctgcctggtggctacccccaggcattttcttccattcaaccaactagcaggattgaactgtcctggttatttaccaggaggacaactactaccattcaaccagctagctg

SEQ ID NO: 110672 - DNA, 263 bp, Zea mays
  Clone ID: MRT4577_32425C.1
ttacaatggagaatggcctatgcgtttatggtattttctatcaaatctgatacagaaggagtcagattacatgtacatggtgcaggtgaaaaattaaaatcggaatatagttatgtgtgccaaccctaatgttaccgttcaagattatgattatatttgtgtcttcaaatacaaaaaaaaaaaaaaaaaaataaaaaaaaaaaaaaaaatataaaaaaaaaaaaaaaaaaaaaaaaaaaacaaaataaaaaataaaatttgaa

SEQ ID NO: 110673 - DNA, 388 bp, Zea mays
  Clone ID: MRT4577_32426C.1
agataggaaatttgtatcctatctgagcaagtacagtccaaaaggaacagcaaacaaacagagaacactactagctcaaggagctagaaatggcgatccaatgcaattcgaagcaagaaaaatgcttatcaacattgctgaacttcgcttgacaagtccggtcctgctactggtcttgctcagataggaaatttgtatcctaaggccttgttcggttattcccaatacacatggattggatgggattggaaaaaaattcttaagaagtttgacttgtttgggattcaaacccatccaattttacttaatccacatggattgagagcttaccgaacaagccttaataaatgacaggcgggggatagataaaacaaccacaatactctag

SEQ ID NO: 110674 - DNA, 406 bp, Zea mays
  Clone ID: MRT4577_32427C.1
ggggggggaatgcacgggtaaaaaaattttggtcgaaaggccaaaaaaaatggggggctgaaaaaaaaaagcaggggtgcaaaatgggcaaaaattaactaaaaaaaaaactttggtggctcaaaaaaaaagggcctcctttaaaaatggaaaaaattggtttgcaaaaaaccagcaggcaaaaaaaaaattttgcaaaaactaaaaacccttgctgaatttcaaacgaccctggggtaaatttgggggcgtcggaaaaaacggaaaaagcaaaagcgggcaaactttttttgggtttcccctcgcccaaaggttttgaaactccccttttttccatccaaacgcgaaaaaggggccaaaagggaagggcaccatgtaaaaaagggcagggtggccatgcccaacc

SEQ ID NO: 110675 - DNA, 470 bp, Zea mays
  Clone ID: MRT4577_32428C.1
cgtccgcccacgcgtccgcggacgcgtggggccaaatgatactctttggttagccagccgaaattctgtagcctggcagcagccatgggagaagcacaagactactacgacacctccacggcggcggcggcaaggcgccgaagcggtacgcgccggtggtggggacggtgttccaccagctgtaccacgtccggcggctgcacgactaccacacggacctgttccgggagcgcaagaccttccagctgctggtgccggccggccggcggcagatatacacgtgcgaccccgccgtggtcgagcacatcctcaggaccaacttcgccaactacggcaagggaagcttcaactacgagaacatgactgacctgctcggcgacggcatcttcgccgtggaccgctacaagtggaggcagcaacggaagatcgccagctacgacttctccacgagggcgctgcgcgacttcagc

SEQ ID NO: 110676 - DNA, 246 bp, Zea mays
  Clone ID: MRT4577_32429C.1
tcgaccgtgactgtgacattgtggcagtcgacgtgaaggttaagggttaccacgcataccagctcctgaagtactcctgcggcgccatctggaggaaggacagagacataccgattaagggacccctgaccgtgcgactcactaccgatggaggcaccaagtgcgtctactacgatgccattcatgtcaactggaaggtgaacagcggctacaccgataaatgatgaactttagtgctgacaatac

SEQ ID NO: 110677 - DNA, 226 bp, Zea mays
  Clone ID: MRT4577_32430C.1
aatactacaagcgaagcatgttgcgctgcctacattctggccattccaactacccaaaatagggttgactctcaccacccctcatgaaactccataatctacctttgagcaccgccaaaaaaaaatggatacctccctagcctcataggggaatgtaccactcacccataaaacggcaacgcacagccattaaggaaagcttgctaagccatagtatcacctaagg

SEQ ID NO: 110678 - DNA, 1833 bp, Zea mays
  Clone ID: MRT4577_32431C.1
agccaccgccaaataatactctttggttagccaaccgaaattctctagcctggcaacagccatgggagaagcacaagactactacaacacctccacggctctggccggcgccgccgccgcgggcctcgcgctgctcgcggtctgctcgtactacctgctcgtcgggcggcgccgcggcaaggcgccgaagcggtacgcgccggtggtggggacggtgttccaccagctgtaccacgtccggcggctgcacgactaccacacggacctgttccggcagcgcaagaccttccagctgctggtgccggccggccggcggcagatatacacgtgcgaccccgccgtggtcgagcacatcctcaggaccaacttcgccaactacggcaagggcagcttcaactacgagaacatgactgacctgctcggcgacggcatcttcgccgtggacggcgacaagtggaggcagcagcggaagatcgccagctacgacttctccacgagggcgctgcgcgacttcagcggcgcggtcttcaagaggaacgccgcgaggctcgccggcatcgtctccggcaacgcggcgtccgggcagcccatggagttccagggcctcgcgctcagggcgaccatggactccatcttcaccatcgccttcggcctggacctagacacgctgggcggctcggcggaagggagccgcttcgccgcggcgttcgacgacgccagcgagttcacgctgctccgctacgtgaacgcgttctggaaggcgcagaggttcctcggcgtcggctccgaggcggcgctcaagaagcgggtcaaggtcgtcgacgagttcgtgtacaagcgcatccgcgagagagcccaggagctctccgacagcaagctggcgaccgaggacactgtccctgattcgaggcaagacatgctgtccagattcatccacacggccacgaacgagtccgggacggtggactacaagtacctgagggacatcatactgaacatagtcatcgccggcaaggacacgacggcgggggcgctcgcctggttcctctacatggcgtgcaagcacccggagatccaggagaagatctgccaggaggccgcaaaggcgaccagcgccagcgagacggcgggcgtggacgagttcgcgcagagcctgaccgacgaggccctgaacaagatgcactacctgcacgccgcgctgaccgagacgctcaggctgtacccgtcggttcctctggataacaagcagtgcttcggagacgacgtcctgcctgacggttccagcgtcagcaagggagacatcgtgttctacgtcccctacgccatgggccggatggagtacctctggggcaaggacgccgaggtgttccggccggagcggtggctggatcaggacggagagttccagcaggagagcccgttcaaattcacagcgttccaggctggtccgaggatatgcctggggaaggagttcgcgtaccggcagatgaagatcttcgcggcggtgctcctccgattcttcgtgttccgcctgcgcgacggcgacaaagcgagcgtgaattaccggaccatgatcacgctccacatcgacgagggtctgcatctgacagcgacggcgagatgaggtcgcctggcctggccaccggtggacacgtagccgccggtgcctgtagctacgcgagcgacaggtccttgataccgtaccttgtgtacatatatatatgcaaagaaacgaaaacgagcagtggtagtggtagtaggcaaccactttgtgtactgcgtcttcttggggaataatgacatgccatggcagttgcaggctagcttgcatgc

SEQ ID NO: 110679 - DNA, 369 bp, Zea mays
  Clone ID: MRT4577_32432C.1
cattattttttatttgttacaaatcaaagcagggggagcaagcaaactcacattttccatggacgtttagcacagtacatcattcctaggattagaacgcagtaccggcaaaaatagccggggcttattccaggacatctctcagctactagtaccttattacatgacttatggggtacgccatctacgatccataccataaccgcatctattgagttattaacaccattcttggtgaccaggatgctactgaaagaccccatctcagcctatctacactcacgcaagaatcaaaggaaccacggattgctggcagctcagcctattaccggcgagggagtggtatgccagtatatgagcgcgactatc

SEQ ID NO: 110680 - DNA, 295 bp, Zea mays
  Clone ID: MRT4577_32433C.1
ggttatttacaacaaagagactggtcagattctaatgtttggctgggttaccattatcactattgatgaagctgataaagccattgatatgttcaaccgctatgacattagtgtcaggcttctgaatgtattcttgtcattttctatgttcactatcattgtaaggcctttcttacttatttttctctttttcttatctttattttttctatttttttttttagttttttttcttatattctttttcttttttttaatttattattttatattttttttatatttattttttttt

SEQ ID NO: 110681 - DNA, 652 bp, Zea mays
  Clone ID: MRT4577_32434C.1
cctcgaggccggccgggccgggatttccaccacctgcatcacagccatgttatacgcaatcatcttcatcgtcatctttgtgatcatcatcgccatctatatcgtccgggtgagcgtcgccacatcgcgccgcgccaagctgcgtaatgcggacccagagacccgggcggcgatgatgcctgatcgaccgaccttcattgcgacagcgagggaagtgggcgatcgggtatttggcccgaaccagcatggcacgacgtacgaccacgggatgcggtacgaacggtccgacacgggcacgtttgggtatgcgcagacgaacgaccgcagggctgccgtgtcgaggcaggatccagagggcggcgacccagagctgccagcatacaacgacagcacgacgatgcccatgccgccgcctgcgacctactcttcccctatcaccgctcgccacgagtctcgatcgacgcacgtcccggcgccagcggtaggagaagctccacccaaatacgaccaggccccgccgattgtgaggggtttgtaaggcgccggtggctgcggcacacagcccatagatctccaggaggtgagacagactttgtatcgataagaacaggtaagaaacaggtagatctataatggataccttgagaacggt

SEQ ID NO: 110682 - DNA, 280 bp, Zea mays
  Clone ID: MRT4577_32435C.1
gactgactgacgagtgagtatcatactgtcgtataggttcagggtatacatacacatatctatctatcggtccggtggggagactccgagttatccgcagaaaaaaaaaagcagcgagagacagatgatgcaccggccgtcctacaattggaccaacatgttcggggatgttgcgcaggctaccatgcatgccatctgaataactgaattcgttccgtgcacactgactgacacaaccaacatgaaaagcagaagccgcccgagagggacatacgcaagc

SEQ ID NO: 110683 - DNA, 235 bp, Zea mays
  unsure (1)..(235): unsure at all n locations
  Clone ID: MRT4577_32436C.1
ctccagtccaagcaagcgaagagctcctctcgagatctctccctccccgcgccggcatggacgcaggtgactcggtagtctacccgctccgggagttcgcctaggacagcatccgcctcgtcaagcgctgccacaagccggaccgcatggtgttcaccaaggtcgccgcgcggactgctatcggcttcgtcgtcatgggatctcgnctttttttgcaaacacatcttcatcctta

SEQ ID NO: 110684 - DNA, 229 bp, Zea mays
  Clone ID: MRT4577_32437C.1
attcggctcgagccaaatcctctccggtcatcggcatcgctcctctcccgcccgccgacgccgaccgctcctatccacgccaccgcgtcggtgctcgagttgcctcagagagggagagagagagagagagagggagggagggagggagggagggtaccgcactcacgctgcctcagctggaacgcgcttgcatggccattgtttctcttcctggaactggctgggttta

SEQ ID NO: 110685 - DNA, 516 bp, Zea mays
  Clone ID: MRT4577_32438C.1
ggggtaactaaaacccccctctctggaccgagtcgctagcctctctgccagtgccactgccccggctactcccgaggaccactgacagcaagtgcggtgacatagcaggcgagcaggtgagcgaggacaactctgccgccggcggaaagaaaggccaggagcggggaagagacgggcagggaatccgcgcacctgccataagccaccacccgataccgagggcttgtcagaccacgcagatctgctgctgcccttgagatctaaatcaaagcttacgatgcagatgatggcggatggccgcgacccgggcgagcgcggggcaggaggacagcaaacatggcccctagcacgatccggaaggccctgagcgcggcgaaagaccaggccagcgtcagcctcgccaaggtcgctagcaacatcgggcccgatctggacgtgctcatcgtcaagggcaccagccacgacgacgagccggccgaggagcgccacatccgcgagatcctccaccttacgtcc

SEQ ID NO: 110686 - DNA, 1116 bp, Zea mays
  Clone ID: MRT4577_32439C.1
ctcggccggggcgtttcccgttggaacggaatgccgcagcctgtcgtccttgactccgtcggggagagggacggacggcgacgggcagctacaggacgatcgagcgacagacccggcaccacggcatcccgttccaattgcgtccgctgaccatccccatctccccaccggtgtcccccctccctcccgtcgccatcgcttccctctgttgacttgacttgtactgttccacacacctccagtgacctgacaaccacaccgcaataatcgtattccgttctttttctcccttttgtactttggggtttgggcctctctttctcttcacctgcgagcctctttcctcgctcttgtctcctgagcgagttctgaatctgggatcggcggtaacgtgggcgaccgccggagtgggcgaagcacagcagctcttcggtgccggtgggaaggttcataatatgatggccgcagagttagtaaagcagtattcaaacatcactctgggagaagataataagatatgtgatattaaacaagcgcttaaggccttgagaaagaagattcttagtttggattttgacaactccatgcacgtccatgacccacaggactcatttgagtacttggaagtgctgcgcaaaatcaaacaactatctgaaaagttaaggactttagaccctggtggggaagccaaacaactggatgaactcactgtgtatgcatatgaaatttctgaaatggcaatggcaagacttgaagaggaatttatttatctccttacacatttcaaacaaccattagaacaggaggttctctcttttcgctctacagaggatggtagtgtggaagacttttcgagcagttcatttagtgaggaaccatcggatgggaaggcaacaccgaatgatatcagtggaggaccagaatattttgtgcctgatttaattcaacccggtgcactctctgctgtcaagtccattgctaaattcatgttcctgaatggctatgataaggagtgtttacaggcttatataaactcacggcagactgcaatagatgagtactttgggtctcttcgtctggaaaagctcagtatagaggagcttatgaacacaagct

SEQ ID NO: 110687 - DNA, 2345 bp, Zea mays
  unsure (1)..(2345): unsure at all n locations
  Clone ID: MRT4577_3243C.1
ggtaccctccgggtcggccggggcaaacaaacacaagcacaaacaccgcaccgcaagagcaggatagccgcagcagcaggcgagcgcgagccggcacgctggtttggttgcagcgccaagacgctgccgagagcaggatagcagcagcagcaggcgagcgcgggccggcagtccggcaccatgccgaccggcggcgtgttctccgggtcggtgaacctgaagcacgtcaagctggggtaccggtacctgctggaccacctcctgacgctgctgctggtgccggtcatggccgccacggcgctggagctggcgcgcctgggccctggcgagctgctgtcgctgtggcggtcgctggagctggacctggtccacatcctctgctccgcgttcgtggccgtcttcgccggcaccgtgtacgcgatgtcgcgccccaggcccgtgtacctggtggactacgcctgctacaagccccccggcagctgccgcgtgcccttcgccaccttcatggagcacacgcgcctcatcagcgacgacgacaggagcgtgcggttccagacccggatcctggagcggtcggggctgggcgaggacacgtgcctcccgcccgccaaccacttcatcccgcccaaccccagcatggaggcctcccgcgccgaggcgcagctcgtcgtcttctccgccatcgacgacctcctccgccgcacggggaccaagcccaaggacgtcgacatcctcgtcgtcaactgcagcctcttctccccgacgccctcgctgtccgccatggtcgtcaacaggtacaagctccggagcaacgtccggagcttcaacctggtccgggatggggtgcagcgccgggctcatctccatcgacctcgccagggacatgctgcaggtgcacccaaactcgaacgncgctggtggtgtccaccgagatcatcaccccaaacttctaccgggggagccggcgcgacatgctgctccccaactgcctggttccggatgggcgcggcggcgatcctgctgtccaaccnggcggcgcgaggccccgcgcgccaagtacgtcctgaggcacgtggtgcgcacgcacaagggcgcggacgacagggccttcaactgcgtgtaccaggagcaggacggcgagggcaagaccggcgtgtcgctgtccaaggacctgatggccatcgcgggcggcgcgctcaagaccaacatcacgacgctgggcccgctggtgctgcccgtgagcgagcagctgctcttcttcgcgacgctggtggccaagaagctgctggtgagcgccaagacgaagccctacatcccggacttcaagctggcgttcgagcacttctgcatccacgcgggcgggcgcgccgtgatcgacgagctggagaagaacctgcagctgagccccgcgcacgtggaggcgtcccggatgacgctccaccggttcggcaacacctccagcagctccatctggtacgagctcgcctacatggaggccaagggccgcgtccgccgcggccaccgcgtctggcagatcgccttcggcagcgggttcaagtgcaacagcgccgtgtggcacgccctgcgcaacgtcaagccgtcgcccgacagcccctgggaggactgcattgaccgctacccggtggagctcgtcgacggcttccccgcacaccaatagtactagtatccgttctcttctcaatcccacccacccacccaccccggctcccctcccctccacacatccatcgacaaagagatcttagcctcaaatcccctaatctggctggctggctggcatggcaaggagggtgctttccctggacaagtgttcggcggcagcatcgggtctttggtgtgtacttgatggatcatcccccagcttgtgtccaagcgagggcgagcatggtccccctcccccagcttgtgtggctgcacctgcacctgaacctgcggtaagcttgagtacgtactgctgatgattgttgtatgtgcatctgtctgttcagccatcgctgccagccagtgtcatttaccgatattagctagctagtggtccagtctccagatcacacagaggaaagtgccgttccttccgtttctaccaaagaaggtcatgttggtgacgaggaaatcctgagtgtcttgagtgtgcccatggaccatggacactctgtttgccgtgttcgattggaaatctcgctcttgcttgtttaactgtacatggatcactggtctgccattgatgaggcgatgtatgatttatatccgttgttttcccttcatcagattatactcttgttaaattcgtaagatcttgttcacaaaagctgtttcacttctcc

SEQ ID NO: 110688 - DNA, 643 bp, Zea mays
  unsure (1)..(643): unsure at all n locations
  Clone ID: MRT4577_32440C.1
tcatgcatcacctaggctctatgcgtctgtcctgtcgaccagatggtcggtcacttggcccggacagctccatggcttccaggccaagcgaggactcgtctgcagcggcgaaatccacgtacttgggaggcaggagctccgacgagacggacttcggcgtgtccacgttgccctgcgacgcttcccatctctccgcgagcccgggctcgccttccagcatcctgatcacctcggacattctgggccggtgggacgggtggtactgcgtgcatagcagagccagctggaccatttcctccagctcgaccccgtcgtagctgctgcccaggtccttgtccaccatcacgcctagctgcttctcctgatggagcttcttgacccagtccagcactccgcccttctggttcgcgactcttccgaaatccagcgccttctgtccggtgaccagctcgactannnnnnnnnnnnnnnnnnnnnnntcggtcttctccgacgactgcccggtcgacaggtactccggcgctatatgcccgacggtcccgcgcaccgcggtcgtgacatgggactccctgtggtccaggagcttcgccagtccgaagtnnnnnnngatcgcttcgaagtactcgtcgaggagtacgttgga

SEQ ID NO: 110689 - DNA, 467 bp, Zea mays
  Clone ID: MRT4577_32441C.1
agaggctcggatatcaaaaacctgatagcccgggctatcgtgacagagctgggaggctccctgcacctcgaaccgctggccgaccctgatgctctttgaagggttctatgagagaacaagcctgatcctacctgaagcatgtgaactatgctcgtgctgtgctgaagcctgaataaactctggagagaggcttacactactcctgaccttcaaaatgtgcggctgacttggtatatggcacgaatgactagatcaaaccatcttattaactgtatatcttctaggtgtacgtaaatataacgagggacccaagcagttactattgatggaggacattgatgagacgtgtctgtggctcgattctctcgcactattgttacactctatagcagtatgacaaggtcggctcattaggtgagccgctcccagcaaactacatctacaagagctccattaccggttagcag

SEQ ID NO: 110690 - DNA, 328 bp, Zea mays
  Clone ID: MRT4577_32442C.1
cccggccctgcgatcggtctctcatccaccgttctgctagtatctccctgcttgaagccacgcagccctgacgacgccctgccatgtgcagatcgcatccctttttcctctctcaggggagatgggcggcgcgtagaggcaccgccgccgagctttcgggcatcccatctgacgcgaccggcctatctgtcgagatccatgaggtggctgtacatggttgcgcttccggcggtcgccctgctggcgctcgctggactggcgtgctggcttttgtgtcgcaagagcgccgtttccaccattgggccttggaagaccggtctcagtggcc

SEQ ID NO: 110691 - DNA, 315 bp, Zea mays
  Clone ID: MRT4577_32443C.1
aagttcaaatatcaaactttataaggattcaagccatactgctgcagaagagttttgggttcaacacataggacacaacaggtccattaaaccaacgaagccacaaccacgatttatgacacacaaaccacaaatgtttatttgacgacgtactttcatttataggttcaccatggggccctctacgatccatatgcctttttgcagcgttaatttattataaccatggcttactgaccaccgcggaggcggagcaccaggtggagagtgctttcctcctggatgttgttgcctgctagggggcggtcattcttc

SEQ ID NO: 110692 - DNA, 471 bp, Zea mays
  unsure (1)..(471): unsure at all n locations
  Clone ID: MRT4577_32444C.1
ggcagttcctcttctcagtcatgctcttcgaccggttgtcgccggtgaccaggcgatcgcatccctttttttctctctcaggggaggggcggcgcgtagaggcacgccgccgagcttcgggcatcccatctgacgcgaccggtcttcgggcacgccgccgatcgagctatggacgcgtcgagctccctgtccctcctcgcactggtgaccatgctcagcctcctccactccgccacgaccgacgccgccgcgggtctgccggcgncgcggacgagccaccggaggctactgctgctacaccagcaggacaccaacctcgccgcgctgcctccccctgcacgcgtgcacgtcgtcccagtcgacgtccacgtcccttctcatggaaccggctcttttccggcagcgtctcccggtccacacgggggcaagaacggtcccagtgaggcagcgccagcgacgccggcgacggcg

SEQ ID NO: 110693 - DNA, 361 bp, Zea mays
  Clone ID: MRT4577_32445C.1
gttagttcattttctgggctagctataacttctgtgttgacctgaaacagcttgcatttctgcaaacactgggccaatcgctcagggacatggggacccacactggcgcacagggatcatggatgcctggcgtgtaacgatgccatgcgatgacgtgccccaacacatgctcaacagaaccggcaccaagcatgcatggcggatagccagagtcctaccaaacgaaggctccctcctttgttcttgacacccctcaagcaccaagcctacagtggaaaaaagggacatccatgcttgcccgcttacgaaaatccctgccgggttcgccgttgcaggggctgctcttgtgtctgtccccgct

SEQ ID NO: 110694 - DNA, 2060 bp, Zea mays
  Clone ID: MRT4577_32446C.1
ctcgaggccggccgggaacaaaggaaaaagaaaagtgtgtgtgtgtcgagttgggccggtggctcctctatccacctactgccgccacgaagcgaccccgacccgttcctcgtcgtcgtcctcttcggatcttcgcttcatccacacaccatcgcatcccttttttctctctctcaggggaggggcggcgcgtagaggcacgccgccgagcttcgggcatcccatctgacgcgaccggtcttcgggcacgccgccgatcgagctatggacgcgtcgagctccctgtccctcctagcactggtgaccatactcagcctcctccactccgccacgaccgacgcagccgcgggtctgccggcggcgcggccgagccaccggaggctactgctgctacaccagccggacaccaacctcgccgcgctgcctccacctgcacgcgtgcacgtcgtcccagtcgacgtccacgtcccttctcatggaaccggctcttttccggcagcgtctcccggtccacacgggggcaagaacggtccgagtgaggcagcgccagcgacgccggcgacggcggcctatctgtcgagatccatgaggtggctgtacatggttgcggttccggcggtcgccctgctggcgctcgctggactggcgtgctggcttctgtgtcgcaagagcgccgttgccaccattgggccttggaagaccgggctcagtggccagttgcagaaagcgttcgttacaggagtaccgaagctgcagcggtcagagctggaacgtgcctgcgaggacttcagcaacatcgtggtgagctacccgcactacaccgtctacaagggaactctatcgaccggcgtcgagatcgccgtggtgtccaccatgatcacgtcgagcaaggagtggacagagcattcagagagctgcttccggagaaaggtagacgccctgtcgcgaataaaccacaagaacttcgtcaacctgctcggcttctgcgaggaggaagaaccgttcaccaggatgatggtgctcgagtacgcgccgaacgggacgctccacgagagccttcatgccgaggatttcgagcgcatcgcttggcgaggtaggatgaggatcgtcatgggactagcgtactgcgtccagcacatgcacgagctcagccctcccgtggcgcaccctgacatgcagtcgagctccgtactgctatctgaagacggcgctgcgaagatagcggacatgagcgtttggcacgaagtgatttctcaaggcaaaacgacgacaaatggtgacgaacaagcgtcgtccgctggcctgctggcggggaatgtgtacagcttcggtgctctgctgcttgagatcatctccgggaagcttccgactccataccccgcacacgagcgctccctgcagatgacctcggtaacgagctatcgacggaacaccgttatgtttctaacaaccagaagaagaacaccaaatggtgacgttatctctcttcttcttcttcttcttcttcttcttcttcttcttcctaggctctggtggagcgcgtaaccaacgacgaccggagcgtagcctcgttgcttgatccaacgctgggtggagaccacagggaagacgagctagcggtcatcggcgaggtgatccgggcctgcatgcagagcgacccgaggcgaaggccgagcatgagggaggtcgccgccaggctgagggaggccgtgggtatctcgccggtcgctgcgacgccgaggctgtctccgctctggtgggccgagctggaggtcctttccgccgcggaagcaagctaataatagtgggcgagaggacagggcaggaacaggaacagggcaggatgatgtcgcgcaatctgaccagtttgttctcaagaaaagaaagccttgcagccctttgtgcatgctgtaaatgtgaatgtgaagctgtagggaaggaatagtaatccgtgaatgtaaatctgaaactctgaaggtgctagatgtacgtagctagtgtcttggcaaaggtatcaatcagtaattcaagcataaaaaaaaaaaaaaaaaaggccccta

SEQ ID NO: 110695 - DNA, 706 bp, Zea mays
  unsure (1)..(706): unsure at all n locations
  Clone ID: MRT4577_32447C.1
ggtaccatttcatgaaagctttgggtattgcagcatanccgaagatgaagggtcgaaccgattatttactgtatatgtttgtgtgtttgtggtggaggtaaatcctaggaaatttagatgagaagaaagctatagcgaggcgcttgccaagtgcttggtgaatcgcctcaaccggatgtggttgtcgatctcgcggagtcgagtcgagtttagtcgtggttgaagatacaaactcatacgaagtgatcgtgtgtatggttataaagtataccaatctactgttgggaccatgcttcgtcgccgaaggtcctgcaggaagaaacagcttcggctgaagctgtctgcacgtgatgaccgaaggttgctgttcatgaagcttcggaattacaaaccgacttaaaagtagaatgaccttttagtccataagtgtttgagtcgttgttgtaaacttttatgaggggcatgtttgtaattcctcacaggctgtgtcttgtgcctataaatagtgaacaatattcctttactgttcacacattcctgtaattgcaatcgcatcactcgggaattaatctttgccaaggcagaggtataactgtattcaatgattaaatatattaagtagatataatatgaaattgttcgtttatgatttattcacctttgacacttcatatcttatattactttatttaatctattagaatct

SEQ ID NO: 110696 - DNA, 729 bp, Zea mays
  unsure (1)..(729): unsure at all n locations
  Clone ID: MRT4577_32448C.1
gccggcccggcaattcggcaccagcgcccttcccagttcggcagttcctcttctcagtcatgctcttcgaccggttgtcgccggtgacccggcggtgcgatcggtctcttatccaccgtcgttccgctagtatctccctgcttgaagccacgcagccctgacgacgccctgccatgtgcagatcgcatcccttttttctctctctcaggggaggggcggcgcgtagaggcacgccgccgagcttcgggcatcccatctgacgcgaccggtcttcgggcacgccgccgatcgagctatggacgcgtcgagctccctgtccctcctagcactggtgaccatactcagcctcctccactccgccacgaccgacgcagccgcgggtccgccggcggcgcggccgagccaccggaggctactgctgctacaccagccggacaccaacctcgccgcgctgcctccacctgcacgcgtgcacgtcgtcccagtcgacgtccacgtcccttctcatggaaccggctcttttccggcagcgtctcccggtccagacgggggcaagaacagtccgagtgagtcagcgccagcgacgccggcgacggcggcctatctgtcgagatccatgaggtggctgtgcatggttggcggttcccggcggtcgccctgctggcgctcgctggactggcgtgctggctnctgtgtcgcagagcgccgttgccaccattgggccttgga

SEQ ID NO: 110697 - DNA, 754 bp, Zea mays
  unsure (1)..(754): unsure at all n locations
  Clone ID: MRT4577_32449C.1
ctcgggcctgccgggttattgaacgcatcgttgacaaaagctgtgacgctgcctgcaactgcaatcagtccccgttccgttttccctttcactggaacaaaggaaaaaaaaaagaaagtgttgtgtgtgtccgggtgtattgcattattggctcctgcacctactaccgccacgaagcgaccccgacccgttcctcgtcgtcgtcctcttcggatcttcgcttcatccacacaacatcgcatccctttttttctctctcaggggaggggcggcgcgtagaggcacgccgccgagcttcgggcatcccatctgacgcgaccggtcttcgggcacgccgccgatcgagctatggacgcgtcgagctccctgtccctcctcgcactggtgaccatgctcagcctcctccactccgccacgaccgacgccgccgcgggtctgccggcggcgcggacgagccaccggaggctactgctgctacaccagcaggacaccaacctcgccgcgctgcctccgcctgcacgcgtgcacgtcgtcccagtcgacgtccacgtcccttctcatggaaccggctcttttccggcagcgtctcccggtccacacggnggcaagaacggtccgagtgaggcagcgccagcgacgccggcgacggcggcggcctatctgtcgagatccatgaggtggctgtacatggttgcggttccggcggtcgccctgctggcgctcgctggactggcgtgctggcttctgtgtcgca

SEQ ID NO: 110698 - DNA, 380 bp, Zea mays
  Clone ID: MRT4577_3244C.1
gctcgctcagtccgtggagcagacggccgcccatgtgctctacgcgtcgaggcaacacagagtccatgagagaggcgcccggtgagggagcgtgatcacgtccagcatcctccgcatgctccctgatggtaaggctaacgctagtgtcagactagacgcgcgcatcgacaacgacaatgagaccaaagacgcggctgtgcacaaggcggatgcagtcagggacgctgcggtggacatgacagcaaatattaaggcgcgagccctctaatcagaacaggacgtgatcctaagggtgactgcagctgacctgatgacggtgcaagcgtgcaacgtcatcagtactattgaggcagagggcacttgccatacctgaacactac

SEQ ID NO: 110699 - DNA, 941 bp, Zea mays
  Clone ID: MRT4577_32450C.1
ttacctgccctgcattacttaaggagtaggagtagggtcttcgactcgtccgtactcctcttcggctcttcgcttcatccacacaccgtaagctctccgcccttcccagttcggtagttcctcttctcagtcatgctcttcgaccggttgtcgccggtgacccggcggtgccatcggtctctcatccaccgttctgctagtatcatctccctgcttgaagccacgcagccctgacgacgccctgccatgtgcagatcgcatccctttttcctctctcaggggaggggcggcgcgtagaggcacgccgccgagcttcgggccggcatcccatctgacgcgaccggtcttcgggcacgccgccgatcaagctatggacgcgtcgagctccctgtccctcctagcactggtgaccatactcagcctcctccactccgccacgaccgacgcagccgcgggtctgccggcggcgcggccgagccaccggaggctactgctgctacaccagccggacaccaacctcgccgcgctgcctccacctgcacgcgtgcacgtcgtcccagtcgacgtccacgtcccttctcatggaactggctcttttccggcagcgtctcccggtccagacgggggcgaggcagcgccagcgacgccggcgacggcggcctatctgtcgagatccatgaggtggctgtacatggttgcgggttccggcgttcgccctgctggcgctcgctggactggcgtgctggcttctgtgtcgcaagagcgccgttgccaccattggggccttggaagaccgggctcagtggccagttgcagaaagcgttcgttacaggagtaccgaagctgcagcggtcagaagctggaacgtgcctgcgaggacttcagcaacatcgtggcgagctacccacactacaccgtctacaagggaactctgtcgaccg

SEQ ID NO: 110700 - DNA, 295 bp, Zea mays
  Clone ID: MRT4577_32451C.1
ttatttttttttttttttttttttttttggtggggttttttttatttttttttggtttttaaaaatataaccaaacttaccggcgggaaaaagcctgtttctgggaatgatttaattaaggagaagttgggaatcgtccacttcagctggatttacatatttttttgggggggggattcattttctagcaattagcacaagacaaggggccttaactacaatcagatcaggggggttgggattccccaacaattccccggttttgggcttatttttactttacagggtgaagttt

SEQ ID NO: 110701 - DNA, 188 bp, Zea mays
  Clone ID: MRT4577_32452C.1
acgcccacgcgttcggcgaggtgcgccgacagcacgatgaataacatgaaggctgatgccgtgttcaagggtcttcaagtggcgatcaaatgccagaacagcaaccgcgagtactagacaaaagccgtgagtgagatccaaagctacagagccttcagcgtgccactcttcggcgacctacacggagc

SEQ ID NO: 110702 - DNA, 426 bp, Zea mays
  Clone ID: MRT4577_32453C.1
aagaggaaaactgattaattggtaataaagagccaaacccaaaggcagggcaactcaaaatacactaccggcccgggcggcccgaccaaaggggaaaccccaacacacgggcggccgggacaagggaagccccgcccggaaccaagcctgccgtaacaatggccaaaaacgttccccggggaaaattggaatcccctcacaatcccgcacaacaaacgagccggaacccaaaagtggaaagccgggggcgcccaaggagagagccaaccaacaataagggccgggcgcccacggcacgctgcccacccgggaaaccaggcgggccgcccacattaaagaaacggccaacccccgggaagagggggttggcgtatggggcccccttcccttaccggtcaaggacacgcaagccggggcgttcggctt

SEQ ID NO: 110703 - DNA, 615 bp, Zea mays
  unsure (1)..(615): unsure at all n locations
  Clone ID: MRT4577_32454C.1
tgggaccctcgaggccggccgggngacccactacaccacaccttagatatatatacagaaaatagcttcactatctagattccatggcatcaaggatgggaatggtggctattgtgtcactatttgtttgtgctcttgctgcttcaacatcagttaatgctaatgtgtggcagactgatgatataccagttgttaatagcaacatggtgaggcatagcaacatggagaggcaacaacaacaaggtggatttattggccatcgtccaagacttgcatcttttaatagggcatcaaatcaagatggtgatcgaaaaagaactgtgcctagtgggccagaccacatgcatcacagcatcccatcgcatacccctcagcatccaccagtgtatgtccaagctctttatgaagatgatagaagtagaacatcttctggtccatccaaatcgataggccctccaccattatcggatagatactagttcatgcaaaggtatagagtgtttatgcacctacgccaatgaataatctctaactacccacatgtactggcatggtgtttggtaaacatgaagcaataatttcctcttatcgaaaaaaaaaaaaaaaaaagcggcc

SEQ ID NO: 110704 - DNA, 254 bp, Zea mays
  Clone ID: MRT4577_32455C.1
gttctccctagccatatacccctgttcttttccacttatttcttcttcataacagttctagttcagattaactagtcgggatagtaatatgttagtcagtacgtttttttaactactgtcgattaggaaatgatttttcaactttatattattatactttgacaagctttctacaagtaaaaaaaaaaaaaaaaacaaaaaaaaaaaaaaaaaaaaaaccaaaaaaggtaaagaaaagagcaaaaaaaataagg

SEQ ID NO: 110705 - DNA, 129 bp, Zea mays
  unsure (1)..(129): unsure at all n locations
  Clone ID: MRT4577_32456C.1
acacgcgtccgtcacgcgtcctatactcgtacagaacactacgagactntggactaggaagcttttataggatgaagatcacctattactacaatagtcgctagagcatttcggctacctttggcacca

SEQ ID NO: 110706 - DNA, 912 bp, Zea mays
  unsure (1)..(912): unsure at all n locations
  Clone ID: MRT4577_32457C.1
caggtgcgggaagctaaccggcacgtcgtgaagctaaccgggaagcagagacgtccgcccgtcgcccgtcgtccgtcgtcatggccgccgtggaggtgtgcgtgaaggccgccacggggaagcccgacacgctcggcgactgcccgttctcgcagagggtgctgctcacgctggaggagaaggcgcttctggatgagctgcaggcactggatgagcatctcaaagctcatggcccctacatcaacggggagaacgtatcagcagctgatcttagcatggggccaaagctcttccacctccaggtcgcactggagcatttcaaaggctggaagatcccagaaaatctaaccaacgtccacgcctacatcaaggcttttttcagccgtgaatcttttgtcaagactaagccatccgaggagcacgtgattgcaggatgggcgcccaaggtgaacgcgtaatcacatcgtgctttggtgctacctggtggactccatccatttgtctgatcagtctttgtcagtggtgtgtgtaggtgtcaagtctgtagcctagacacatgattcagttggaattatgcagtgtcgtgtctcgagtactcagttctggctgttgcaattgtgcatctctgttgccggtttcgtttgaggccatgggcatctcttggtcctatgctgtgagagcgctgtaatgtgggctccaaataatggagctgcttttatgcttgtggtgaaaaaaaaaaaaaaaaaaaaaaaaannaaaaaaanaaaaaannaaaaaannaaaaannnaaaaaannnaaaaannanaaaannaaaaaannnaaaaaaaanaaaaaaaaaaaaaaaaagggggggcctttttaggggaccaaattttacgtccccggggttgcaaggttttactttttttttt

SEQ ID NO: 110707 - DNA, 203 bp, Zea mays
  Clone ID: MRT4577_32458C.1
tagcctcacgcgtacggacttccgagtagcacctccaagtcctgtagatcgatagcgcgcggtagcgaatttttaggtttggttaaaaaatcctctcgctgtgccccatccgctctggggttacgatgtcctatgcagccaccctccggttgacacacgtgcagagtggacagttgctgccagccctgaagtgatgggggtct

SEQ ID NO: 110708 - DNA, 1200 bp, Zea mays
  unsure (1)..(1200): unsure at all n locations
  Clone ID: MRT4577_32459C.1
taaaaaacttattgttcattggtacctcgaggccggccgggaaaaaaaaaaaaaaaaaaaaaaaaatccgggctagccgggaatcgcgcggcggaaaactccaccgggaagaaggaaggagaagctaaccggcacgtcgtgaagctaaccgggattccgggaagcagagacgtccgcccgtcgcccgtcgtccgtcgtcatggccgccgtggaggtgtgcgtgaaggccgccacggggaagcccgacacgctcggcgactgcccgttctcgcagagggtgctgctcacgctggaggagaagaaggtcccctacgaggtgaagctcgtcgacctcgacaacaagcccgaatggtttctgaagatcagcccagagggtaaggtgcctgtgttcaacggtggtgatggcgaatgcattgctgattctgatgtaatcacccaaaccattgaggagaagttcccaactccatctctggtcactcctgtagaatatgcatcagtgggatcaaagattttcccagccttcatcacattcttgaagagcaaggatgctagtgatggttccgagaaggcgcttctggatgagctgcaggcactggatgagcatctcaaagctcatggcccctacatcaacggggagaacgtatcagcagctgatcttagcctggggccaaagctcttccacctccaggtcgcactggagcatttcaaaggctggaagatcccagaaaacctaaccaacgtccacgcctacaccaaggctcttttcagccgtgaatcttttgtcaagactaagccatccgaggagcacgtgattgcgggatgggcgcccaaggtgaacgcgtaagcacatcgtgatttggtgctaactggtggactccatccatttatctgatcagtcattgtcagtggtgtgtgtaggtgtcacatctgtagcctagacacatgattcagttggaataaatgcagtgtcgtgtgatcgtgtctcgagtactcagttctggctgttgcaattgtgcgtgtctgttgccggtttcgttcgagaccatgggcatctcttgatctgctatgagagcatgcatatagtgtaacgtgggctccaaataatggaactgcttttatgcttgtggtgtggattctgttgtgcctgctttcaaaaaaaaaaaaaaaaaaaaaactcgagagaagggncccgggtaccca

SEQ ID NO: 110709 - DNA, 316 bp, Zea mays
  Clone ID: MRT4577_3245C.1
aaagtctacaatcaccaactgtcttgggggcatatcacagaaaaacactacatcaacctcatatcaccagaccagattaatctactccctacttttgcctagggccaaaaaacctaatatttgacgcatagaacatgaaccaaaaaaacagcacaatttctgacaaacaagatactcgttaaacaaaatgtaatgagctcttaagcaaggcttggttggtccatagacaccgcatcttggagaagtgggttcctgaaacctgacacctatgcccatttatggggcacctgagctcaatggcgagatggcccggggt

SEQ ID NO: 110710 - DNA, 262 bp, Zea mays
  Clone ID: MRT4577_32460C.1
tcgtttgcagctggagttaatgcgattggggggggtcttaaaatgaatgttggtggtaatgccagctgcactaccaactgccttgctacacttgcccaggctgtccatgaggggtttgctatggctgacggccttatgacaacggttcatgccacaacagctgcccatatgactgtcgatggtcctattgttaatgcttgcataggcggacaagaggctgtccaacatataattcttacatctactcgatcagtaaatgctg

SEQ ID NO: 110711 - DNA, 253 bp, Zea mays
  Clone ID: MRT4577_32461C.1
ccggccgggccgggatttccttaccgcactgctgcgccgcgcatccctctgcttctccccaccctcgcctcagcttccctgccgttccctccgatcacctgctgctgagtgctgagccaagaaccatcgcgtttcattggtagcgatgaagatcttgaaccagctcatcagcccaggcggccacccggtgtcgttcccgccggcggcggccaaggagagcgggcatctcgtgccggcgcagccgaccaccacg

SEQ ID NO: 110712 - DNA, 1391 bp, Zea mays
  Clone ID: MRT4577_32462C.1
cattgggtacctcgaggccggccggggcgacccaggtcagtcgggactacccgctgagtttaagcatataaataagcggaggagaagaaacttacgaggattcccctagtaacggcgagcgaaccgggagcagcccagcttgagaatcgggcggcctcgccgcccgaattgtagtctggagaggcgtcctcagcgacggaccgggcccaagttctctggaaagggacgcctgggagggtgagagccccgtccggcccggaccctgtcgcaccacgaggcgccgtcaacgagtcgggttgtttggagctaaccggcacgtcgtgaagctaaccgggaagcagagacgtccgcccgtcgcccgtcgtccgtcgtcatggccgccgtggaggtgtgcgtgaaggccgccacggggaagcccgacacgctcggcgactgcccgttctcgcagagggtgctgctcacgctggaggagaagaaggtcccctacgaggtgaagctcgtcgacctcgacaacaagcccgaatggtttctgaagatcagcccagagggtaaggtgcctgtgttcaacggtggtgatggcaaatgcattgctgattctgatgtaatcacccaaaccattgaggagaagttcccaactccatctctggtcactcctgtagaatatgcatcagtgggatcaaagattttcccagccttcatcacattcttgaagagcaaggatgctagtgatggttccgagaaggcgcttctggatgagctgcaggcactggatgagcatctcaaagctcatggcccctacatcaacggggagaacgtatcagcagctgatcttagcctggggccaaagctcttccacctccaggtcgcactggagcatttcaaaggctggaagatcccagaaaacctaaccaacgtccacgcctacaccaaggctcttttcagccgtgaatcttttgtcaagactaagccatccgaggagcacgtgattgcgggatgggcgcccaaggtgaacacgtaagcacatcgtgatttggtgctaactggcggactccatccatttatctgatcagtcattgtcagtggtgtgtgtaggtgtcacatctgtagcctagacacatgattcagttggaataaatgcagtgtcgtgtgatcgtgtctcgagtactcagttctggctgttgcaattgtgcgtgtctgttgccggtttcgttcgagaccatgggcatctcttgatcctatgatatgagagcatgcatatagtgtaacgtgggctccaaataatggaactgctttcatgattttctgttctctggtgaattggtggtagcctgagcatcaggttatcttctcttatatatgggcatatttctgaccaaaaaaaaaaaaaaaaa

SEQ ID NO: 110713 - DNA, 969 bp, Zea mays
  Clone ID: MRT4577_32463C.1
ttgggatacccttcccccactgctgcgccgcgcagtcttctgcttctccccaccctcgcctcagcttccctgccgttccctccgatcaccagctgcttgtgctgctgagtgctgagggtagcgatgaagctcttgaaccagcccatcagcccaggcggccatctcgtgccggcgcagccgagcaccacggcggccgcggggcggtcccatgcgcactgccctcggtggcaggcgcagacgctgcgccgggacagcagctacgtcggcgtcgagcacatcgacgggaccaccgcgtccgtcccagtcccagtcccagtcccagtcgcggccccgttcaagccgctcacgctcgacttcctgcggtcgctcctggaccggaactgcagcatggcccccgccgtcccggtcggcgaggccagcgccccgccgccgccgcagatggtcgcgctccgggtgctggtgacctccgccgtggagctggacgcgcgccaggccgagcgcatcgcgcgcaagatgcgccgcctcaccggctttgtcgacctcaaggtagagaccgccgtggacgcgtccctcatcgccggcttcgtcgtctgctacggcaccgacgactcgcacgtcatcgacctcagcgtcaggggccagctcgcggcgctcaagagccgcgtcgactccatcgaccagaccgcgcatgcccacggacacccacaccaccactgaccgtcgatccaacacctgaggcaccggagcaaagcacagcgcgccgtcaccgtgctacagcttacaatacaagcctatactgtacacgcacagaatgacagaacagaaccgaacgcgcgccatggcaacaacagttttcctaggtaatgttgttgtaaatcgatagcgagaaaacttaattgctgctaccttccttcctgctgagcttgtatacgtttctattgctaaagaaacgaacgctattgattgtat

SEQ ID NO: 110714 - DNA, 2689 bp, Zea mays
  Clone ID: MRT4577_32464C.1
cctcgaggccggccggggccggatcgtgtgcacgccaaattctcccgtcctcgacaccagctagcgaggctacgcagcagcggatgataccttatcccccgctggcactctggcagctagctattacccccctgctgcgccgcgcagccttctggtctacccccgttggctgcttcttctacctaccctcgccgtcgcctcaacttcccggccgccgtcccctccgatcaccagctgctgcttgtgctgctgagccaagagcagctagcgatgaacatcttgaacctgcagcccatcaacccaggcgggcacccggcgttcccggcggccaaggagagcgggcacctcacgccggcgtcggtgcgcttcgacggcgtgccggtgccggcgcagtcccacgcgcactgtccgaggtggcaggctcagacgctgcgccgggacagcagctacgtcggcgtggagcacgaagggaccaggaccaccgcgtccgtcccggtcccggtcccggtcccagccgttgccccggtgcctgccccgttcaagccgctcacgctcgacttcctgcggtcgctcatggacaggagctgcagcatgagccccgccgtcgcggagtacggcgaggacagcgccccgccgccgccgcagatggtggcgctccgcgtggtggtggcctccgccgtggagctggacgcgcgccagaccgagctcatcgcgcgcaagatgcgccgcctcaccgggttcgtcaacctcaaggtcgacaacgtcgtggacgcgtccctcctcgccggcttcgtcgtccgctacggcaccgacgactcgcacgtcatcgacctcagcgtcaagggccagctcgccgcgctccagaaccgcgtcgactccatcgaccaccagaccgcccacgtccacggacacccgcaccactgatcatccgatccaacacctctggactctggtgcacatgcaccggaaccggactacaccggagcgaagcgcgccatccgggaccctcacagccgccgacatgatcatggaggccatcccggtgctgaggcagaagctggatcccgtccgccttcaggacgacgacggcgaccttggcgagctcggcgcccaccttggtgggccttaggagctttgagcaagaaggaatcgccctgtggccttcctccctcccacctgcctacgtaggcctatctaactgctgtgcgtgctagtcgatcgatcgaaaccgaacggttctgataaaccttatggtgtctaaagctccagatttatggattgccaaacacccagcaccgaattccagtttgatttccttgcccgccttgttttcgtgcgggtgacacttccgccgtgaagtggaaggctagtcgctccaattaaaggcaataaagcagtactggggattgcttgaggtgcacaaggttcctgaaacctgacggctgttggtcgccttcaacccctgagaatccgatgtgttttgagcatcaaggcagccgccccctgaccatcactcctgctataaattataatataaattataaggctcatccggggtggcagatcggcagcgggaacttacctgatataatttcttgctgccgtttttgcgcaccaatggatttagagttggtagctgtagatacatctagcttccattctatacgtggggatccaggaactgtaaaaacgttctattggaattgtgtcggaaagttcctagtacgccagccagatttaggataagccagggctggcttgtagcagcgattgatgttgccccccaatctaatggtatgacaaacaacaagaagtctcctgaaaatcctatgctggatccctcacaaatcgggaaggcagaagccgtcaatctccagtttggtccttttgggatcagtgcctggatgagtgacacgggtggaaccagccatactgggagtgtggaagacctgaggcctgatagtgtggagactggtggtagaaattattcgtcgtgctgcagttcgccaaagatgtcagattccacctcgaaggagcttatggaggactactcagtctatggcagtgacgaagaagctgacgaccctcgtgatgctgaaactgatgatgacctaactgatgaagaaagagacatgcacgagatagatgcaggctctgtagacgagcactcaaccaagtcggatgaggaatacgaggacttagccatgcgtgatgtgatggagaatggtgactggtctgacgacgaccaagctgtgggcaaaaccaagaactcaccagccctggagagcatccatgggagtggggcagctgaagatgatggcataaagagccggtaccaccacaacctggacctgttcctgaaaatgtccaaggaggtagctggcaccagaatgccttgcgcgtcatagtgccaccagggtggagagaaggccggcgacacgctgctctggtcccagtgggtggtatgtttcttgggcacctgcttttgtgatgctgtgagcttgtgctgttgagtgtacaccggtggctgtggctttgtagcatgtacctgtccaaactacaaaatgctctcacctggttgtaaagagaggacctgatgctttgtcatatcatgtagtaggagtattatgtttgacaataatgtcctggccctgctgttgatgaagtcacctcacgtgaactatgtgcc

SEQ ID NO: 110715 - DNA, 2058 bp, Zea mays
  Clone ID: MRT4577_32465C.1
gccggccgggtcgggacccttccccacactgctgcgccgcgcagtcttctgcttctccccaccctcgcctcagcttccctgccgttccctccgatcaccagctgcttgtgctgctgagtgctgaggcaagaaccaccgcgtttcattgttcgagtccttgctcagtcccatacatgttcctcttctttgtgcttgctgctatagattttgaactattattgttcacgtgcagggtagcgatgaagctcttgaaccagcccatcagcccaggcggccatctcgtgccggcgcagccgagcaccacggcggccgcggggcggtcccatgcgcactgccctcggtggcaggcgcagacgctgcgccgggacagcagctacgtcggcgtcgagcacatcgacgggaccaccgcgtccgtcccagtcccagtcccagtcccagtcgcggccccgttcaagccgctcacgctcgacttcctgcggtcgctcctggaccggaactgcagcatggcccccgccgtcccggacggcgaggccagcgccccgccgccgccgcagatggtcgcgctccgggtgctggtgacctccgccgtggagctggacgcgcgccaggccgagcgcatcgcgcgcaagatgcgccgcctcaccggctttgtcgacctcaaggtagagaccgccgtggacgcgtccctcatcgccggcttcgtcgtctgctacggcaccgacgactcgcacgtcatcgacctcagcgtcaggggccagctcgcggcgctcaagagccgcgtcgactccatcgaccagaccgcgcatgcccacggacacccacaccaccactgaccgtcgatccaacacctgatgcaccggagcaaagcacagcgcgccgtcaccgtgctacagcttacaatacaagcctatctccatgattattgcacagaatgacagaaccgaacgccatggcaacaacagttttcctatctaatgttgttgtaaatcgatcgcgacaaaacttagcttctgctaccttccttcctgctgagcctgtatacgtttctattgctaaagaaacgaccaaacgaacgcccttttttttttttttgaatgagaagaagcatggtgtgatcgagtttgatgagtttattcattccctaagtgtcttccaccccttggcaccaattgaagacaagatcgattgtatgtatgctaactgcagaaacggtggtcaatataataataataataatatgtaggcttttttatatttatatttgcagcatgcatttcgtatgtttcagttgcatttaggttgtatgacttgagacaaactgggtttattgagcgtgaagaggtaagctcgcaaagatgttctgtatctatgcataccttttatgtggattcttttctagtaaagtggctaattgccatgccttgccttataggttaagcaaatggtaattgctattttgatggaatctgatttaaaattatcagatgacttactcgaggccatcatagataagacatttgaagatgctgatgcggataaggatggaaaaataaataaagaggagtggaaggaatttgcgttacgccaccctaacctgttaaagaatatgacactgccttatctgagggacatcacaaccgtcttccctagtttcgtcttcaacacggcggtggaagattagtcgctccaattgaaggcaataaagcagtactggggattgcttgaggtgcacaaggttcctgaaacctgacggctgttggtcgccttcaaccactgagaatccgatgtgttctgagcatcaaggcagccgccacctgaccatcactcctgctataaattataatataaattataaggctcatccggggtggcagatcggcagcgggaacttacctgatataatttcttgctgccgtttttgcgcagcaatggattgagagttggtagctgtagatacatctagcttccattctatacgtggggatccaggaactgtaaatacgttctattggaattgtgtcggaaagttcctagtacgccagccagatctaggataag

SEQ ID NO: 110716 - DNA, 1374 bp, Zea mays
  Clone ID: MRT4577_32466C.1
ccgggaaaaaaaattacccttccccacactgctgcgccgcgcagtcttctgcttctccccaccctcgcctcagcttccctgccgttccctccgatcaccagctgctgagtgctgagccaagaaccatcgcgtttcattgttcgagtccttgctcagtctcatacatgttcctcttctttgtgcttgctgctatagattttcaactattgttcacgtgcagggtagcgatgaagatcttgaaccagctcatcagcccaggcggccacccggtgtcgttcccgccggcggcggccaaggagagcgggcatctcgtgccggcgcagccgaccaccacggcggccgcggggcggtcccatgcgcactgccctcggtggcaggcgcagacgctgcgccgggccagcagctacgtcggcgtcgagcacatcgacgggaccaccgcgtccgtcccagtcccagtcccagtcccagtcccagtcgcggccccgttcaagccgctcacgctcgacttcctgcggtcgctcctggaccggaactgcagcatggcccccgccgtcccggacggggaggccagcgccccgccgccgccgcagatggtcgcgctccgggtgctggtgacctccgccgtggagctggacgcgcgccaggccgagcgcatcgcgcgcaagatgcgccgcctcaccggctttgtcgacctcaaggtcgagaccgccgtggacgcgtccctcatcgccggcttcgtcgtctgctacggcaccgacgactcgcacgtcatcgacctcagcgtcaggggccagctcgcggcgctcaagagccgcgtcgactccatcgaccagaccgcgcatgcccacggacacccacaccaccactgaccgtcgatccaacaccagatgcaccggagcaaagcacagcgcgccgtcaccgtgctacagcttacaatacaagcctatactgtacacgcacagaatgacagaaccgaacgcgcgccatggcaacaacagttttcctatgtaatgttgttgtaaatcgatagcgagaaaacttaattgctgctaccttccttcctgctgagcttgtatacgtttctattgctaaagaaacgaacgctattgattgtatatttgatcgatgtggagacagcatgcagcctctatggtgtaaagtctaatatgctattgcaaggttgaagtttgtatatggaggatcaggcttcaggcctgcagcattgtaatggactcccatgaccatgaaaaaaatggctaagagtgcgttcgtttgttcaggattaaggccaggaatggttccaggtgatcaaagtttatacaaattagataaaaaaaaaaaaaaaagggccgccgctcgcgatctagaactagt

SEQ ID NO: 110717 - DNA, 302 bp, Zea mays
  Clone ID: MRT4577_32467C.1
aattctgcacgagggctgagtactgtagggtaccagctcgagacaagcacagaaacctgtcggctagggaggagcagaggagctcctctgcggtcccaggctcagaagacctacccatcagggtcctctaccagggcgggcagaccgacatcgtaggcttgaacggacaccagagacgggacgggtgcacccacaaacgcaggcgacctgtggatcagtatgacgacaagtacgtgtctgcgaacaagactttagcagcttcttgaatgagtggatttgaaatgaaaggggagccagctttc

SEQ ID NO: 110718 - DNA, 634 bp, Zea mays
  Clone ID: MRT4577_32468C.1
cgcgtcgacttggtctatatgtaacttcattaatacatgttatttcttccattaacattccatcatgattatttatcatttgtctacggaaaatagtagtctaccaataagtcatgcatgcagcatgcttagaaagtactcaaccctttaaaggtgctctctaggtggtgtttggttctagagactaaagtttagtatatgtcacatcgaatatttgaatattaaatgagtattaaataaagtctagttacaaaaatagttatataggtaaagactaaatgataagacaattttttgaagactaattaattcatgattaacaaatatttaatgtagcatcacattagcaaatcataaaataattagacttaatagatttgtcttgtcgtttagtttttatctatataattagttttgtaattaaattatattcaatacttctaaggcagtctgcagcagtctatccatagtttacccaaaaacactgtttgcactgtcgactacactgttcacagagtgaagttttaatatgagtatacgaatgagtaagctgctggagatagtctaactaacatattaacattcgatgtgctaggtgctaaactttagtagaggaaacgaacaggaatgtagc

SEQ ID NO: 110719 - DNA, 349 bp, Zea mays
  Clone ID: MRT4577_32469C.1
acaacccagaaaggtggggtccctacttactgcgttttatctatgaaaccaaatacaatcccgcaaaaaccttgggtgccctcaaccagcagacaaatacagtgcaagaaacggtggttatcaatcaatccatcacgatcacaaacgacggagggggaataccaacagttccaccaccaccaaagacagcgggcatgcgaacagctcggaaactagcatgtcactcaaaccaaaattgccttgaaacaacaaacaccagcccacattaagtgggttcacaacatcaaggggggccgacccgtgggcctacccaaaaaaacccgaccggtgcctgcaagcgtaccaactt

SEQ ID NO: 110720 - DNA, 365 bp, Zea mays
  Clone ID: MRT4577_3246C.1
aataacattataattaatataatatagataagtgtcactcatatctcataaataagcattgtaaaataactcatacacaagtgtcctctaaatccaaaatgaaatactaattgaaaaacttagtcattaactgtttgtgctaacgttgagcataaataagtatatatgaattcaagtctccacacttgtgcggccacaaaaatttgagttccattccatcttttcctgtacaaaaacttggagaaggcaataattagtagttagagacagttcaacaccgcacattgtgacatatcgtaaaggttatatggatgtaacatcttacctaaacaggcatgctaggtctagttatatgaagctccctc

SEQ ID NO: 110721 - DNA, 273 bp, Zea mays
  Clone ID: MRT4577_32470C.1
ttaccgccggggtctccggtataagcgagagcgaggtcgtggtgatagacatcgtgatcaccttcgagctggtgtccactgtgtacgcgagacgcagcgacccgaaaaaggggtgcctgggcaccatcgtgcacatgggcacgggtttaatcgggggcggcaacatcctggccggccgcctcttaagcgacggctccatgaacccaggctgctcgttcgtcccacacgtggcgggcagctactctagaggcaactggctgtactggctaggac

SEQ ID NO: 110722 - DNA, 255 bp, Zea mays
  Clone ID: MRT4577_32471C.1
cttcagccaactgtgcccttccgccgctgcgggagcccacggccctcgctgcgtctccctgcagctgctgctgcgccacgcgtggagttgtccctggatggcggagaagatgtcgccgcatggccatggctacgcgaagccaccgccgatgctgcggcgcacgcctacacctacgattccctcatcatctacttcaaggcggagagcagcatcgaaagagagggtcactcccaagagcacagaatcccttgaggg

SEQ ID NO: 110723 - DNA, 2303 bp, Zea mays
  Clone ID: MRT4577_32472C.1
gggaccctcgaggccggccggggccctgcgcctgcgcctgcgcctccgcttcctcgaggccgcgtttcgccggctgcctgccggcggtccaccataacatgggcggcgggcggaagcggcggcggcgcgacggctcggagacgccgtcgatgcacccgcggaaccgctacgcagccgccgcgccagatttcgccgcgctggcggagctctacccgtcctttcgccccttcgtcttcatctccggcagcgggcgcgcgtccgttgacttcaccgacttctcctccaccagggagctcacgcgcgtgctcctcctccacgaccatggcgttaactggtggattccagatggacagctctgcccgactgttccaaacaggtccaactacattcactggatcgaggatcttctctcctcagatctgattccaccaatatccagctcgagtgagagagtgaagggcttcgacattggaacaggtgccaattgcatctaccctctccttggagcatctttactgggatggacctttgttggatctgatgtcactaatgttgctcttgaatgggctaagaagaatgtggagagcaatccacacctggcagagttaattgagatcagaaatgcaaatgcagcaccatctgaatctgaaactgttgtcagggaagctgccagcgagaagattttagagcctgcggaggatgtagctatgccaaagccacatatccttgtgggtgttgtaaaggagagtgagagctttgacttctgtatgtgcaatcctccattctttgagagcacagaggaagctggccttaacccaaaaacatcgtgtggtgggacagctgaagagatggtttgcgctggtggcgagctggcatttattacacaaatcattgaagatagtgtttcccttaagaactctttcaggtggtttacatcgatgattggcagaaaggcaaacttaaagttattgatctcaaaggttcgtgaggctggggcatcagtcgtgaaaactactgaatttgtacaaggtcatacagctagatggggccttgcttggtcattcattgctccgaaaccaagaaaaatagtcctcggctccagtgctccagcaaaaaaacaccattcctttatgcttcaggggcttcgtcgtgaacatggtgcgttccaaattctgaaatcaactgaggctttctttctagcttctaatctatcatgcaaaacggattcgtcggtcttttcagtcgatgtcacattgtcagatgagcagattgaggctgcaatattgcatggggatgattatgccggttctctagaagatagctctgcaaagttacaatgcgttgtcaagggaatatcatttcgtattacagtgtttgaacaaattcctgggaccctcctaatcaaaggttcattattgaataaagcattatcaggtaccttctcatcattgttttctcggttggaggatgcgttaagggcggaatgtctcagtaaggcgcgatagatctttaattatgagctttgatgcctctgcacggataagtcttctggatgccaaggaatgtgcaaaacgaaatcatgggacggcaacagcgtattagcttatagccaggagtcacaaacagagacgctaagcggtgatggaatctctgcacttgcactgcaggaaccattgttgctcgcatgttttcttgatgtgcagtgacggcaagtttgtgggaataccagcatcatgtctggtgtgctggctgcttatctggatttggagaacgacttgacatgacaacaatgggggtcttgctttcaaggccccctgcagtggcacgcaccgtaaaccattccagtgacactgagtagatgacaaatgcagcatcagtggtctgtgcagaccggggtatctggtacactgaattgcctccagagttttttctttctttcttttttccattctttctttctttctttgctatggcacgggaactcagatgaaggctttgaacttcagtgaaccgcacagtgcatgaaactgctgctgcttcaaattaatgtgtttttggaacatgtttgtagcacaatgcctctggccggtagcagtggattatgtaactgtctctaacactgtcagctcaaggcaagttcatcatgaccagtcgattcggatcatcggtttagatgaaccgtgattcatgaagcttggtcatttagaggcgaaacgaaggggtcatcttaggcatctcagtgtcatgtttccacaagaagtttgatatttgttgcacgtcgcttctgttatccattttttcta

SEQ ID NO: 110724 - DNA, 466 bp, Zea mays
  Clone ID: MRT4577_32473C.1
gaaaaaggcccaatgtttggttttgacatggccccgcccaaattttcttcaaaaggggaagggaaattccccaaaatctgggggtcccaaaggggggggcttatttccaggacaaatttccacaggagggaatcactttggcatgccctcgagagagttctttgaaaataacggggaaaaactttttactccttgacgacaaccctgatctggcccttggcaagcatgttataaaagggcccagtcttcctttggtcggtccaggggggcattttccacatgccccccccgatcaaacccaggggcagtccaaagaaaatctcctttaccacactcgggcccttgggggggggatgcccaaccctgccgcctgccatttgcttttttgcttggggggggcaaaccccaaaccccccccccggaaatggagagggaccctgaccccccccccaaaggagggaacccg

SEQ ID NO: 110725 - DNA, 599 bp, Zea mays
  Clone ID: MRT4577_32474C.1
aattcggcacgagggtaccctccaacaaggcaaaaagaagaacgaagctcacccaccttgcccatcggcctcatcacttccctcaaatccaccgatccccttccagaggttagggcctctgcgcccgatttcgtcccgcctcgccgatccacccgccgcaggtgagcggcttcgccggttggagtgtagtactgcggtcgcgaccttcgttccgagctggttcattttcgcttggataggtttggtacggatgggagccggcggcgcggggatcaggaatgtttcggtgcgtgggaggtgagagccgccggtgggcactgagggcctagggtttggttgaagagggagcaacgaaatggggggcttttgctccaaggggtcggcggtggacaagtcacccagcgacactacgctcggccccggccgggaggttgaccgccatgaccgtctagtggtgaaggaggagaagaaagctgtggtgggggaggctgctgccaagaggatgcaagaagagcaacatcaacagcagcagcagcagcagcagccagcagcgccaccactgcctgtatcggtgtcgcaaacggcagtgcctggagcta

SEQ ID NO: 110726 - DNA, 318 bp, Zea mays
  Clone ID: MRT4577_32475C.1
ggcgcggacggtccgcggcacagggccggacggtccgcgacctggcgcagggctagggggctcttgctggaatctagatctcgtcccctggggggaaaagatcttaaggtgctccgggtcgacaggtcacccggggcgtccccagacgacgtggagtcgcctaagaattaagagatcaaatcgaggaagaagtcttggatgaacaactagatcttgccccccgggaggggtgagatcctagggtcgtcttgggatcgacatgccacccaagacggatctagacgacgtaaagtcgaataggggtggatgtggatatgt

SEQ ID NO: 110727 - DNA, 342 bp, Zea mays
  Clone ID: MRT4577_32476C.1
ggcgccttttgccgcgtgttcctggccaagaagagggtgaccggcgacctgttcgccatcaaggtgctccggaaggcggacatgatccggaagaacgcggtggagagcatcctggcggagcgcgacattctcatctccgcgcgcaaccccttcgtggtccgcttcttctactccttcacgtgcagggagaacctgtacctggtcatggagtacctcaacgggggagacctctactccctgctcaggaacctctgctgcctcgacgaggacatggccaggacatacatcgccgagctcgttcttgcgctggagtacctgcacttcatgaacgtgatccaccgc

SEQ ID NO: 110728 - DNA, 610 bp, Zea mays
  Clone ID: MRT4577_32477C.1
aagagctaagttatttttgggggaagcccaccaaccagccaattaaaccgaccggcattggacccattttgtttggtaccgaccgccggaattaacagtcaggatcgacaaggattggactcacccttacaacatttttgggggaaaaaaagaacaaatatttgtttttaaaaaaaaaaagttgggcaatctgattcaccaccgtagtaaacttcatgaaacctgctaaagggctaggcgtggaaaaatgttaaaccacacggttgcccgttttggcctccaaagtttcacctaaaaccctttgtaattggtagtacaaaaaaaaaaaatcaaattgattccacgagctttcctttaaaaaaagggggaatacatgggcaatggtgggcattttttatttacaaagctaagttccgaggtataaacactgagctgttttgtttaagcatcggcacctttaatttatgcacttttgccaacaacaatttgattttgcgttgcaatgggagtgtaactggccgccgaatccacaaaagtaaatgccgccagttttgagcactacgacaccaagttttgaacccaaactttcagccttgacaaaattcctttt

SEQ ID NO: 110729 - DNA, 241 bp, Zea mays
  Clone ID: MRT4577_32478C.1
attcggctcgaggtgccgctacggcggtttttgcggcggctggtgaccggggtggggtgggggggctcaagaataccgtctcttgccgaggccgggcgtcaattccttccttaaggacgggatggactcagatcctcctgttgcagacccctcaggctccgccaatatgcccatggtccgccatgacgctcattggtctcctctcggatgccgacccatacgcggccatcgccgcctgccc

SEQ ID NO: 110730 - DNA, 386 bp, Zea mays
  Clone ID: MRT4577_3247C.1
cgggccaaaaaaagtttttggcaaaaattcagaacaaaggggtttttcaaataacccctccccccccaaaacgggggacattgggaaaactccggggccggggataaaaaggcaacgggttcaaaactaaaaaaaaaggggggggcaaaaaaatttttttccccccccttgttttaaaaaagggggaagaaggggagccaaaaaacgtttgggcccttggggggagaaaccccccgaaaccaaccccgcacggggggctttttaaagaccttttggggaaagaccttaagggccccttgggaaaagggcccccaaaaggggacggggaccttggttttttcgcgaaaaagggggacggaacccccgaggttgccaaccttgccgcc

SEQ ID NO: 110731 - DNA, 323 bp, Zea mays
  Clone ID: MRT4577_32480C.1
cccacgcggaacggggaacccatggagagaacaagggacaaacccggaaaattcgaccggaacccaggaggggacccaactttcccaaaaggaggccgattaaaaaaggggggaaacaagggaaaaaaagtataccgagggaaaaaggaaacccgtcaaaaaataaaaaaaaaaactaagccggaacataaaagggaaaaaccggggggccaaaaggggggggcaaccccaaaaaaaaggggaggggcaaagggcacgtttacaaacgggaaaaccggagggccaaacggaataaaaaaaaaggcaaaaccccgggaaaaggg

SEQ ID NO: 110732 - DNA, 156 bp, Zea mays
  Clone ID: MRT4577_32481C.1
acgaaaggaaatctatgctggcgcatccccaatcaatgctccacggtctggacccggaggaggcatccatatttcgatccctgaccacatacaatatttctatctccacatagggtggagacctcctctataaaaaaaccattgctaggttacaaa

SEQ ID NO: 110733 - DNA, 567 bp, Zea mays
  Clone ID: MRT4577_32482C.1
gggggggttttttttttttttttttttttttttttttttttttttttttttttttttttttttttttttttttttttttttttttttttttttttttttttggaaaaaaaacacgacaacccgggggaacaagccgataaaaaaaatagtcacggggggggggggtgcaaaaatcggccatgaattataagcatcaggcggcacttaaaaacaggggggtctgggaacattggtctatatccttgcatagcacctagaaaaaaactcagcccagcccattcagggggtttatgcgttggcaaaaacctgggggggggaatcccccttcctttgcttttttaagaggccaaacttgattcccttgcccttgggcaggctcacccacggtttattacccttgccgagggggaacacgttgcccaaacggggggaaaactgggggcccagggagccccccacgggaaggggctaaaagctgcccttgggcttctccctgtttttgaaaacccccacacgggcagggttccttccaccagtcaccatgacgacgtggccaacataaaactt

SEQ ID NO: 110734 - DNA, 422 bp, Zea mays
  Clone ID: MRT4577_32483C.1
cgagcagaccaaggggaaggaggacggcaagtaccaccactacggcggcggatgcttctgtgtctagactaggagacgagacgagacggcggcggcgatctagccctcctttttgctagtagtaattactattataattcaggacttggcaggtgaatgtgaatgctgctgggttggttggatgcataattctggagaagacgatgattgtgctgcgcagacagtagtaaaacaacatgcaattcgaatgatctgttcaatacattatacatagaaagaatgcatggcgttcccgtattctgtagtacacggttcaaaacttgtgaatttggctgcgtgaggatgtgatgaatgacacttgcttcaggttgtaatcatttttctccattcagtcaatctttgctctggaggttttacaagta

SEQ ID NO: 110735 - DNA, 184 bp, Zea mays
  Clone ID: MRT4577_32484C.1
gaaaatatcgggggaacttatctaaagttcagaagcagcccacaggcctacttgcacagcaacaaaggctaccaaaccatggaaactatgagaacgccattgccaaagttcacagcaaccaactactgcccggcacacaagcctgataacaccactacctggcacttaagagtgagcttcgcga

SEQ ID NO: 110736 - DNA, 381 bp, Zea mays
  unsure (1)..(381): unsure at all n locations
  Clone ID: MRT4577_32485C.1
cgtttggtcattattggcgcctgtttgagcggtctgtctgtgtgcatgcacaaaacaaaacgcggctgccatcaatgccgtataaggtctgatccaaagagaccggcgtgtggacccacatttcgaccaacataccccttttaactcaatggactaaaacccaatactttggcttcccttaaccatacacaggcatttgggtgccacagagacaggggcaggaaatgaactacatataggcgtacccacattattttgatgtagctggactgttacacgtacattcctaagcttgcttgngataagtaccacggcctacctgggttacaatctggcaatttggatgagtgtggatgaaaccttcaagcgttatacaaaaat

SEQ ID NO: 110737 - DNA, 360 bp, Zea mays
  Clone ID: MRT4577_32486C.1
ctttttctttttttggttgggtgcgtctttaaattgttagatgccttaatcctccccacggggcaagggttacattgttcgcttacattgctatcaatgccaaacagctcaccttccattaactaacaagccatatcaatatgcttaccgctccaaccttattagagttcgatgtacttcggccaccccaacatgttaggtgttccgctgatccattatactagcctgatagttacgtttacagacaagatgatgcctccctggatcaataccaaatagtcactatctactaatacctcaaaagcaacatcttaaaccgcggcattctgaggtctgatttccgaggtcatcataaattca

SEQ ID NO: 110738 - DNA, 443 bp, Zea mays
  Clone ID: MRT4577_32487C.1
ggggccaaaaaagagagtttttttaatagcggccccagggagggaacaaatttagggggtcattggggggacctaaaaaaaagggccaaattggaaacaggggaatcactagctgctccgggggcccgcgaaagcaaaccattttttttttatattggggactttgggggggccccaaaaaggggaacaggttggggggtttggatcttcaaaaaacaggtaactaacactggaaagattggtataggggggggaaaaaaaaaagggggggccggaagccccccctcccaggcttaaaaaaaaaggcttagcaaaggcgggccttgtacccaaaaaaaaaaaatgtttggatgaacccaaacatatccgacgggccatagtagtagtccaggcggtacccgtatacaaaaaacccagggggccccccggaaaggaaggccccc

SEQ ID NO: 110739 - DNA, 425 bp, Zea mays
  Clone ID: MRT4577_32488C.1
attcctggccagcgcacgatacatccaaaaacagaacatttcttattacaactataactcttaggtagcattagaagaggccacccacaatggcgcgacgctgctacaacgctggctggctagccttactacgtagtgtgagtggcagcagttgctgccattgaaccaaggtgccagcttgaggtgcgctgttcttttgcaacggcaacaattgccgttgagtcaagatatgtgctgggttcccaccacatagttttccttttggccatctgtcaggcttgtgctcttctgcttgtttgctgcaagctgtacttctgccgtttggccgactttgctgggtgagccctcctaccttttggtcactgccacatgtggtggcgtgctaccagcacgctgctccttgcgctgggtccgctttacggctg

SEQ ID NO: 110740 - DNA, 323 bp, Zea mays
  Clone ID: MRT4577_32489C.1
cgcccgacaggcacgcggttcaggccttgcgtatctaccctcttctcgcgctaccgccaccgccagagcctctcatctgtgtcccgagacctccgccctcgctggtctcagccatggtgaaatattccacggagccgagcagacccaccaaggccgccaaggccatgggccgagacctacgggtgcatcttcttcatcacacgcgagacagtttttgcccttaggaagttgccactcaccaaggccagaagcttaccttgaggacgtcagcgcccacaagcaggccatcccggtccgcaggtattgaggcgggagatgggcgt

SEQ ID NO: 110741 - DNA, 733 bp, Zea mays
  Clone ID: MRT4577_3248C.1
gtcctcgcaggagatacctacgctcttcggcacaatcttagtgtttcgccggccagtcttccaagctactactgcacctgtgctgattgctaacatggatgaatatcaggagaccgtgtcgcctctctcctacatacagactgacctgaactgatgctccttcatatgctgttagaaactaaagatggaattgaattatgatggtgcgccttctgacgcaatatgagattgtgcggctgatgacacaatagttgaactgtattctattcaaggtcctgctgtggatactcatttttaactgcgagtaccagatatgtgaggatcactgaggtcgtctgcgatgccctcgagatagagactgaatatcacctccacatgatcatctatatgaatgaaccaagcgacctgcagctgtactcactaccttcttgtcagtggacacgtcaccaagacacaagttacccgcgctatcgatgatgctgataacgactatgaatcagatacctgtctatgacacactgctcttacttgatagtgctggatctggtactcgctgtcctgctgacgcgccattgaccccagatattcccccacatgatcatggctctaagacacttcctcatgagttctcacatcctggaaacttggaggagaatccaacagctggcgctgcttttaatgtcattcaaatgaaaagcttggagcatcttgtttatgcaccatctgatccgtc

SEQ ID NO: 110742 - DNA, 691 bp, Zea mays
  Clone ID: MRT4577_32490C.1
gccctccctcgagtttttttttttttttttttttttttttttttttttttttttttttttttttttttttttttttttttttttttttttttaggcaggggcaaaaggggggtccaaaaaatcctgcagggccataaaattttacttgcagcccttgctttcacaggagcaaaaaacaaagcgtcgcccccggaatgccccgatatttttaaggtttggaaaaaaaaacactacaacagggaccccagaaacaaaatccaccgggccaatgtaaaaagcaaagggaaacaagccccctaaaaatgttacttggttaaaaaaagttttccgttcggccccctcctttggggggggaaaattcacaggtaataaaggggggcctggggggccatttaaccaaaccctaaaaggggggggggcgggggaacaaagaataaaaatggattcccggccgtgttgctccacaaaaagggcccaggccaggggggtttttcctgaccctgcaaaaggggaaacaattcaaaaacttaccattgttgccctggccccaggcttgccggtttccaccgaccatttttaaagggggaaaaatttaagggtagccccggttacctctgtagaatcttaacaaaattgggggcataatccctcgctccagcagttgggcggaaaaatataacttgccccttta

SEQ ID NO: 110743 - DNA, 477 bp, Zea mays
  unsure (1)..(477): unsure at all n locations
  Clone ID: MRT4577_32491C.1
ggagaccacagaacaagccagcacggcnacccagaagacngnnngagggcccncancnaaggacnggaggggcggaagggcngcnagnnncaacancacncccagcagcacnggagccgcnaaggcngnnggcaaagggcgggggggggggggaggaaaanngacnggaangncnnnccgngncccaaccgnncgagnnncnggnggngancngaccggnaggcnngagaagncngccaccnangaggagaacaaggcngcggncaaggccgaggcagaggggagccccaagggcanncngggngangncgaggaggaccnngnnnccaccgannnccagggngacagcaggncnagcancncngangcgaaggcnggcanngccnngaacggcaacnnggngaagccngngnccngggacgacaacgagngggganacagcacccgagnggncgacccganccgccacacgaacag

SEQ ID NO: 110744 - DNA, 240 bp, Zea mays
  Clone ID: MRT4577_32492C.1
cacagaagactgaaaataatttataattgcggggggaaaaacttgataattttaccgggaaagcccgagatggttgccccaccaaatgaccccccttgtgaagcataaacaaagggcatttattacatgggatggtgcccacaaaaaaaacaaaaaatagtttgtttcagcctacaagtccctccaatgggccgggcggttttttgagacaagaaaaacccttggtgatgagtggtcaaa

SEQ ID NO: 110745 - DNA, 481 bp, Zea mays
  unsure (1)..(481): unsure at all n locations
  Clone ID: MRT4577_32493C.1
ctatgaccacaaaaacattgtattgtgattgagacgtgatagacatactatgtatggaanattctgataaagaaggggtcgaccaccgaatgaatgcgcgatggtgtgtggtaacaccgactgcgtctgtgaaagcatgtaagatgaatggcagctcacaccacatatgtaagagggtgccagcgttaggcgctgcgggtagtaagaacgacaacaactggctgttagtgaagaaagtggaagaaatcacaccaggtaggtggctgattggtagctgaatgtgctgctgtgaataatgcaagaaagtacaatgctgctatgcagctaaatggaagaaagtgataaactgaggcagctgatagctggctgaatggtatgctatcacaaggcgaataagaagcagagctcattgcgtctagtgccgatgaatgcaacaaactgaactggttgaaagtaggctgtaaggtgttgctagcacaag

SEQ ID NO: 110746 - DNA, 1460 bp, Zea mays
  Clone ID: MRT4577_32494C.1
ccccgcgtccgcccagcgtccggggcgggcggggtgacgggccggggagcagaaagggaggccattaatactcgacacctccccgtcttcttcctcctcccccctccgccattgctccacgagtccacaagacatctcccgcgcgccagagctctagagagaaactggacaggagcgcgggcttcggactcccatctccgcgggggcacaaaagatgcaggtcctcatgactcccagcctccgcgcagcgcaatcggattgtcaatgaatctacaatgcaaaaagtccattgcaatgccaaggttgcttcctgactgaccagatcgagcgtgttgaactctctggtcatctcgtctggaaaaacagacaggtggtgttgcagctatggcttcgaaggcattgcctcaaattctcccagaaacgccaggcacgaagcagtgctctaagggtgctccccctttcgagcttccccagacgaacaattcctgtgcttcagcgctgacggtgttaccaggaacaacaactgacctgagcaaatcgagccataaacctgagctgaacgagcagaaaccagaccaccgcctcaaggaacctgtcgacgccgcgtcggtcaagttccccgtagaaccgagcaagaaagcggtagcggagcatgggagcacgaacgggggttccacttcgtttcagacgtgtggagggactagccaggcccaggcaaaggtcagtgcgagtgctaaggccgctgatccacccgagatcggtgacaggggcaacagtggaagatgcaggcctagcacaagcagcgacatcagtgacgagagctcgtgcagcagcatgagcaacagcacattctacatagcagaagtcctccgggggcggggaatacctgcacaagctcggaattcggctcgagtataccgcgatctcaagccttaaatcgtccttgtccgggaggacgggcacatcatgctctcggacttcgacctctctcttcgctgcgcagtcagtccaacactgatcaggtcctcaaaccctgacgcagaactgcagaagcgctcaggaagagcagccaaggctactgtgttgagccagcctgtgttgagccgtcctgcatcactcaaccgtcgtgtgcagccccaaccacctgcttcggcccacgcctgttctcctccaagtccaagaccaagagagaccggtaaccaaaaccagaagttgccaccccgatcagcccttggcctgagctcatagcggagcccagcgatgcacggtcgatgtcgtttgtgtgctatattgtttttccgttggtagatttttttgaggggtacttttacactttcttaaagttcacatctgtaattcagcaagtcctgattgtactgatctcctgcaatgcctttgcaaaacattgtcattttttttgtattccatcagtccaaaattggaagtcgttttagtttaaa

SEQ ID NO: 110747 - DNA, 890 bp, Zea mays
  Clone ID: MRT4577_32495C.1
gccggggagcagaaagggaggccattaatactcgacaccccgccggcttcgtcctcctcccccctccgccattgctccacaagacatccatctcccgcgcgccagagagctctagagagaaactggacaggagcgcgggcttcggactcccatctccgcggcgtcctctcgctttgtgcttcttggtgggggccggggggcacaaaagatgcaggtcctcatgactcccagcctccgcgcagcgcaatcggattgtcaatgaatctacaatgcaaaaagtccattgcaatgccaaggttgcttcctgactgaccagatcgagcgtgttgaactctctggtcatctcgtctgaaaaaacagacaggtgtttgcagctatggcttcgaaggcaatgccccaaattctcccagaaacgccaggcatcccaggcacgaagcagtgctctaagggtgctccccctttcgagcttccccagacgaacaattcctgtgcttcagcgctgacggtgttaccaggaacaacaactgacctgagcaaatcgagccataaacctgagctgaacgagcagaaaccagaccaccgcctcaaggaacctgtcgacgccgcgtcggtcaagttccccgtagaaccgagcaagaaagcggtagcggagcatgggagcacgaacgggggttccacttcgtttcagacgtgtggagggactagccagggccaggcaaaggtcagtgcgagtgctaaggccgctgatccacccgagatcggtgacaggggcaacagtggaagatgcaggcctagcacaagcagcgacatcagtgacgagagctcgtgcagcagcatgagcaacagcacgaagcctcacaaggcgaacgattcgcggtgggaggcgatcc

SEQ ID NO: 110748 - DNA, 2302 bp, Zea mays
  Clone ID: MRT4577_32496C.1
ccattaatactcgacacctccccgtcttcttcctcctcccccctccgccgctgctccatcggcccacaagacatctcccgcccgccagagctctagagagaaactggacgacagcgcgggcttcggactcccacctccgcgggggcacaaaagatgcaggtcctcatgactcccagcagccgcgcagcgcatgacgcagaactgcggaaccgctcagcaagagctcccaaggctactgtgggtagcctgcttgcggtgaggcgtccgggagcactccaccgtggtctgcaggcccaaccacccactccggccctcgcctgttctgcttcgagtgcaaggccaagagagctcccagaaacgaacgacatctcagccacgaagcaatcctctaagagtggtccaccgttcgaccttcccaagacgagccattcccgtgcgtctgcgctgacggtgttaccaggaacaacaactgacctgagcaaatcgagccataaacctgagctgaacgagcagaaaccagaccaccgcctcaaggaacctgtcgacgccgcgtcggtcaagttccccgtagaaccgagcaagaaagcggtagcggagcatgggagcacgaacgggggttccacttcgtttcagacgtgtggagggactagccaggcccaggcaaaggtcagtgcgagtgctaaggccgctgatccacccgagatcggtgacaggggcaacagtggaagatgcaggcctagcacaagcagcgacatcagtgacgagagcccgtgcagcagcatgagcaacagcacgaagcctcacaaggcgaacgattcgcggtgggaggcgatccagacggtcaggaccagagacggggttcttggactgagccatttcaggctgctcaagaggctaggctgcggcgacatcggcagcgtgtacctctctgagctgaatgggaccaagagctatttcgcgatgaaggtcatggataaggcgtcgctagcgagccgtaagaagctgctccgggctcaaacggagaaggagattctgcagtgcctggatcaccccttccttcctacgctttacacccacttcgagaccgataagttctcctgcctggtcatggagttctgccccggaggagacctccacgctcttcggcagaggcagcctggcaaacatttcccggagcaagctgtcaaattctacatagcagaagtcctcctggcgctagaatacctgcacatgctcggtatcatataccgtgatctcaagccagagaacgtccttgtccgggaggacgggcacatcatgctctcggacttcgacctctcccttcgctgcgcagtcagcccgacgctgatcagatcctcgaaccctgacgcagaagcgctcaggaagaacagccatggctactgtgcgcagccagcttgcgtcgagccgtcctgcgtcgtccaaccgtcatgcgcagccccgaccacctgctttggcccgcgcctgttctcctccaagtccaagaaagaacggaagccaagacctgaagctgccaccccggtcaacccttggcctgagctcatagcagagcccagcgacgcacggtcgatgtcgttcgttgggacgcacgagtacctggcccccgagatcatcaaaggcgagggccatggcagcgccgtcgactggtggaccttcggggtattcttgtacgagctgctgttcgggaagacgcctttcaagggatccagcaaccgggccacgctgttcaatgtcattggccagcagctgcgcttcccggagtacccggccgtcagcttctcggcgagggatctgatcaggggtctgcttgtgaaggagccccagcaacggctggcctacaagcgtggagccacggagatcaagcagcatcccttctttgagggcgtgaattgggcgctcataaggtgcgcaagcccaccggaggtaccaaagcctgtcgagatcgagaggccgtcaaatcatccttcatcgccgtctggagctgctgctgacgatgcctccgttggtgcaccccagaaaggtgtcgacggctacttggagtttggtttcttctagcaaacatgtgggctttttttttacactggatgtagggttttctgatgttatgtttttagcagatggttggtgttgtagatttgtgccttcaacctgttttgttttgtattttacacgttcttaaagttcacatctgtaattcagcaagtcttcattgtactgatctcctgcaaggcctttgcaagacatgttctttttttcagaaaaaaaaaaaaaaaaaaggccccta

SEQ ID NO: 110749 - DNA, 387 bp, Zea mays
  Clone ID: MRT4577_32497C.1
gaaagatgttatgtcgaaaaatgtttcaatctacaaatcccaagcatcggcccttgaagcccatgcatctcccaactgcaaggttctggtggttgccaacccagcagacactcaatgctcttatctcgaaagatctggtccatctattccaacagaagaacgttacttggctggccctacaggccacaacatggctctaggccggatttttaggagtcttaccgttcaatcgagtgatggctaaaatgttatcatctggtgctactagtcgcgcttgcagtaccctgttttttaccatgcctcagtggacgcttccactgctgagaagcctgttcgacagcatttttttgatgacgagtgggttatttggctacttcataaaaagtg

SEQ ID NO: 110750 - DNA, 285 bp, Zea mays
  Clone ID: MRT4577_32498C.1
aaaaaccaaggcccaaaaatagatttttttcattaaccctaccatttatttccaccagaaacctaaccaacagtaatttccaaccctttttacgaggaaaaactaaaaacttttaaactaataaccttctatggcaacccctgaatattagtttaaggaaaggggccatgataagacaaaaaaaaactctttaggagctttgggacaatcacaagagtgagaaccttttttagcccctagcaccaggttccttcctttccaatttttgcgaaaagaacttggtag

SEQ ID NO: 110751 - DNA, 777 bp, Zea mays
  unsure (1)..(777): unsure at all n locations
  Clone ID: MRT4577_32499C.1
ngcccgagaacacgagcaggnacatcgtggnaaacatcttggagtccacctggccggccgggaagcagcagcaggcgccggtctgcaagatcgagcgggtactcaaggtgcagagcagcgacaggaccctggagaggttcgagcagtacaaggagagcgtcagggagagggcgagcagcgaccggggcaggaagaacaaccctcggtgcgtcgccgacggcaacgagctcctcaggttccactgcaccaccttcacctgctccctcggcctcgccggcagcaccgcgctgtgccgggcgccgtgcaagctgtgcgccatcgtcagggacggtttcagggtcgacgacgacggcaagattgcgacgatgggcaccagcgggcgcgcccacgacatggcgcaggtgctgtcggagtcggacggtgacaagagagcaatgctcgtgtgcagggtcgtcgcggggagggtgaagaagaaggccagcgatgagaagaagccttcagaggactctggctttgactctgtcagccccagcacagaaggcgtctgctccgatttggatcaactctttgtcttcaatcagagagctatactgccctgctttgtagtcatatacagtggctattagggttgtagggacctaagttataacttattagctagttttgtttcatttcactgtcacctgctcctttaatccagttcttcttttttttatgggccagaagtgcaagttttggctaaaaatcaatcgcagttcctccgtcgttaccgttacc

SEQ ID NO: 110752 - DNA, 288 bp, Zea mays
  Clone ID: MRT4577_3249C.1
acaatggtgagtgttgtggcttgtctgtggcttagtctgactcaggaaaaacctacagccagcagcaagtatgtatccaggaactaatggtagtagcactataactgttcccttggctattcaataacatctgtttaaaaaactgatgcccagccccgcctaggcagtcataagtagagctgcatcgcctaggcatttctgtcttcttttgtgcatggaacctcactcatccctttcccagatcccaactcatgtgggagcctacgctattgggtatgtccttttttc

SEQ ID NO: 110753 - DNA, 1889 bp, Zea mays
  unsure (1)..(1889): unsure at all n locations
  Clone ID: MRT4577_324C.1
ctgggggtaccctncnagttctgcccggttgcacaatgttagtcattcataactcttgatcacaagcaggaagaaaaattgttccaagatatatccactgtactatctgaactttctcaactacatgatggtttgagctatcctcttgatgttgaagctggaacaaatgatatttcaagtaatgagattgattgggctagaaagcgtaatgaacttttgacaaagcttcaaggattatgcaaatctatccgggtcacgttgtcaaatcatgttcatagagaagaacttgagttgtggccattgttcgataaacatttttctgtagacgagcaggataagattatcggtcatataattggaactactggtgctgaggttctgcagtcaatgttaccttgggttacatcagcacttagtttagaggaacagaacatgatgctggatacatggaagcaagcaaccaaaaacaccatgtttgatgaatggctaaatgaatggtggaagggaccttcaacttcatctgacccatcagacaaggcttctactccttcagaagaaagtcattttcaggagaatcttgaacaaaatgaccagatgtttaggcctggttggaaggacattttccgaatgaatcagagtgagctcgaggctgagattcgaaaggtctctcgagattctactcttgatccaaggaggaaggcctatctgatccaaaatctcatgaccagccgttggatagctgctcagcagaaatcaccacaaccaagcgtcgaaggacataatggatgtacacgacgacctggatgtgttccttcgtaccgagacccagggaaacaaatatttggctgtgagcattacaaaagaaactgcaagcttgtgctgcatgctgcaataagctattcacttgcagattctgtcacgataaagttagtgaccatacaatggacaagtatcttcactacaaccattcattttatcgtccacacctttcctgctgagggatgctttcaaggatttcattttaacatcgaaccaatatcaattaagcatggcattttatttggaaatagaagtttgtggtggtgccatggacctgtgcgtcccttgtgaaatgaattgattttctgtcattgaattttctaactgaagctttttcattcgtttgattcacttgagctcccttaagttgtattgtattatttaatcataaatgtcatccttcctcttatagttatataatcaaatattagttttaatcctatctgcatggtttacaatgtattggtttgtgtcattgtgtgaagaatgtttggtggttagtctgaccacatgtgttagttgaatatgagtgccgagcagtagcatgcatataagttccactgcattcaatatttacattttttttcttatttccaggtaactcaagaggtccacttattgactcttatgaccatgtaattggtgttaatacaactacattaacatgtaaaggttggtagatctggaaggtcttgatggtctaatacctatctatgagtacggaagaaaaggcgggagaagtcggtctctgcagcatcgcgcgtgaaaaaaaatcagccaattccacgagcattgatgttgtcatgacttcaaaagaggagagaccatgctaagaataatgcattatgacatttgtcaggcttacatatcgactgtttgatatggatagatgtataggtttatgaccaatccagttcaaagcaattggagtatagaagaaataaggagaaacaggaaagctctgtacatcttgcattttgctgttgtttgtcgaagtttcaatgtctgtcgcgtgacaaaatatagttgtaatttatattttggcatgcacgaaacaggtgtatttattc

SEQ ID NO: 110754 - DNA, 344 bp, Zea mays
  Clone ID: MRT4577_32500C.1
cccctccacgagctcactaatcggcggccccccttttttttttttttttttaataatttttttactaaaatacatttaaaacaggggggttcataatataaaagctggcggccaccaaaattttcattttccttctctaaaacatatttccaataccattcctcctatgaacccattccttgacattcattcctttcctatttcccaccaaagaaacccacttatccaccttttcatacaatcctaagaagccccccctatttattaaaaagatctttctccttttccactttttttgattttcaaacatattttttcaacatttcataaaccacccttaccac

SEQ ID NO: 110755 - DNA, 730 bp, Zea mays
  Clone ID: MRT4577_32501C.1
gactcctatagggcgattgggtttctcgaggccggccgggaagaacctagcttggcgtcgcctcaccagtcttgccaaatctctaaccctatgcgtcgcgaagtaagatggcccccaattgctcggttccacctccgccgcctccgaccccgggtgatgtcctccgatgacaccgactctgtttcgcgctcccatatacgacatcatcagggacaggagtaggatgatttgcaaaccggacattcaccgcctcccgatgctcccaagagcgtatctccactgccgcagaaggcccaggaacccgcaatgtccgacaagagatgagtatgaccataaatatggctagacggaaaaggctcaggaacccgaaaggtccaatgatgattaaaacgactgacaggaggatatcggaacaggaccaaaaggacatccacgacggtcccttcttccgcctccgagaacccgcctccgccggcgaagactggcaaggactgcgaggattcggacgaagaaaaggatagggacggggaccaggtcatgacgaacaccaagatcgctcccaatctggaggcggaggataaggtcggatagcgcacgagcgcgccgttgcacagcagctgctcggtggacgaacacttgcgcatcctggaggacctcgatgagcaatacctgatgcacgacgagctgcctcatacagtagtgctgcgcgaacgactcactggaaagctcg

SEQ ID NO: 110756 - DNA, 305 bp, Zea mays
  Clone ID: MRT4577_32502C.1
cccaggctgactgcgggcacctgcgcagcgacatcctggaggtgctgtagaggattaacgtagggccttcgctaagacacgtccagatactcacagtgaggcttctccggatcgcgtaaagtatcgccatttccatgaggcgactctctgatctcattggaagcctcctggaatgcaatggagccacttccggcgtctggcaggatcgccaacctcccggatactcccgtgtaccgcgataaggttcccgattttgggatgaagattaggaggacgtatggtcatgtcagaagacatctgaccaa

SEQ ID NO: 110757 - DNA, 459 bp, Zea mays
  Clone ID: MRT4577_32503C.1
aattattatagttttgtaagtaacaatatgtaatcaaacttctaggtgacttgagagtggaacctcctatatcattatttagcaccgtttgtgacagtaaccatttcagtgtattgtttattataccacttatatcaacttatttttcaccaggttaaaattttaatttctacaaaataacattctgaatcaagcacactgtatgttcagtaggttgaactatgaacactgtcatcaatgttcagttcaaaagcctgaaagtttagatctagaagctggtaaaaatgacaatatcaatcacattaggggaaccattgttgtcttcacttaatccatttagcactatttaaaataagcacaccaagttatatgactaatataacttgaaaattttttatactgaggggttggtgataactcttgaggatgtaatgcattaataaaaatcaactcatcatt

SEQ ID NO: 110758 - DNA, 361 bp, Zea mays
  Clone ID: MRT4577_32504C.1
cgcagatggagtttagcttatttgcccctcctttgtatctgacaacaagcagtaagcaaaggctctttgaacacttctggaacagtggtggtgccagaattggggaagatggagctcttggatggtctgaatggttagcaaaagacgaggagagtagacaaaagttgtctatgcaagaaaattcacaagagactgaaacaggaggctggagtggttggtttgatccttctctgggtaatactgagacaaatgatttatcaaacaaatcactggaaccatcattgaccgatggaaatgatgctgaagaccttgatgctgaggactcaccagcacaagatgatgttgaatccttgctgaaaaa

SEQ ID NO: 110759 - DNA, 237 bp, Zea mays
  Clone ID: MRT4577_32505C.1
ggtggacctggttgatcacgcgacgaagctcataatcgctcgtcaacaatattgtatcaatatgagcaaaaggagcctaagcatgccatagcatcatcatgaacacaaagaacatactactaggagcataatcacattctagcagttatacaagtgaagctcaaaataatatgatatgcagaaataatacaaaagaaaatgaaagactaaaatctacatgacaaagcagaagagaag

SEQ ID NO: 110760 - DNA, 373 bp, Zea mays
  Clone ID: MRT4577_32506C.1
aacgggcggaaattcccgggccgccacacccttccgaacggccttaatcccccccgcggccacttacaactactggcccaactcctacacccggttgggtttaaacatggccctggagggcttccccaaccaccgccgcctccagaactgttccaacccggcctccatggccaaccagtccttcctcggcctcaaaaagttcctggccggttccggcaacccgtcctaccccggcggcccctttttaaacccgttcggttttggcaaaaccaaaaaggaaataaatgacctcaacctcaaggaaatcaaaaacggcaggctcgccatgcttgccatcctgggttacttaatccagggcctcgtaaccgccttt

SEQ ID NO: 110761 - DNA, 527 bp, Zea mays
  Clone ID: MRT4577_32507C.1
gcacgagtggcgatcaggatgccggcgctcatcttccgccgccgggcggccgccgcagctccaaagccgatacaacagtacctcgctggtctatccaccgcagtggagcacgttattccagaagataacggtcacattgccggaagggaggagaacaagaagcggtgggtggagcttcctcccttcgcaccactcgacgccaacgccaccgctcgagctatctctcggggagatggtggggaaggagcatgctccaatgccacggctatcaggtgggtccgacactgctgcccacacgtaccagcgtcgctggtccagaagctgttccgcctccgcaaggtgaagaagaatctggtgactgctgatacctcttcaacagacagtattactctgcaactccggttgagaagggtttcagcaaaagatgaacttgtgcctggtgatattctctttctacctgttaacattcaagaatcttctgttaccgagaagaccaagaaatttggtaacaagaatgagattgattt

SEQ ID NO: 110762 - DNA, 127 bp, Zea mays
  Clone ID: MRT4577_32508C.1
accatgcctactggaacatgcataccgctttgatcttttgtaaatctacacatgcacatgcatattcatcttcgtcgaacgtcctctatctcccatctctgtaacctcacatagcatatgatgaatg

SEQ ID NO: 110763 - DNA, 268 bp, Zea mays
  Clone ID: MRT4577_32509C.1
cacaaacagcaaccaggaggggcaggaattaaaacgaagggggagcaccacccaacggcaaccacacacaaaaacaggacagaaacaacaagagcataaggccgcaccgaaacgcaccaaacacgcggcaaataaagctaaagcggccgggacaacacgactaaccaaactgggggagaagagctacacagcacaaaaaccctagcaacaaacccggccacaaagaccagcccaaaaaagccccaacggggaaaacccccccccgagc

SEQ ID NO: 110764 - DNA, 561 bp, Zea mays
  unsure (1)..(561): unsure at all n locations
  Clone ID: MRT4577_3250C.1
attactctgacagccatgtatgctaagtttgggtgcatcgtgtctgctaggacactctttgacagggtgccaaccccacgggtgaatgtggtcctttggaacgccatgatatcaggttattctaagaatggacttgccaatgaagccgtgcaacttttcaagcagacgaggaaggttgcaaggagcatgacccctgactctgtcactttgcgatcggtgatcgtggcttgtgctcagcttggatccgtagaacttgcagaatggatggattgctatgtccaaggcagcaagtacagggatgatgtgcttgttaacacagcgctcatcgacatgtattccaaggcagggagcatcgcccgtgcacatacagtctttgaacgtatggacgtgcaggagcgggatgtggtcgtttggagtgctttgattggtggttacggggtgcatggtcatgtcaaggaggctgttgccctgttcgatgacatgaagcatgctggggtgaaaccgaatgatgtgacatttctgggcctnctgtcagcttgcaaccatgcccgtgctgtggat

SEQ ID NO: 110765 - DNA, 225 bp, Zea mays
  Clone ID: MRT4577_32510C.1
gcatagctcagtcgatcatcatcaagcaagacggtcagcatcacacagcagctccagcgagctcgcgacatgactgcgcggtccgagagacgcgaatgtgtgtgtgtgacgagcggcacgagctgtcgcgagcatcacgcagagaacagcgcgtgcgatgaagcagaacgcagagagcagcgtagtgcacgacaaggagaaggcagagagcgacgtagtgcacac

SEQ ID NO: 110766 - DNA, 314 bp, Zea mays
  Clone ID: MRT4577_32511C.1
cttccgaggcacggcaccaggcaggattaacttgcctttcgatcatatcgtcaactggtccggcggtgttcgacaccatgagctccacggattgcggcggcggcggcggcggcgccaagacgtcgtggcctgaggtggtcgcgctgagcgtggaggacgccaagaaggtgatcctcaaggacaagccggacgccgacatcgtggtgctgcccgtcggctccgtggtgaccgcggattatcgccctaaccgtgttcgcatcttcttggacatcgtcgttcagacgccccacatcgtgtgacaatatataagctag

SEQ ID NO: 110767 - DNA, 1066 bp, Zea mays
  Clone ID: MRT4577_32512C.1
cggggaaaattaaaaaaaaaaaaaaaaaagatgatagccaatttattggctaattcgaattagtatgtagaattcgtataattataactgttgaagccttaaattcaagtctcttggctcttttaacaacaagcagcaagctactagctagcctactacagcctcatcacttgttagcctagccatagtccacacgacaaactgatcgatggcgcccaccaagagccatgtcctcctcgccgctctcctcaccgtcgtcgccgccgtcggccagacgcctcgcgctgcggaggggttcaatattcctggtcttggcagcatgctgaatcccattcccgtcgtcgccggtgtagtgccgtgcagcatcgggagctccatcaacccggcgctggtgccggggttccctaacgccaacgtgcagctgatgtgcggcggcaccgtggtggccaacgcgacgacaagcatcacaggatccttcatcctcaccccggtaaacgctactcttggtctcttcagctccatgttaagcggccagtgcaatgtggtggtgaccacacccctggtcgcctgcaacgcgtccctggccggcgccactgggacgctcaccgcgcctctacagctccttggctccggcaccggcatcgccggcggtggcagcagcacaatcatcgcgaccattgctggccagcccttcacaatcatcaacggactgatcattttcaccacggggctctcctccttagcttaggtcgatcggctggtaataagagctagcttcatctatcgtctggtggtgtgtgttgatccgcgacgacaaggaactttatataaaatacgaataaatcggcatccagcaattcggatctaatatatgatcaagttacgtaccatgctttcctttctagcgacacatccccgtgtactcttgttactaagctaagctcatatatgtaatatatgtgtgggtatatataaataaagtcttgcctattgtggttatatatctcgtttgaactttttttctgacagtgatgaatgaatggtgaaatcatgataggttcatggt

SEQ ID NO: 110768 - DNA, 563 bp, Zea mays
  Clone ID: MRT4577_32513C.1
ccccctcgagtttttttttttttttttttttttttttttttttttttttttttttttttttttttttttttttttttttttttttttttttttaaccagcaaaaaccttaattaccctttcatggatttttggggttttccttcccaaaacccacaaaggggctttggggggaaattaaaactaccttcctaaaacccaaaaggggccccccaaccccagggtaaattccccatcccaaggggggactgggacccccccccccaacccaaaggggactagcaattcaaaaaagccagttttgcccccgggccaaaaaaaagaaaaaccaaaaacacttttatttttggggtccaagaaaaaaaacgggccgggggggttttttttttttgggaaactttttaagggtggggggcccttttttagcccaagctaaaaatttaaaagcagggtttttttggggggggggaacgcaattttaattacccacttgggttaatcaaagggaatggaaggaccccctaaaaccaagggcctttgccattttcctttgttggacccgttt

SEQ ID NO: 110769 - DNA, 575 bp, Zea mays
  Clone ID: MRT4577_32514C.1
gttaataattcgtaaacatcgttttcaggttagtgtatataaagtataaacatgtcgtagctcatggtacagtgttgcgtcgtagctaaggtcgtgtttagttcgctgaggatttttggaatccagctatttctgttacttgagattatctccttcaacatagataataggattctcgacacgtgtcacgtcgatgcacggcagcctgggagtgaggtcgagccccgacggtcctcgtcagcttcgtgacagagcctgtggagtgtgggcacaggcagcaaccatgctatgctaggccagccagcaccgggtctcctctcctcagatcatttatggccaagtataagagaagggcagccacgtatcagtatcacaccacacccgtcgatcgacggcatcccgacccggacagggcggcgcgcggacacgctcggctgcctttcggatacgctgtactgcttacttcgatggtgatgactgatgataacctttagcaattatgtaaatttctttcgctttcaggtgtacccagaagaatccagcgacagaccgcgttcaggaatgaaaggaagaaa

SEQ ID NO: 110770 - DNA, 239 bp, Zea mays
  Clone ID: MRT4577_32515C.1
ccgcgcctcccgtcttgcgccgggcggcggctgcttattgtagcctatgcgtcacggggtcagcgggtgccgacggcggtggcggcaggaggcgctaagcgaggacgatggcgaccggagccgatggcccgaaccctattggccgccagtatccaccatgttagacatggatctgataggcgtggactggtgaagtcctcgactgcggtgccggctgcgactcctggagttatgtggcc

SEQ ID NO: 110771 - DNA, 311 bp, Zea mays
  Clone ID: MRT4577_32516C.1
gtatacgagtgtatttttttaataatacatgccgccaaaaaaggatgaagggcagttttggaatcaggcattactgtgcaaaattggcaccgagcaaacctaataaaggtggaccagaatcttttttctggcaacgggccaaacccttaaaaaatcatccgtagacgcataaccgagttaggaggtccttttgtacaaaatgtgaaagtgaaacattgtacctcgagccataataggctgtttattaacccccaaagctattcctggcgacagcaattatactaacaagaacgcagatctctaatgaaaat

SEQ ID NO: 110772 - DNA, 385 bp, Zea mays
  Clone ID: MRT4577_32517C.1
aggaaagcagcgtggcgcataaagccaactaacatatcaagggggcgttaatcatagagcttacggaaggccgatctaagcagaattatctacagtgcaatgccattagctttctcatcattatcctataagcatatttttatctgctacaacaaaataaatcgggggagtagctggccttttttattggcagagcactgattacaaagtaaaccatccctctactcatgtgaaattccccccccccacccttcacgagacatcttaggagccggatatatattaccgtaacaaaagaaaagaatggattgtgccagcctgccattcttcgtgtaacagaagctccgggatgctccacaagtcacagcagtctagtctggatact

SEQ ID NO: 110773 - DNA, 640 bp, Zea mays
  unsure (1)..(640): unsure at all n locations
  Clone ID: MRT4577_32518C.1
acaagctttttttttttttttttttttttcttttttttgcaaatgtaattttttatttttggttggccacatacatcatccaaaaaacttgaccacagaattacaaccaaaaagccaaaactataagaagggacacaccaccaagaaggcagacgcttagaacaggaggagcgcacgcgacccacatggagtgctggttcgaataggcacaggnagagcacagaccagaggctacacaaaacaagaggcgccagcccgcgaacagaagagggctagcgagaggggttaggcaccgcacaacaagcagtggttagcaagagggcataggaacgcgaacactgggcgcgcaaaacagcggcataaagcgcaacatgggcagccacaaccacccgcacgaacacaagtggcatcacaagcgcgggcccaaactaggcgaacccacccccagaccaaattccagggaaaaatgggcataccctcacaatgcccacaacagaccaacgctaagcataaacagaaaagacgggggggcctaatgaaagagcaaacccgcgttaattgcggagcgctcacagcccgattaccagaagggaaaccactggggccaccagaatgaaagaacccgccaacccacggggag

SEQ ID NO: 110774 - DNA, 440 bp, Zea mays
  Clone ID: MRT4577_32519C.1
tgctgcatcttgatactgtcccccaacgccatacacaagagctcgtggagacaagttgcagaaccggagcactgctaagcgccgataacaggacatatgggtacctcgtcggtgaactgttactgccggcctatctcgccgtcccgatcgtgtcctctgctggccctggcacacgccggtcgcgactactatgtcatcccaataacgcgccggaacaacgagcgccgccggacgaaaaaaatcgccaggaacccttgatggaatgcgacactgctctactatggcaaccccgcgctcttcgaatcgcgtgggatcgcatgatatgttctccgaaaacacactgcgcatgtactatgccgcgaagatctgtagcagacggcgatgacggacgagaggctggacgtggagtcccaccaactgatcccgccggtgctcgccat

SEQ ID NO: 110775 - DNA, 350 bp, Zea mays
  Clone ID: MRT4577_3251C.1
agagtgagtcgtattagaagtagcaggtgagatcatcggttgatccatcttgcgaataatcctgcgtggccgtcgtgcttcctcgtctcgatcccgactacgctccgttcggctccgaggaagcacatcaagtcgcgatggagatgaagaaggtcgcctgcgccgtcatcgccgccgcggcctccgcgatcgtggtcctcgccgtcgaggccacggtgcccgccccgacgagcgcctcgtcggccgcgttcccggccgtcggcgcggtgctgggcgccgccgtgagctccttcttcggctacttgctgcactacactgagatgaggatcggagggagaggcagggggctg

SEQ ID NO: 110776 - DNA, 506 bp, Zea mays
  unsure (1)..(506): unsure at all n locations
  Clone ID: MRT4577_32520C.1
gcccgacgggcactctcaagcaacggcgagacgcggtccctgactacgaacgattgaggaatctcagcaagagctatatcatttttgatcgcaccagcgtcaggcgatgatgatatcgggttcaacgtacataaattcgtagatcagtgatatccaattcttagacagaaatcttcggggctccagctcactgttcaacatcggacgcgaacatacaccaaggtgcacaagcgccgcgctgcgcgaagagctaacgacacagacagacaaaacgcttacnatgaattgaancatgatnttgaccgtntgtttggaattgaggggcatctcatcaaccaaaacagacctggctggaaactggtttacgatgatcactatgtggatgtcccattagttgttgattacccatgcgaggacttcttgaactgcgcgcggtgcatcaggattctttctccgcacgacgagaggcatcatgatgctgnccatcgactacggagacagctttc

SEQ ID NO: 110777 - DNA, 674 bp, Zea mays
  Clone ID: MRT4577_32521C.1
catagaacttagttgttctggcgatttcattgtttgcgctggtgagcttggacagatagtcttacgctcaatgcattctcttggtattgtttggaggtacgatggaaatggcaagacaattacttccctagctgtgacccctgaggagtgcatcctagcaggaaccaagaatggcagcctcctggtgttttcaacagaaacttctcttcttcgaagggggagcatgcaacgaaataaaataaaaccctccacatctggttaagtcattggctgcaagatatccaacgaatgtaaaacaaatgactgcttcatgctgaggtcattaccagcttatagaactgttctcacgaccatgtagtctgaacataatgaagcacactttgtcatttgttttcactaccaaaagtgaagctggcattcaggaatgagggttgtcaagattttcagctggtgataatccttgagcacccaatctgacgaaggaaccctggtaatagccctagatccaagcatcttcacttagccttcacttggtaggcattgacatccatcacaatgttattgtagcattttactccgttggtgttccttgtgacagtttgtgtttgtgtagtatttatattagattccagtgcttttgtaatagcagctacgaattgtaaatgtgccatttt

SEQ ID NO: 110778 - DNA, 966 bp, Zea mays
  Clone ID: MRT4577_32522C.1
tatcaatgataccctgagtccaaacaacttcctatttggcataatacctggttattatctaacttgtgctttgttcaatttatttaggccttatgctataggtaacattttaactttgtgttttttggtgctatctcttagaatggtttatatatttagaagggactgggtcattttcatcatcacctgcagtttcatctcaaccttctagcgtgttctagggtcctatggccaaagcaagtttctaatggcttcaagaatgaattcggcacgaggctttggtgcatttattgtttatggtacaaactgatattccataattcgtataaacaaatgcataatgcatctatatctatattttttgaataacgcatctatatctatgaaccagaagttgtcatatgttatgacttaccagtggcggttcagaacgtatgcatatttgctacatagccacacaccgccaccaacgaagagctcagtgatcaggtcgtcttccattcctatcccactccttcccgtgcgcgtctgctccctctcctctgctattgaaggaactttttgacctggctaacaagattggtgaaggtggttttggttcagtttacaaggtttattgtttgatggtaccatggttgctgtcaagcagttatcaacaaggtctaaacaaaggaattgaatttcatgaatgagtggatacatggctcctgagtatgctatgcgtggttatttgacagataaagatgagttttgcccggcccagattagatgcaagaagataatgaaatgaaattgatggctatcagaattcctaggttaactaccgacccttttcttttgcatgtttgtttgagccaagccactcatgtattatatcatcagttatcaactatgaattatcaattatagtatttttgatatccaaaaaaaaaaaaaaaaaaaagcaaaaaaatcgaaccctggggg

SEQ ID NO: 110779 - DNA, 376 bp, Zea mays
  unsure (1)..(376): unsure at all n locations
  Clone ID: MRT4577_32523C.1
gcggaagcctgacacactgctcgtgtccaaatgaagtcaaatgcgctacatctagcaagagtgtttgcttatggttcctcaagagatccaatcagaggccaaatatcaaaacgattccatatcttagctagtaagtaactaattttccttgtagtttgggggaaatcctgaagaaagctcaatgcctcattgattagaattctgcacttgtagtcgatttccaacacatatacttgtttgaaggttccagtcaccatgttgtaatacagatgtacatgtaggtcgtaggtgatgtatttttcatttctaacaagcttctaagttctatgacctttcatatgcattttaataggaattgattgttgctggcccnnnc

SEQ ID NO: 110780 - DNA, 198 bp, Zea mays
  Clone ID: MRT4577_32524C.1
ccgggccgccccacccgtccgaaacctaccccttcttaaaggaaggccttcctttattttttcttaaacctaatcgccccccacggcaagtttatttaagaagggggccggacatggaaaaagtgaaaaccttggcttccggcaattttaccggcccgctcactcttgcttaataataaatatttatcctttcctttc

SEQ ID NO: 110781 - DNA, 169 bp, Zea mays
  Clone ID: MRT4577_32525C.1
aaaaaacataaaaaaaataaaaaaaataatttaaactgttaaaacacaaaaaaaaaatcaagagaaacggtcaaatataaaactgatttaagacaaatatataaagggcgtccattattcaaaatacttgctgtctaacaacagcatgaaacttgatgaccctagttta

SEQ ID NO: 110782 - DNA, 215 bp, Zea mays
  Clone ID: MRT4577_32526C.1
aacaggggggggaatttttaccattacaaaatatacccccaacctgttaaaagggggtaacataaaatgataaacccgactttatgcccggcccggaggacaccctataacgtgccaaaaaccttaaacaatagggaaaataaacctctccaagggggcttagctggggtaaaaataaacggcgagcttgggatgccacccttattcgaccccct

SEQ ID NO: 110783 - DNA, 282 bp, Zea mays
  Clone ID: MRT4577_32527C.1
gtcacgttatgaatactatgtcttatgactactagggtttgaactcaacattcttcaaagttgctgatgtttacggagtgctccagttcaaagttcaattccagatgctggtatttactggtttgttttttacaaagcatattccatagcgcccttaccggcataacgagtatgataggtacataagatctgggcgcgcatactacactggctaattttcaacgatgtgtggtttcttcatattgtggcttgtgtgcactgaccacatataaatgactcacc

SEQ ID NO: 110784 - DNA, 1413 bp, Zea mays
  Clone ID: MRT4577_32528C.1
ctctcccgcctttctttcgctcgagcccggccggaataaaccccgcctcccttctgtcatcccgtacgtctcgacctcgcagccgcaaacgcgaaaccctagcctcgagctctatctccggccacagctggtcaggtaggaccgtaggaatctcctttcctcatcgttcctcgggtggttcgtgccccgcgccccgctgctttctggcggcgaaggatgagcaggcgctggagccgcacgatctacgtcgggaacctccccggcgacatccgggagagggaggtggaggatctgttctacaagtatggtaaaattgttgacattgacctgaaggtccccccaagaccacctggttatgcttttgttgagtttgaagatcctcgtgatgctgaggaggcaattgctggacgggatggatacaactttgatggacaccgtctaagagtggaggctgctcatggtggtagaggtaatgcttcctcgcatgatcgttcaagtggctttggtggcggtggtggagcacgtcgtggtgtgtcgagacactcagagtatcgtgttcttgtcactggactgccttcttctgcatcatggcaggatttaaaggatcatatgcggaaggctggtgatgtttgtttctctgaagtgtatcgcgaaggcggtggcaccgtaggaattgtggactacacaaattatgatgatatgaaatatgctataaagaagctggatgatactgaattcaggaacgcctttgggcgagcctatataagggtgaaggaatataacggcaaacgtggtcgctcctactcacgtagccgaagcccaagtcgtagttacagcaaaagcaggagtccgagtaaatcacccaggactcgccgttcatcatctagatcccggtcaagatctgtttcttctcgttcaaggtccccatcaaaaggacgttctccatcaagatcaccagcaagatcgaaatctcctaatgtttctccagcaaatggtgaagcagcaagccccaagaagcagagcccaaacaggagcccatctggctcacgctctcctgatgcgaagcctgaataaaattgctatgctgttaaaggattgcagatggagtcaggagctcttcttttcttaacatttgtcctctgttctagtaccatcagtgtcttatcgcagtacgagattggatgatattaactatctgtatcagcttgtatcgatggactccaagtgttgtcactcttgttgtctagtgtgctgaaggacccatttacttttgctaaactttttccattggtgattgttggatgcatggtgtggatttgtgctgtgttggctaaatcatgttgttctagaccttatgcatttttttcatttcactaaattacctgacggttgctgcatattatgcagttttgc

SEQ ID NO: 110785 - DNA, 714 bp, Zea mays
  Clone ID: MRT4577_32529C.1
ttcactgagagccgcagagacgggagtcttctcactctgctatctccgcgatcctagtgctgccgcttctcccattcttctctcatttctcaccaccgacgccgctaccccctttcaaccacaccacgagggagggcatctcgaaccacatcggccaccgcgagtatccactccggaaacacgggctagccagatgaactggctcgagcatggcattcacgctgatgggcagatcgaccagtgacaataccattgcggcaagtgatgatgctttcaacatccttcttaagggagactggcgctgcgaagcacgtaccccgtgctgtttttgttgaccttgaacccactgccatcaatgagatgacgactggcatctattcgcacgtcttccatcctgaatagctcatcagagccaaggaggcacgtatgcatgaacttctctcgtgtccactacaccattgtgaaggagattgatgaccatgtgccttgaccgcgtcatgaaccttgcaaagaattgcactgcccgccagggcttactcgtcgttcaaagctgctggtggaggaagggcctcagagattgtctctctcctcctgaagagtatgtctgtcgagtatgggaacaactcctggctcggtttcaccgaggacccatccccccaggtgtgcacctacgtgcctgaagcatacaacagtgtcctgtccacccactctctc

SEQ ID NO: 110786 - DNA, 419 bp, Zea mays
  Clone ID: MRT4577_3252C.1
agccagccctttttttttttttttttttttttttttttttttttttttactggattctattttttcttttttttttttttccccccgaccgccaatccgcccaatagggatccgaagaccaaaccgaggaagcgccccagacccaaacccaaaacaccgaaaaggcaccagaccgaagaccaaaggcccccacaaagaagaacacaaactctacgcggaaggacaagcacaaaggcgaccggggggacaatgggaagcacacaaaaagccccaccaccagcagccccgaaaggcaaaaagaaaaacccggaggaccggaaaactgaactaaaacccccgaaacagggaaggccacacaacagcaaccataaacacaaacgccatgaggcgacattgcaaaaccaaccagccacgcccaa

SEQ ID NO: 110787 - DNA, 393 bp, Zea mays
  Clone ID: MRT4577_32530C.1
tccgacacgcttacgccatgtttagcaccaaactgaaaagttttttttttttaaagccgacagaaaggaaggggtcgcgggtcatcttaaagaacagaacacccacaagcccaaccaacgcaaacaagaagctcgatgctgcttaccaagacgcttacacacagggatcagcatgccctatatccttgagatactcaccaaatacaagagcgcattttgccggacttactcaaatgactggcgccgcagcctttgacaataccctacagtatagaccacatgacaccttaaaccatttcttctctgttacattgcacatcctcaaggacatgctcaacaatatggtcaagcacatcatactgaaaaacactgtgaacaagctctcccacaaac

SEQ ID NO: 110788 - DNA, 276 bp, Zea mays
  Clone ID: MRT4577_32531C.1
ggaagggggcaaccttattcatgaccaaattttgttcatggggacaattattcattgggccaggtttacaaacatgtttggggggcttttaaaatttaaaaaaaaaaacaaccaattagcaccggaccaacaaaattgaaaataattttactagccgggggggaaaaccttttttagccaaaacttttgattggaaaaaataaattctcgcctcgtgtataaaaaccaggatccccaaaggggcaccctaagggatgccgaaacaaaaagagtttt

SEQ ID NO: 110789 - DNA, 435 bp, Zea mays
  unsure (1)..(435): unsure at all n locations
  Clone ID: MRT4577_32532C.1
tttgggctgatttatgtgcttgtttatgtgcttggttgcataataccagcgcactcctcgtagtacatacctgcataggggtggtgttatccgaaaaactactcgttctctacttatcggaatagacgatggtcacactacgtagaataaacctgaaggtggccgagtacgttagaaacacgcgtctgtccggactggaaggttaactaaccacgtcgagaagagtcggtaaaccccacccgttaaacagcgacacgtacacatcgagcaacacactccgcttcgcactcntacgcaggaagatctccacaagactaagactcttataggactcgaacggtagaacgctattcctcataactcgtagttctaggatcatccgaggcgtcctaatcttcgcgatcggaggcagcggagtcgccttcgcaaattacg

SEQ ID NO: 110790 - DNA, 516 bp, Zea mays
  Clone ID: MRT4577_32533C.1
ggggttgaaccattatgggtttattattttttaaaaaccaaatgttttttatttgttcaaaaaaattttttggggagattttaagggggggtggggcaaactggtaactgggacaaaaggggggggggtggggacattggagattggaaattttttttggggggtcttggggttgttgaggggaaaaaaaaaaagggtgggacggggggggggcatttttagggggcaccctcaaagaggtttgacgggttgggttccacctcggggggtgatttttttgaaggacttctttttttccgggagatggttatgcggaccattgtttggggtccaaaaagggttgcccacaaataaaagcattggcttgatgtagttggcactttccaacggaaaggggggatacatttctgcagggaaaaagaaaatgcccccttttttttccgtttcacggatccactgatcattttggtccctcaatcaaaggagccggtacccttaagggaatatagaattttt

SEQ ID NO: 110791 - DNA, 724 bp, Zea mays
  unsure (1)..(724): unsure at all n locations
  Clone ID: MRT4577_32534C.1
ccggccggggacgccggccggggactcttataaaccaatctctctcttaaattgctcatccattgtcattcagaatattcattcgtctaccagaaccgaggtaaagtcactgcaaaccacattcatcatggctcagaacgtccccgacaactacatccccaagtacgctcagcaggacgagtgggaggataaggagctccaaaaattcgcaattgagttctatcgcatctcagacaagccagaagagaaccaacgctgggtcgactccttctgcgaggacgcacgtgttcaaattggcgctgacaaggcgcgtggcacaaatgacctggcacaattccgaacgcgaatgtggaaactagtcaaggagagaaagcacacggtcctcaaggtcttccctggacgtttcccagactcggaacccagcgaaagcgaagtgatgatcctcggtgaggttggcgtgactacgacagacggacgactcaaacaagctgcgtggtcagcccacgcggttgtgaagaaggtcgatggagcctggaaattcaaggagtaccgagtttggttgcaggatgagggccttctatgaaagagagacgcaatcgaccgaaagcaacaaaagtgaatttgtgcataatagcctctagtcgcgtttatgaatagnncagcatacgaaacagcaaaacannaaaaaaaaaaaaagggaaaaaaaaaaaaaaaacccgnggcc

SEQ ID NO: 110792 - DNA, 145 bp, Zea mays
  Clone ID: MRT4577_32535C.1
cttactctagagtaagtcgactaatctctagagtacgcagatccatctctaaagacttatctacttactctagactacagactacgtagatttttcataaacatctaccccaatccatctcacaatatcacgatcaatctctatt

SEQ ID NO: 110793 - DNA, 365 bp, Zea mays
  Clone ID: MRT4577_32536C.1
ggtcgtccaacggtcggaatggggctgttgaatgtcaacaaaccgacggcgagtcataacaaaaacacaattagacttgtggctgaccatgaggtcccatttactatcaacagccaaaaacaacggtagcgctctgccaaatcatctgggagcatcatacaaaggtggctcccatcattactaagaggcgcgcgacactccacatgtttagaggacacatcccacccaccgggagagcaggacacatatcgcaccactggatgccgcggtgaagcactaaatatccacagagaacaatgccgatgattcattaagcagacaagaacaggcggcaggtccattaaaggctgatgctacttgcttac

SEQ ID NO: 110794 - DNA, 821 bp, Zea mays
  Clone ID: MRT4577_32537C.1
ggaccggacgcgtgctcgggtcttcacgatgccgccgccgccacacgacatcgcacatccgctcttctccctcccctcgctctcggcggtcgacgtgcgctcccctggtgccatcgcttgtgcccggctcccgccatcgctggctccccgatggacctcgcggctagtgtggggccatggatccccgacggatcgagggtcgcgccgcctcatgagaaaaatcatctttttggctcgaacagaaaatacctgaagcttcaatttgacatcgtgtagcaatgaatgcgtgcaaggaatgctcttttacatgttgagaatgaagaaaaattagatgtcgtggaggcatcccaaaacatgtactttccattttgcacattttagtccaaggttcaatacaaactttctcagaaaactatctcaaacactactaatcgttgttggtctgcagggtttcaaattaggacttagccatttttccatcagcctgaaacaacctaatagtcttactttgatcccttgggaaaaaatgttcttattattttgagtttttgacctatagtcaggtccagaacatacccctgacatcacactactaatctgggacaaaaatatgtagttctccaaaagaaaattgtttctaatcctgccctgaaaatgtttgctgaaatactatttggtaaagttgctgcatagctaaaaggttctccaaatgaaaattattcctaatcctgccctgaacaacaagaaggaattctatggtttccaaaaatgagaatatgttttttattcgtacatgaagcttcttatatgactccttccct

SEQ ID NO: 110795 - DNA, 301 bp, Zea mays
  Clone ID: MRT4577_32538C.1
acgcgaaaacaggtagtgctgtggtaattaatgctggacaaacaaatggggcagctggtgatcttgggtgtcaggactcaacggatagtgcaaatgctgttgccaagcttctcaatgtgagcacaaattacatactgattcaggctactgatgtcaatggtcaaaagataaagaaagaggcactttcaaatataataactagacctggggcctcactggcttcctaaagtcaaggtgcgaattctagtgctgctgacattacaactacagaccttgttagcaagagcattgctttccatac

SEQ ID NO: 110796 - DNA, 117 bp, Zea mays
  Clone ID: MRT4577_32539C.1
tcgagcgtgccggcggttcaacctaataccctgccctttctggggttccttccggttcaacttcactcggttcggcttaaacgaacccaacttccttccctaaccgttggctttttc

SEQ ID NO: 110797 - DNA, 211 bp, Zea mays
  Clone ID: MRT4577_3253C.1
ctgataacatgccccaaccccaaccccaacccagtggtggcagcccttgcctgcgtacattatgcactctgcagctggcggtgccggccatggcgcgcgccccgagctcgtggacgccgcacatcgccatggcgctccttgacgcggccgacacggccgaggacgcgttggctgagaccgacactgaggaaaatggcggtggcgcatgtct

SEQ ID NO: 110798 - DNA, 234 bp, Zea mays
  Clone ID: MRT4577_32540C.1
cccacgcgtccgcccacgcgtccgcggacgcgtgggcgaccgtgggcagttctgttccataactaattacggtcaagaccctcgccttcgtgcaaggctagataccaatgtaatggcgaatttatttgaatgttggcctgacatggagtatactatttcagattgcagccaaattctattgcccttttgtttcttgggtcacttcagtttatatgtatttaacatgaacaccag

SEQ ID NO: 110799 - DNA, 777 bp, Zea mays
  Clone ID: MRT4577_32541C.1
atcgcagtccgcggcggcggcagcagcagcagctcctcctgctcctgctcgtcgctgtagtcgcctcgcatttaccactcactcactcactcgctctgcccttccccccctcgccttcctcctccttccatctcgtactccttcgctcgcatcgcaccgacggacgcagagcagggtcgcccgccgccccaccacccgcgcgcggctcttagcgccgcatgccgctctcgccctcccgcgccgccgcggcaacggctcgactcgaggcgatgcagatcggaggatatagcgggaaggagatgagaggtgaggagcacagggcagcgctgagacagaagagactcaagaaggccaagtgcttcaagtggagaccaagcaagggcgacatggatagcaaagtggaggcggggggagcggggtctggtcaggtctgcgatgacgcagtgctctgctcgctgtctacggccagcttcagtggcctggttagctggcagagagtgaggacccttgggaaggtggctgaggggtgtgatgctgccgatcctccggttccaagaaaattaagatcagccataaacaagcgagctggtcgatttacttctgcgccatcacgccatgtcaaaaagaggcgtcatctttcggctatcagtgctcaaatttcttctgtaggccaggaaacaagatccaatggggagctcgttatttacagaacaagaagaagcaattgctgatgttctgctgtccctgtcccaagaacctcctcacagcgagtcacag

SEQ ID NO: 110800 - DNA, 1913 bp, Zea mays
  Clone ID: MRT4577_32542C.1
agggaaggaggtagaagcaagtgcaggcagagcagagagggtccgcagctttccggtcgcgccggcccacgccaagcggagcggccaacaaaaagggcgaggcgggccacgtcgcacggctagcaccgcatcgcagtccgcggcggcagcagcagcagcagctcctcctgctcctgctcgtcgctgtagtcgcctcgcatttaccactcactcactcactcgctctgcccttcaccccctcgccttcctcctccttccatctcgatctcgtactctccttcgcacgcatcgcaccgacggacgcagagcagggtcgcccgccgccccaccacccgcgcgcggctcttggcgccgcatgccgctctcgccctcccgcgccgccggcggcttgccccgccgctgcccgcgcgccgccgtcctccccgccgccgcggcaacggctcgactcgaggcgatgcagatcggaggatatagcgggaaggagatgagaggcggggagcacagggcagcgctgaggcagaagagactcaagaaggccaagtgcttcaagtggagaccaagcaagggcgacatggatagcaaagtggaggcggggggagcggggtctggtcaggtctgcgatgacgcagtgctctgctcgctgtctacggccagcttcagtggcctggttagctggcagagagtgaggacccttgggaaggtggctgaggggtgtgatgctgccgatcctccggttccaagaaaattaagatcagccataaacaagcgagctggtcgatttgcttctgcgccatcacgccatgtcaaaaagaggcgtcatctttcggctatcagtgctcaaatttcttctgtaggccaggaaacaagatccaatgggagctcgttatttacagaacaagaggaagcaattgctgatgttctgctgtccctgtcccaagtaccctctcacagcgaggtcacagcccgacaaggctgtagcagatagttcaaacacgaatgacgcttcaacttctttttcaaaaggacctactatggaggatgaccaaacagccgtgctgccaagcgctgctaacgaactggctagccaatgcgcctgcataaataaagcggtggaacaaagcaacatcgttccaaatgcagatcaagtggctgctgctgcaaatcaatccagcaacagtatcccacttctgtcagcgaatgagcaaatgcaggacctttctatggaaactgctgtgaatttgccaagcccatctaaagacacctccattaacagcgtgcaaaagcaccatgaactgcagtttgatgatagcaaatgtcaccctgcacagaagccagagactcctctttggctggtaaattctgatcaatctgagggtgtgctgctacatgagagggagaaggccaagaacaacagtgcacaagaaattgtgcctctggtccagactctgttgccttgtaccccagctgggtacttagtaaaaccctcttcaagcaaactggcagctcccgccaatacaatttctgaatccgctaacttcaccacgcctggaaatcagaacaagcaccctgtgctcagaaacgtcggcgcgccgaaggcatggaagaggagcatcacccacgtgtacgtgagccacgtgatccagatgcacgtgaacaaggagaaggccgccgcgtcgtcgtcgttacaaagccaagcgaggcctgaggagaggctcctcgcccgctgccccaggcctccgaacggctcgtccaccacctcgcacaaggccgccgccgctcgggacgagagattgtacacggtgcacttcgacgtgcgcgtcccggctcaccagccgcccgctggcatctgcgatgcgggcgccggccggcagaagattgtcagcggtagttcctggcaaaacctgccggccaca

SEQ ID NO: 110801 - DNA, 602 bp, Zea mays
  unsure (1)..(602): unsure at all n locations
  Clone ID: MRT4577_32543C.1
gaaccctcgcggggcacttcagtgctcgaaggtcgttagcactcagatcaggtgatctcgccaaagcaccctgtcttaaatcctggtctgctaagcatgcaccttgccttgcgtgcggaagtatgattactgggagaggcgggagagagaaatttcttttttttcttatgacngcggcggccgggatgaacttgggatgggcgtgtggtactgaagtgcatgccctgcttcatcatgtatgacaacatgtgtccagctctgtagtgaatgacttttgaccgacggctgtcggcgactgaaccaattcttgccctctggactctcgctctcacctggcgatattctgtggacatgtgactgccggatgcacctactctttcctagctgacgatgcgatgctagtcatcatttaccaattccttcgctcggaattggtcacttaatggcgctcccaggttagcttctgcgctgactggaacacgcgtgaagaatgcaagtccgacaaaggtgagcgtttcttgggcccctgctgtatacgaccctcctattacttctgactcccccacggcgatagggcaccctgcgaggtgaactaagggtgg

SEQ ID NO: 110802 - DNA, 686 bp, Zea mays
  Clone ID: MRT4577_32544C.1
cctcgaggccggccgggccgggaaaacaaaggaaaacagaaaagctgcggaagttgtcaagaactccgacgatcccacatatccgtcaatcgatcgactcccgttcccctcggaatcgaaatggccccgagaattccaacgcacaagaaggggaacaagggaaccaggcatcgcgaagagagcccggggtgatgaattgttacggttcatggacggagcaagcaaggagcctctccgcaaggactactacaaagttctggaggttgactatgacgcatctgatgacaccatcaaattgagttatagaagattagctttgatgtggcatccggacaagcacaagggcaatagcaatgccacaactaaacttcaggagattaatgacgcatacaaagttttgagtgacccaactaagcgactagaatacgatgtttccggttgctacgagatcgaccaatatactttgcgtgagtaccttacaaaatttaagggtatgatacttacctgtaatggccttggcatagaccattcttctaagtgggcccgacatttgagggaactgaaacctcattgatcaacggggtatggatttactgctctatgtaagacacaatgtgctgtatcacaattcacaaacaatggccccctactccccgaaaaaaaaaaaaaaaaaggcccctagggcc

SEQ ID NO: 110803 - DNA, 305 bp, Zea mays
  Clone ID: MRT4577_32545C.1
cggacgcgtgggtctgacgcgtggggtctagtattgcctctttctgctagttgcgccgttgtgtacactagtaacactacatcctaatcatcggcatgcaccggcactacaagagatcaggtctctgtaaaagttgccctcaacgatcctgcaccaggagacgacgaataagctctatgatactgctcatctgccttctcgtcgtctttaacctcatcactatggctcatctgccttcttgtcgtgttggtgctatcggcaacaacaaggcggtgctgagtgtcggcgttgccttctctattcta

SEQ ID NO: 110804 - DNA, 466 bp, Zea mays
  Clone ID: MRT4577_32546C.1
gatacactccactacaccctctcgagcaacaccaagaaccataccaaatcccaagtagagaagagcaggggctgcagctggcaagaagctttgctcagagatggagttcctgtcgcagatgtggtcgctcctgggcctgctcaccatcctgcagaacgtcctccccacgcagctgctctccctgctgcactcgctgtggcagtcgctccaagactctctcacgccctactcctacttcgacgtgcccgagttcctcggctctgcggccgtcgagcccaacgcgctctaccgccacgtccagctctacctccaccgctccctcctcctctcctcgcctccgccgccacgcctcacgctctcgctgccgcgctcctccgccggctccggcggccacgcccacggcgctgcgctgtccccgccgtccgtgtcgctctccccaaaccactcggtcgcggacaccttcaac

SEQ ID NO: 110805 - DNA, 544 bp, Zea mays
  Clone ID: MRT4577_32547C.1
ggggggtggggttttttttaaattttttttttttttttttttttttttttttttttttttttttaaattccaggttgccaaaaggccgaggggaattggatgaggggtgaattgttcagttccattctcaggggctgaaacaagtctggggaggggggggggtttctccttttgaataaaagaagatcccaacaacaggggggtataaaaaaaaaaaatatttacatgagctcaatcgcaatcacagatgtacccaaactggatagaggaacataaaggggttcgggccccctcctgtctaggaaggtctccactgggacccgaactggagcggaccatttttcgaggccaagagaggggaccttgcaataatccgcttggggctgaacacctgtgcaaggggaaaaacaatggagcccaaaggttcccggccagggatcaaccctgccttggggggtttacttatgacttcaacatgcattttatcattcacaggagggtcctcacacacgaactcaaactcatcctcccatcttggatccct

SEQ ID NO: 110806 - DNA, 932 bp, Zea mays
  Clone ID: MRT4577_32548C.1
ctcgaggccggccgggaaaacaaaggaaaacagaaaagctgcggaagttgtcaagaactccgacgatcccacatatccgtcaatcgatcgactcccgttcccctcggaatcgaaatggccccgagaattccaacgcacaagaaggggaacaagggaaccaggcatcgcgaagagagcccggggtgatgaattgttacggttcatggacggagcaagcaaggagcctctccgcaaggactactacaaagttctggaggttgactatgacgcatctgatgacaccatcaaattgagttatagaagattagctttgatgtggcatccggacaagcacaagggcaatagcaatgccacaactaaatttcaggagattaatgacgcatacaaagttttgagtgacccaactaagcgactagaatacgatgtttccggttgctacgagatcgaccaatatactttgcgtgtaagattttcttgtcccgtagctagacagtagatgtttgagacgattctttatgcactcattttattatctctatcctctgttgtatttcaggagtaccttacaaaatttaagggtatgatacttacctgtaatggccttggcatagaccattcttctaagtggtaaacacaatacaactgagttgtcacctatttatttcgaaatgatgttatgttttctactcttgatcgttgatggatgcaatgtaaacaactgcatgatgatatcatatttgtcgtttccagggcccgacatttgagggaactgaaacctcattgatcaacgggtatggatttactgctctatgtaagacacaatgtgctgtatcacaattcacaaacaatggccccctactcccctagtcactttctgcccaaaagatgcatgtatgtttactaattccagatggaggatggtctgggctcag

SEQ ID NO: 110807 - DNA, 317 bp, Zea mays
  Clone ID: MRT4577_32549C.1
ctcacgcgtgcgcgtatgtggcccataacttttgctgatggctgattactaacaatgcgggaatgatcttccttcttaagacactaccgtcgatactaccactaccagctgacctacacgcagaagcgaccaaatgactaatatatagatcaatggcatattaatgcagtattcaactcttataccaatacatctatactaccacccatgatacctattcaggagacaatagcatcaacagcaaatatcaaactgactcttagtagatcaccctacccgaaacttgcatcattgcaagcagatgaggattcatagtt

SEQ ID NO: 110808 - DNA, 235 bp, Zea mays
  Clone ID: MRT4577_3254C.1
gcgtccatgctttcgttcacacatgcatttacacttccatccatagtagctttttgcgtgggtaataagatgtatttcaacgggttatggctgtaggttatttgtaatatattgtttggtttcctgtgagataaactaacataaatattggtcttgttgatttgtaatgaacttcgtgttatcataataggactgtttaatattcattattttaacataatatagaagtttattt

SEQ ID NO: 110809 - DNA, 618 bp, Zea mays
  Clone ID: MRT4577_32550C.1
gattgatataagtattggattaattctattaacctatgaaccgatcatcacattatctatgtaagcattcaccggaacacgtgacaaagcattggccgacgcatgttaaaacatagggttgggactgggagacaccgaaactgcacacactctcagctccataccgtacattcatgattcaaccaatttgagcaagctggagctgtttgttaggctgagaggtgccgccccgattctgagtattcctactcttactgatcctgatgaagcacgacagcaccacatggatcacaaagtaggctagcacggcgatgacgagcgcggagacatatccagaggtcttccacgaccggctggagccggccgcgtacgcgaccaggaggccgaggaggtccagcacgatggtcgtgttcatcacgccgagccaccagtccatccaccacttctcgtgcagcgagtccggcagccgaaggacgatgaccacgacggacgcgacgaaggaggcggagttgctgtagaagaaggcaaggtaccggtgcctcctgttgtcgtgcatcaccgggtcgcccgcctcgtgcccgccgtcgttggcctgccacaccccgccgggcggtgcca

SEQ ID NO: 110810 - DNA, 393 bp, Zea mays
  Clone ID: MRT4577_32551C.1
tgccagtcatataatacaagcgataggagcccaaccctaagaccacgctgcctagtggcaaattcctttcaagtcccaactaaccaaaacttggaagaagaaaaaaggttgaaacaccggcttttttttaacctttaacggtttaagttgcagcaagaaaaagaaaggaaattaaaagagggggaggggcagagatggcttgcaccttgaaactccaaaacccaccattaaaaaagacctttttttgcccctgacccttagagagagttgctgttgctgccattcggtcggtgccttcttttcggtaccccgcttgtatgtggtatcaccgtgatgggtggtctcccataccaaggcgaccagggaatatgaagctagaaagttcgtctgcag

SEQ ID NO: 110811 - DNA, 399 bp, Zea mays
  Clone ID: MRT4577_32552C.1
cttggccttggacctttgggctgatttatgtgcttgtttatgtgcttgcgaacgaataaataacacacaatgaacggacgggtacgcacactgctacgtgtacgctttatgatgagatgggagcacattatggcgcagcagcaccacaccaacaaccaacacagcacgcttattcccgcccgacatcatcaagggtcacgcaccgaggtaaaaaaaaaaaaaaaaaaaaaaaagggtggttgtctcagaggacttaagtccatgcatgtgcgtacgtgatgctacagtctcctcacagcgctattcaaacctaacctatcggttgctgccccataatgctgcgatcgggaaaatttcggtgccatttaatccaactgttccgtagtatactttttccct

SEQ ID NO: 110812 - DNA, 419 bp, Zea mays
  Clone ID: MRT4577_32553C.1
aaacccaggacctttatttcctggtcccaccaaaaaaaagcctaaaagcataccttaatgggtttggtgtttggccgaaaaattttaccattaccctgttaccatttccaaattaccgggaaaccaaccttgccccttccgttttttttggtttgcccaaaaaaaaaaatcaagaagtggccccctaggtgccagcttttccaatccgtattttttggcctgtggcaattaccattcctcccagtgggaaagcacatttttcttaatggattaagtaacctggcctaaccttccgtgaaggctattccaggctctgccccgccttggaaccgttacccctgaaagggtcccagttcttcggggggttacccaacttgtcccttgcccaattgagtccagtgtatgcaccacaaccttgt

SEQ ID NO: 110813 - DNA, 466 bp, Zea mays
  Clone ID: MRT4577_32554C.1
aaaaagggcaagcccccagctaaggggtacaaaaaaagggccacaagaaaaaagtgtggctaaagggcccccggggggaacaaatttggggggaataaggggctgttttaaaaacgggggggccaagggtaaaaaccctgtccagaagaggactagaggcttggggggggggatttttggggcgcgtttataaaaaaaaaaaaattggaacatgggggggggaaaggcccggggggggggggcaaaaaacataaaggggaaaccatgctttggggctttttgaaaaacccaaaacccggccattttttgggggaaggaaggccctttttgaggggcttcctttggcggaccgccttttgggggcggggaaacaaaattgggggcgtgggaaaaaacggaagcgaggcccctcaaaacttttaaatggaagaaaaggggggctctttaaaaaaaacctggaactttg

SEQ ID NO: 110814 - DNA, 514 bp, Zea mays
  unsure (1)..(514): unsure at all n locations
  Clone ID: MRT4577_32555C.1
aaaaaaaaaaacaaaacaagaccaccgcaccagggaancgctgacgccncgcgncacgacggccgccncgccgcggcagcgacgccggcggcnccccggacggcagcgcgcgacgnacgnccgcgccacggccnccgccggcgagccggaccncnccgagcgcgngaacgggcagcagaggcccaacccgnncgagancgggncggggccaccgggcaccaacnacaccgncangaagcgcgccnncgacgagggcgggggcgccgacaccgccaagacggggtttttggacgccgacaacgccaccaacgnnaccccncgnnacgcaaagcngcgggcagaaccaaagggggcagccagggggcgcancangggcaggcagaacanngaacncancagggacaggccncgggagaccaggccgaaggagancaagcagnngaagaaagggganccggacagganacnnancggngcaagcacggaggagcacaacaaagccgcagggcaggag

SEQ ID NO: 110815 - DNA, 774 bp, Zea mays
  unsure (1)..(774): unsure at all n locations
  Clone ID: MRT4577_32556C.1
gggtacctcgaggcaggccggcaggccggccgggaccacacgacacacgcatacagttttagtttgttcaactacatacgcaaatcggaatcgaaaccctatctcggatccgatggctcgttcgccgccgccttcttcgtcggccggcggcgcgcagtacgcgcagcagttcctcaacacggcgctctcccagcggggcccgtccgcgctgccgtacgccgaggacgtcaagtggctcatccgcaaccacctggtggcgctggccgaggccttcccctccctccatcccaaggccgccctcttcacccacaacgacggccgcgccgctcacctcctccaggccgacggcaccatccccatccaccacgccggtgcctcctacaacctccccgccgtcatctggctgcccgagccctacccgcgctccccgccgctcgtcttcctctccccgacccgagacatggtcatcaagccccaccaccgcctcgtcgacagctccggcctcgtcgccaacgcgccctacctccgctcctgggtcttcccctcctccaacctcgtcgacctcgtccgatccctctcgcacctattcggcctcgacccgcccctcttcaccaggaaccctcctgccgccgctcaggctccgccaccgaatccctcgccgacccagcccccaccacgggcgccgcctccccttcccccctcctacagcanggcttgggggtgccgccggttttcccggcgtcggccccagttcgccccccgcccgccccccac

SEQ ID NO: 110816 - DNA, 1322 bp, Zea mays
  Clone ID: MRT4577_32557C.1
cattgggtacctcgaggccggccggccgtttggcggtgctctctgtgccgccatgcagttgccctatctttttcctcaccccggcccgttccatcaccctcacggcaagccctgatcacatcatcctgcttgtctctccccaacctagctccatctctctttcatctactcttccatcgatcgatccatcgtactgcgtgaggatggggaggggaaagattgagatcaagaggatcgagaacaccaccagccgccaggtgaccttctgcaagcgcaggaatgggctgctgaagaaggcctacgagctctccatcctctgcgacgctgagatcgctttgatcgtcttctctacccgaggccgcctatatgaatattccagtaacagcgtaaggtcgacgatcgagaggtacaagaaagcctctgccagcacttctggaacagctccagtgacagatgtcaactctcttcaatactttcagcaagaagcggcaaaactgcgccagcagatacaaaccttgcagaattcaaacaggcacctgatgggtgaatctactggcaatatgactgcaaaggagctaaagggccttgaaagcaggcttgaaagaggcattgggaggatccggtccaaaaagcatgagctgctgctcgcggagatcgaatatatgcagaagagggaagcagatctgcacaatgaaaacatgttcctgcgggccaaggttgcggaggctgagcgagctctggagcaggaggcggcagaagaccagacgatgatggtgccggcggcggtccgcggggctacgacggagctgaaagcgctgccggcgtcgttcgacgcgagtggctactaccagtaccagcagcatcagcatgtggtggccgccgcctccgctgcctcctcgtcgcagtacgcggagcagccccagggccagcaggagtaccaccaccagactgccctccacctcggctaccacgtcaagatcgactccgccgccgacaaaggcttcctctaggcgctcgcgcgcatgcatgcgtgaagcgtctcatctcataatctgacgtacggacgatgggtgccggacagctaacgtaaggcacgttgtcatcgcctgaccatggagtggagtggttgttgctatatgtgcttctatatagagagaaaataaggggtagatccgcgagtacctatgtacgcaagctgtatcaaacaatattgtcatgagatatatagattgactatataaaaaaaaaaaaaaaaaaaaaaaaaaaaaaaaaaaaaaagaaaaaaaaaaaaaaaaaaaaagggcggacgatataaaaagaac

SEQ ID NO: 110817 - DNA, 120 bp, Zea mays
  Clone ID: MRT4577_32558C.1
cccccgccaatcgggaacaacacatgaacctattccaggccccagttaatatgtttaacatacaacccataccgctaaactttttctgccacacctaaccaaccctattatcctgaaaca

SEQ ID NO: 110818 - DNA, 313 bp, Zea mays
  Clone ID: MRT4577_32559C.1
ttggaaccttgggctgatttatgtgcatgtgcatgtgcatgtgtgttatcggtcccctaattaagtctgacgattaaccgcgcgaactaatgggcttcggctcatcaggccgaaccatcactgtggtgtggctactagcagggcaaaatcaattcgctctatgatggctcaaatttagtctatgcctttcaccggcgggcgaataacgtaatatccggcgaacgtcgtcctataacgacaggaagagttggtactaaaggactatccggtgatgtcatcaccaatgtccggtcggtataagttaggcactttc

SEQ ID NO: 110819 - DNA, 822 bp, Zea mays
  Clone ID: MRT4577_3255C.1
cctccaccccaatctccctcccccgccgccgccagctgggagtcggattggcggggaggcgtttccctgagtccaatccgatggcggattccttcgcggggggaatttttgcctgagccaatctgactcgaattcaggaccgccggagaggaggggcatagcaactcgacggcatgtcaaagcggcagctgactcttcagccgtgttgccacacagccaagcggcggcggccgccgccgtcgcagctgcagcagttgcgacagcatgtctatctcgtggtggatgactgggaaagtggatacagcgtccgcaagatagacatcgacgccatgtactctgacgccggcgccgacctggatgacgatgacgaggcggagcccctaccagatccccctgtcgtgcgcttctacggccgccactgccgcctgtcgcactttggcgcgtacggcacgagcatactcgccattctgggccccagcgatgccacccgccccatccccatattcgacacaaaaacgctgggggtcaaactctgctcccttccagacggcagcagtcccaagcccttgttcgcgtctgtaggtggcgagcattactcgatgctgggatcctccgtgtatgtgctcgacgccctgccaccccgcagaactgagcaaggcaagcagtgctcttggaccaaaagtcacaaattggctccgttcatgtccggtgaagttgtgtcctttgcagtgcaccccaacgaccggttgcttttcgtctccaaagcagccagaaccttcgtcctggacacaagtgcctcgcctggatgaccccaggcaactg

SEQ ID NO: 110820 - DNA, 444 bp, Zea mays
  Clone ID: MRT4577_32560C.1
aattaattgcccgcgagctccacacagctcactagtacatccgccgccacttttttttatcacttaattttttttaattcgtctttgtatccccatttttttttatatggcctccaattaccaaaatttcttttcttttatctccatctcattttaccaaaaaaaaaacgcacttaaactccccaaatatctattttttttttaaaaacatacaccaaacactctttatattagaaagctccaaataaactgtttactaaataagatctttccagctctaacctaaaatcccttctccttgctcggaatcgaacatatacccacaactcaaaaaaacaatttccataacctccatatacacaaatcccatttaagatctcattcaagccccaaaacacaacactgaatttatacaacaaatacgcaaacaacacaatcttttcg

SEQ ID NO: 110821 - DNA, 680 bp, Zea mays
  unsure (1)..(680): unsure at all n locations
  Clone ID: MRT4577_32561C.1
ctactgcatacaggacagtgctntnattggtaattggactacatcaaccggggtactactactaccaccagtctactggagccaaagaacagcaggcagcacaagttgcatgtctccagctgagcagcagcgacatggcgagtgcaagaagctggtcgaggctgttcgccgtctcggccttcctttgcctcctggcggtgcaccctgctgccacggtgaggagggaggacatggtcctcggccgtgaccgggcgccggtgccagcggaggcgcccgccacgggcgccgtcggcagcggcaactcgtggacagcgaagccgttcgcgacggccaaggccgtcggcgcggcacagatgagcaagtggagggtccggcggggctcggaccccatacacaacaggagctgacgtgacgcccttcttagcttagctgtaggaggaggatagcaggctggcagaggcaggtggatcaatgtaatgcaatgtactaggagagagattcagttgcactgtgatatagatataggagtaatttctcgtcagacgttatcctgtcttctttggttgcattgcatccgtcgtcactcaggatccgggaaggagctgtttgcgggttggaaggaacgcgaacgtttttatggcaaaaaaaaaaaaaaaaaaaagactagttctagatcgcga

SEQ ID NO: 110822 - DNA, 361 bp, Zea mays
  Clone ID: MRT4577_32562C.1
tctttttgaaacaaggcatttctaagggaggtcttaatagaaaagggcaacgtgcagcacgacacatacacatacaagcacattcgtcccatctgaatcctacgcataacccaatactggtaccagggaactgctaaacatcaaatcaataccgacagtccacatatgccgtcctaggggacaagatggccttcatgggggactgtgtcatcttgcttccaacactggacgccctgtccggcccgttggagagcagcataacagggtcgctattggggaggacaccgtcatgagcgatacacacgccgcccaacacatggccaagatcccggaccctggggaacgtcagaaacacgaaggg

SEQ ID NO: 110823 - DNA, 427 bp, Zea mays
  Clone ID: MRT4577_32563C.1
cgcttcatcgctcgttccctttcgaaagcccgcgcacgcacgtcggtcgtcccgagcaggacctcgatcggccgagatggcgacgccgaacgggcttgcgcggatcgagacgaccgggaagaagaagcaggacaacggcgtgtggtacgacgacagctcggcgccggtgcgcgcgcagaccatcgacgagctgcactcgctgcagcggaagcggtcggcgcccagcacgcccaagcggcggcgcccaccacgccccatcaagggcggcgcccactcgcccttcgccgtcgcgatctccgaggaggagcgccacacgcagcagatgcagtccatcagtgcgtcgttggcgtctctgacgcgtgaaaccgggccgaaagtggtcaagggcgacccggcggcgaagggagaggccgccgcgcagggcgcg

SEQ ID NO: 110824 - DNA, 187 bp, Zea mays
  unsure (1)..(187): unsure at all n locations
  Clone ID: MRT4577_32564C.1
agaaaagcnaggaccccggcgcggtaccgttcctccattaccgcgtccacccacgctttctttttttttcgcatactcaaaaccacgtgctggggctattcaaaacaaggtcggatacatctattaccactatcaaaaccacttcacgacacatatatttaaaacaaccccatatacaaatcatttt

SEQ ID NO: 110825 - DNA, 293 bp, Zea mays
  Clone ID: MRT4577_32565C.1
aggccacatatccaaaatacaaatccttgtctccttcccatagactgcgatctaaggggtctccgacaatggatctatctgtagtgaacactgcactgtgcgacatgtcatagtcaaacataacctcgctgtgcgacgaacgtctgatgaagaccgcgtgccaagcatccaccaccaacgaatggccgtactgtatcaacgtgctagtgcacctttacatctatgacctgaacagtgcgcgatgcttcaggaagacattatcataggaggtcatagacactggttggaaacta

SEQ ID NO: 110826 - DNA, 326 bp, Zea mays
  Clone ID: MRT4577_32566C.1
cagactaaggcaaaggaactcccgctactggctggtgaaagcaagatgtagatgggcgagattctggattacctataccagcagcagcagcgctgaagagctctcattctttagtacttacttatttactttccacagactctacatggcataaatgattcattaatccgttgaaagtgcttgtatgctcctttgccactatctcccaccacttagcaaaggatgcaacattggctttggaggacaagaaaaagtttctcaatccaatgctctctttcagatgtcattagtgaatgggcatatgatagggacatatgtagtgcaat

SEQ ID NO: 110827 - DNA, 878 bp, Zea mays
  Clone ID: MRT4577_32567C.1
ctcgagcggcggatctctatggagagtatatagcgcaagttataaagctgagtaggaggaattcagagtgacctgttccaccaggcgtccaagcaacccggccggctgggtggctcgtcgtcgtagaactccttggtggccgggcgcgcggcgaacgatcgcctatttcagctgctgagcgggcggctgatcggcggcgttcgacggcttgggttacctaccaacgacggaacggaaccggccgggccggcggcatggcggcgtggatgcggtcgctcttgtcgccgctcaggaagctctggatccgaatgcattcggcgcagaacaagaaggggcggggcatctacatcctgtacgaggacgtcaagtcgtgcccctgcgaggacgtgcacatcctctggtccatcctcgtcgactcgtcccactcccacccgccgccgctgtctctgcgcctcaagcactgactgactcgtccctccctccctgcctccgacgaacgagaccgtcggtgtacatgaagatgacgacgagtggcggcagctcaccttcttcttcagccgccgcgataccatatcgcttccacgcgcgggaagaagttccttttgtttgatgagtaggagattgatgagctccttcgttcaccctgccccgcgcgtcctccggtagatgcagccatgcaggtgcatagcagagcagagcagagcaggcttccctcaccgacaccgccaagggattttttttttcttctttcctttgcttttgtttttggaaaaggaacggcgcggttggtgatccgggacatgccgcgtgtgcctctagctaccatgtaaatacagaaaggtgaagagggggcaaaaaaaacagagaggtgtgtgtat

SEQ ID NO: 110828 - DNA, 285 bp, Zea mays
  Clone ID: MRT4577_32568C.1
cctacaccttcctatctctcgaggttctgggagaactacctgctagtgatcgtgttggcctatttgcgggcggcggcgtcgcatccggaccattccattgacaccggaggaacgacaactcacccatcaccaatgatcgggcgctaaaccctcgtctcccggaccctctacacaaacgatattttgcgcgagatttgggctcggctgaccccaaccacccttaagggaccaaaggacgcggcccccgtgatatgagcttactatagcagcactcctgcttttttt

SEQ ID NO: 110829 - DNA, 122 bp, Zea mays
  Clone ID: MRT4577_32569C.1
cacgcgtccgctccctcagacccttaccaaccaggcaaccaaaccttctacgatggccgtgcccgtgtggcaggcgacggtgtgaatgagagcatacactcaaagaatgctaagactgataa

SEQ ID NO: 110830 - DNA, 343 bp, Zea mays
  Clone ID: MRT4577_3256C.1
ggggacgaccacgcgttcagaatatattacattacaccaactgtttacacttaaccctgctgattatttgccgcggcatggtttatgatttatccggataggctctgactactatcatcttcaacaactgcttccatgttaccatatggtcgctctgtaccccgctgcttatatgaagggggtaatactgtctgcgaaaaagccaaattgctaccgtacgcggtgcatccttcttgacacaacaacaggtgttgtcgatctaccaggagcttgcgactataatcacaacccttttaccagtaccactattggcaccctttgtgccacttgatttgggaaaaac

SEQ ID NO: 110831 - DNA, 296 bp, Zea mays
  Clone ID: MRT4577_32570C.1
ttttgatcagggggggggtgcatattgactatgtctagctcgtcgccgtgaacgaccccttcatcagcaccgactacatgacctacatgttcaagtacgacactgtgcacggacagtggaagcaccatgaagtcaaggtgaaggactccaaaacccttctctttggtgagaaggaggttgctgtgtttggctgctagaaccctgaagagatccctgtgggttcgtgtggtgctgaatattttgttgagtctactgtggttttttactgaccttgaaaatgcttgtatctttacttt

SEQ ID NO: 110832 - DNA, 786 bp, Zea mays
  Clone ID: MRT4577_32571C.1
ctccttctccccacgacagcaagcaggggatctcctccctctcccatggctccacacaccctcccctgcagtttcccctgcgacttggcctctccttcgctcgggcgctgagcaggaggtccccatggccggcgtgcgtccctgctcgcgcctccacgatcgtgaacgccgtcggggcatcggctccgagctcctctccggccatcttcctccttctgctcctgctcgcccatggaaccctggtgaccgcgcccctcaccatggacgccatccgagctcccacatgtccgagctcccttattccctgccatggacgcgccctggctcctccactgcttccttcctctccctcgtggagagtttcccctgcatcttcccatggcgctgctacctccatgttggagctcgggcgcccattcacctctgtccgcgcgcccggcacagcgtccctctcccccatccatggcgtccgaccctgtcttctttctcctccccgcttggagctttgccatggcacacgctgacccttcccctccattcctaggcgcagaaagctctcccccacgcagtccagctgtaggccagatccaattcgcccaacccctgctcgcccagagcttctttgccccaaatccggccatccctgccttgccgtggaggcgtggagttccttgagcagccccacctggccgccatcctccccaggtcagcctcccccttttttttgtgtgtgcagctcgccattccctctgtagcagcgcgatggcttcctctgctgccaggggc

SEQ ID NO: 110833 - DNA, 417 bp, Zea mays
  Clone ID: MRT4577_32572C.1
caaagacgcacggactggcgacgcgcccaccatcgcaaaacgcacccaggggcccaccggcgaacacgaggaagcccgcagacgaggcgaggagcagcccaggagcgggggggagacagccgaccagaggaaccccgccccaccaccaagcgcgacggggcgggaaacaacacccgcgaagacgagcacgacgccgcccgggacggcggcagcccgcgaggggacccggcagagaggacgggagagagcggcgccggcaagacgcagccgcaagcagaccccccccaaggccgcgcagcgcaagccgcccagcggccccacaaagacggcagccgacacccccaccgaaggcgggccgagcaccacccgcccgagcccagcaagcacccacccacccggccccagccgccccgcccc

SEQ ID NO: 110834 - DNA, 1418 bp, Zea mays
  Clone ID: MRT4577_32573C.1
ctagaatagcaggtagcgcctggtggccatggccacggcgtctgcagcttgtcatggcgggggcatcgtgtactacaaggtccttccgatgagcatgttcctgctgctgctccgagggctcgtgcagccggtggcggccgcggcgtgctccgtggacgccatctacagcttcggcgactccatcgcggacacgggcaacctcctgcgcgagggccccgttggcttcttcgcctctatcggcagctacccgtacggccagaccctccgcaaacccacaggccggtgctccgacggcctcctcatcatcgactacttcgcgatggcgctgaacctgtcgctggtgagcccgtacctggacaagggcgccgacttcgccagcggcgccaacttcgcggtggccggggccacggcgctggaccgggccgtgttgctgcagagcggcatcatggctccaccggcgagcgtgccgctcagctcccagctcgactggttcaaggcgcacctcaacgccaccgcctgcccctcgctacaagattgcgccaagaagctcgccggagcgctgttcttggtcggcgagatcggagggaacgactacaactacggcttcttacagggcttcagatcgatcgaggccatgaaggcctacgtgccacaggtcataaacgccataatggacgtcgccaaggaagtgatcgagctaggcgcgacccagatcgtgatcccgggaaacttcccgatcgggtgctccccgagctacctctccctcttcgccgcctccggcgacctcgacgaccggggctgcctcaggagctacaacgccttcgcccagcaccacaacgagcagctccaggcggccatcgacggcctgaggaaggccaacaccgacgtcaccgtcgtgtacgcggactactacggcgccttcatgcacctgctggaccatgcttcgctcctcgggttcgagcagggcgcgctcctgcaggcgtgctgcggggcgggcggcgcgtacaacttcaacatgaactcgatgtgcggcgcgccgggcacgacgacgtgcgcggacccggcgcgccgcgtcagctgggacggcatccacctcacgcagcaggcgtacagggccatcgcgctgtcccttctcatggaggggttcgcgcagccggatgacgccgtgcaagagatctggagctgctgacgtgcacccgttttggtttcattgggcctgtacctgctatcgatacgtatatatttttcctctagactagaattttgtacctgctattgatccatgtataggtgtttgcattgttcatatatataataataacgtgggaaattagaaaaaaaaaaaaaaaaaaaaaaaaaaaaaaaaaaaaaaaaaaaaaaaaaaaaaaaaagggcggcagctcgcgatctagaactag

SEQ ID NO: 110835 - DNA, 322 bp, Zea mays
  unsure (1)..(322): unsure at all n locations
  Clone ID: MRT4577_32574C.1
tcttcgcttctaatccgctgggccaccagctttgatcgccgcctcccttcccctccgctactgctcctccccaccccactcccccgcaggagcggtggcggtggnggcggcggcggngaggccgtaccccagatcggcgagcggcggnggcaccgccggaggcaaaggtaagatgttcgggcgcgcgccgaagaagagggaccaccccaagtactacgagacactcggggtgtccaagtcggtgccccaggacgatctccagaaggactaccgccaggctgctatctagaaccaccccgacacgggcggtgacccccgacaa

SEQ ID NO: 110836 - DNA, 339 bp, Zea mays
  Clone ID: MRT4577_32575C.1
actgggccaccagctatgaccgccgcctccattcccctgcgctactgcttctccccactcacactcccccgcaggagcggcggcggcggtggcgaggtcgtaccccacatcggcgagcgggggaggaaccgccggaggcaaaggcatgatgttcggccgcgcgccgaacaaaagcgacaacaccaagtactacgagatccttggggtgcccaagggggcgtcccatgacgatctgaaaaaggcctaccgaaaggctgctatcaagaacaacccagacaggggcggtgaccccgagaagttcaaggagctcgcacaagcctatgaggttttgagtgatcc

SEQ ID NO: 110837 - DNA, 746 bp, Zea mays
  Clone ID: MRT4577_32576C.1
cggccgggctcttctcttctactccgctgggccaccagctttgaccgccgcctcccttcccctccgctactgctcctccccaccccactcccccgcaggagcggcggcggcggcggcgaggtcgtaccccacatcggcgagcggcggcggcaccgccggaggcaaaggcaagatgttcgggcgcgcgccgaagaagagcgacaacaccaagtactacgagatcctcggggtgcccaagtcggcgtcccaggacgatctcaagaaggcctaccgcaaggctgctatcaagaaccaccccgacaagggcggtgaccccgagaagttcaaggagctcgcacaagcctatgaggttttgagtgatccagagaaacgtgagatttatgatcagtatggtgaagatgcccttaaggaaggaatgggcggtggaggatcccatgttgatccatttgacatcttctcatcattttttggaccctcttttggaggaggcggcggaagcagcaggggaagaaggcataggaggggagaagatgtagttcacccacttaaagtttctctggaagatctttacaatggcacctcaaagaagctctctctttggcgcaatgtcatctgctcccagagcaagggcaagggctcgaaggtctggtgcctcaatgaagagccctggttgccagggctcacgcatgaaagtcactattcgacagctgggccttccctgctacagcagatgcaaccgcccttgc

SEQ ID NO: 110838 - DNA, 2676 bp, Zea mays
  Clone ID: MRT4577_32577C.1
cctcgccgggcgggacacagccgccgctgtttcttcatcttactcgtgctcggcacgcaggcgacggcgacggcggcggcgttcaggctcgggctctcagcgacggtatcagtggtctcccgcctctcgccagtcgcgtcgcgccctcgcctccggtcctctgcacaccgtccggtgaccttgtgttgtaagtttttccagcactgcttgctcacccatttctcaattagaaaacctcaaattctgtccctgagcaccaaatcaagaccataccaatttagtgagtccggacagatggcaatggccgcagttctggccaatggtgattcacagggtcgtcctcagaggaactatcaagttgttgttgctggcactcgtgacatgggcattgggaaggatggggtcttgccatggaagcttcctggtgatcttaaattctttaaagagcttacactaactacatctgatcctgtcaaaaagaatgcagttataatgggaaggaaaacatgggagagcattccggttaagtcaaggccattgcctggtcgtttgaatgtcatacttactcgatctggtagttttgattttgcaacagtagagaatgttgttatctgtggaagtatggagtctgccttagaactgctagcatcaactccatattgcttatcaattgagaaagtgtttgttataggaggcgggcaggtactgagagaatatcttaaaggacctgcatgtgaggctatccatctaactgacattcagtcgagcattgagtgtgacactttcatccctccggttgacttctcagtgttccagccatggtattcatctttcccggtgatagagagcaacattaggcattcgtttgtgtcttttgttcgtgttagaaagtcagtggcagaaactcatgagtcaaatggcaaggaatcaaccgaggttgataccaagaatgacaaatttgaaacagagaatttctcttttctccccaagatggtatatgaccgccatgaggagtaccaatatctcaatcttgttgaagatattataaggtctggtgctcagaaaaacgacaggacaggaactggaacattgtcaaaatttgggtgtcagatgcggttcaacttaaggaaaaattttcctctgctgacaacaaagagggtattttggcgtggtgttgtcgaagaactcctttggttcatcagtggctcaacaaatgcaaaggttttgcaagagaagggtattcatatctgggatggcaatgcttcaagagagtatctcaacagtgttggcttggcacacagggaggaaggtgatttaggtccaatttatggatttcagtggcgtcactttggtgctgaatacactgacatgcatgctgactatacgggaaaaggttttgatcagctaatggatgtgattgacaagatcaagaatgatcctgacgaccgtcgaataattttgtcggcgtggaatccttcagatctcaagaagatggctcttcctccttgccacatgtttgcacaattctatgtggaaaatggggagctatcttgccagatgtatcaacgctctgcagacatggggcttggtgttccattcaacatcgcatcatattctctcctgacatacatgattgctcaagtttgtgatctttctcctggagattttgtccatgttataggggatgcccatgtctatagaaaccatgttcgagcactggaggagcaaattcagaagatgcctaaaccatttccaattttgaagataaatccttcaaaaaaggatatagattcttttatggcatcagacttcaagctggttggctatgatccccaccagaagatagagatgaaaatggcagtgtaatggtggcttggctggagcccccatcctatggactcggtggatgtaatcagtaggactggtactacataaaaattaaccggacaccgcactagcttgtttttggtgatggtgctgaatgttcagtgggagacgttttctctgatttatcagttgcgatttgcgtactatggtcgcttaagtcaactctacaaaatcggctcccttttatctggagccagttgattactcgattgcgagtgtgagggatgatctaggcataccctgttgcaagggcctactgggtgtgtgccggcccccatgaggctgtgacgattgcgccagtccagtacctcgtgagaattatgtaaccgaagttgccgtgtacctgggagaactcccgtactgtttggtgtttgattgcctatttcactttgcagtttggtcacaagataacgacttgctggtagggttttgagaacacattctgttgcgtttttcttgtgctttctggggggcagaaagcctagcgccgtgcttgccgaagtcgggctagcgcttgcacttgcagcggcggtgtacgatttggttggagcgtgaagtctcaagtgatcctgcaactgtcctgtcagttaaactcaaagatgttggaaattgtagtacgatgcgacccctgcgagttttgtagagttgaccctctttcatttcattgtttttttaattcaaatcaagtttcattaggcctggattccaaagccaataaatgattaaagattaaaaatctgttacagatagttgaagagcaataattctgtacaaaaaaaaagggcggcc

SEQ ID NO: 110839 - DNA, 650 bp, Zea mays
  unsure (1)..(650): unsure at all n locations
  Clone ID: MRT4577_32578C.1
cattgggtacctcgaggccggccgggctcttcgcttctaactccgctgggccaccagctttgaccgacgcctcccttcccctccgctactgctcctccccaccccactcccccgcatgagcgtcggcggcggcggcgaggtcgtaccccacatcggcgagcggcggcgtaaccgccggaggcaaaggcaagatgttcgggcgcgcgccgaacaacagcgaccacaccaagtactaccagatcctcgctgtgcccaagtcggcgtcccaggacgatctcaacaaggcctaccgcgaggctgctatcaagaaccaccccgacaagggcggcgactccgagaagttcaaggagctcgcacaagcctatgaggttttgagtgatccagagaaacgtgagatttatgatcagtatgcgtgaagatgcccttaaggaaggaatgggcgctggaggatcccatgttgatccatttgacatcttctcatcattttttggaccctncttttggaggaggtggtggaagcagcaggggaagaaggcaaaggaggggagaaagatgtagttcacccacttanagttcctctgggagatctttacnatgccacctcaaagaagctctctctttcgcgcaatgtcatctgctccaagtgcaag

SEQ ID NO: 110840 - DNA, 146 bp, Zea mays
  unsure (1)..(146): unsure at all n locations
  Clone ID: MRT4577_32579C.1
caaaatnaaaaaatcacaggtccccattggtgggtaagcacatatcattggccccagggtaaggggattcccaataaatggctttattatgaagtacaagagaccctttctttgctgggaacccccaaacacagagcaattcccac

SEQ ID NO: 110841 - DNA, 387 bp, Zea mays
  Clone ID: MRT4577_3257C.1
actgcagacatatatccttttaaattcacattacagtccacttgtattgactaagaaattagcgcaagccctacagcttcattacaaacccaggggcaagtatgccatgggacataaggtttagatgaacgtcctgttttttcaagtacatgaactaatgcaatagtcaataagctatcccacatttgcctaatgcactactgagctttagttgagctttcacctgatcgccagttaatagcttaatactgaccttattgattcagagagtaacgcacgctgtttatgcatatttccagatttagaacatcgctcaaccgaagaaaagttttgctgggaattctgtggaacaactggcttatatgcgcgcttcctctgaatctcaag

SEQ ID NO: 110842 - DNA, 590 bp, Zea mays
  Clone ID: MRT4577_32580C.1
gatgttaatcctgttgttttattttattggtttttgaaaaaaagctgcgggcaatactacatgatcgagcaattaccggctcttatcccacggccattaccaacttctagaaacaaacaacaaggatgctaatgggtcacatactacaacgaagcgaatactcctgtgctcgacagagacatcatgtcgccggcgccgggcccgaaagctcacgcaagccccacgagcttttatgctgatctcccaaagctgcttggccttgtccgaatcgctgacctaatgcgacagctgggtatccaacgaccccaagatccttggttcatctccaaaacacacccaactagccgaggctgtgggcgctgaccacctgcgccagcctcttgcctgactgcctctccgacacaaacccctaggtgactaactacttgaacggcgggaatagcaggcggaccagcggcatgtgctcgccgaacaatcccgtgacggcgattcaccccggacagagcgactctaacgtgatgcccgtttcctcttggtaccgtcggtgcagctgctgcatggtgagcaagatgcagatcctgctacacttg

SEQ ID NO: 110843 - DNA, 806 bp, Zea mays
  unsure (1)..(806): unsure at all n locations
  Clone ID: MRT4577_32581C.1
agccgccgctgtttcttcatcttactcgtgctcggcacgcaggcgacggcgacggcggcggcgttcaggctcgggctctcagcgacggtatcagcggtctcccgcctctcgccagtcgcgtcgcgccctcgcctccggtcctctgcacaccgtccggtgaccttgtgtgcgtgcctccctctcctcccgcctccagtggatcgtcgacggtaacctgccccggcggctgcgccgcgccgccgtgcgcggcctgcgggcagcgggagcctgcagctgctgctccaccaaggcggttgcgtcgctttgggagtgcttataccccaaatcgaagcgttacccgtccgtgcttcagtgcgctgaagcgtacgcttcgtgccgcgttttggaaccctgatatctgcatacagttatattgtattgaacactgggacatcctggggcatttgtttttttcaattatgattatatttctgtatatttttaacggttaaccaaactgctagcttatataatgctccttcaacttcaggttgtaagtttttccagcactgcttgctcacccatttctcaattagaaaacctcaaattctgtccctgagcaccaaatcaagaccataccaatttagtgagtccggacagatggcaatggccgcagttctggccaatggtgattcacaggggtcgtcctcagaggaactatcaagttgttgttgctggcactcgtgacatgggcattgngaaggatggggtcttgccatggaaagcttctggtgatcttaaattctttaaagagcttacactaacta

SEQ ID NO: 110844 - DNA, 484 bp, Zea mays
  Clone ID: MRT4577_32582C.1
ttcactcgtccgctccgctgggccaccagctttgaccgccgcctcccttcccctccgctactgctcctccccaccccactcccccgcaggagcggcggcggcggcggcggcggcgaggtcggaccccacatcggcgagcggccggcgaaccgccagaggcaaaggcacgatgttcgggcgcgcgccgaagaagagcgacaccaccaagttctacgagatcctcggggtgcccaagtcggcgtcccaggacgatctcaggaaggcctaccgcagggctgctatcaagaaccaccccgacaagggcggtgaccccgagaagttcaaggagctcgcacaagcctatgaggttttgagtgatccaaagaaacgtgagatttatgatcagcctggggaggatgcccttaaggaaggaatgggcggtggaggaacccatgttgatccctttgacatattctcatgatttttagggccctttttggaggag

SEQ ID NO: 110845 - DNA, 697 bp, Zea mays
  Clone ID: MRT4577_32583C.1
tgcaggcggtcgatggcggtcgttccacctaacttatcgtttatcgtgcgcgcctctagatttctgctctctctgttcctccgtgtccgcctccgtctgatccatccaagacaggaatcggcatggcggactcggaggagcaccacttccaatcgaaggccgacgctgagaagtacaggacctacccgcatgagggtggtaccgaccgaaataacggattcatcgtaatccagaaccgtccctgcaaggctgtggaggcttctacctccaagactgataagcatgcccacgccaaatgccactttgtcgccgtatacatattccatgggaaaaagcttgaaaatattgttgcttcatctcaccactgtcgacattccgcatgagaaccgtaatgaccatcacgtgattgatatttctgaggatggatttgtgagtcttcttagttcatatggcaacactaaagatgatcttaaactcccaactgatgagactcttgcggcccatattaatgaagggtatcgaaagcgcgaaggatcttgttgtgactgtccagactgcaatgagagaggagcaaatgtgcgcgctgaatgatgctggaccccagtaacttccttggctttgtacacggaaccctactctatctcaacttatatcggaaaagaaccgcatcaccaaaggattgctaccgagacattct

SEQ ID NO: 110846 - DNA, 404 bp, Zea mays
  Clone ID: MRT4577_32584C.1
agaacgtgagattttgagcagttggtgaagagcccttaaggaaggaatgggcggtggaggatcccatgttgatccatttgacatcttctcatcattttttgggaccctcttttggaggaggtggtggaagcagcaaggcgaagcaaggcaataggagggggagaagatgtacttcacccacttaaaggttctctggaagatctttacaatggcacctaaaagaagctctctgtttcgcgcaatgtcatctgctccaagtgcaagggcaagggctcgaagtctggtgcctgaatgaggtgccctggttgccagggctgatgcatgaaagtcacctattcgtgagctgggcccttgcatgatacagaagatgcaggaagctgtcaatgagtgcaaggggactggag

SEQ ID NO: 110847 - DNA, 712 bp, Zea mays
  Clone ID: MRT4577_32585C.1
gccgcgcggctcaacttccccgaccagctcgacggcgcgcaggcggcggcggcggcagcggacagcccggagggggcgcgcagggacggggccgggctcacggccgccgccatccgcaagaaggcggccgaggtcggggcccgcgtcgacgcgctccactgcggcgccggcgccggcgcctctccgctgctgctgtcccaccgccgccgccccaagaaccccgacctcaaccgggagcccaccccggacacctcggacgacgagtaaagcggggctagtttttgtcgccgttcttcttcttcctcggtctaccagtccctacgccctacctagataggtgtagcagatagagcaagcaaagcaaccaggtggacccaggacagacggagacggaggggcgcgggcagtcgcggtcgcagcgcaaggtgttcgatgggctgcggatgagctccatccaataatggagttgcgacgtcgacgtcagggccggaagcctagcgtgcgagctctcccggtctcccgtagcagggtgacagacgggtgcgggactgcgggcgggcgggcgggcatgtagctcaagcaagacggctatgtatctctcagctttggcataaagacgtgtaaaggaaaaaaatatatatatactccccggcaagcaagatgtgttttttcaaaaaaagttagattttgattttttttttttttttaaata

SEQ ID NO: 110848 - DNA, 384 bp, Zea mays
  unsure (1)..(384): unsure at all n locations
  Clone ID: MRT4577_32586C.1
aaancccggggcggaccacacccttccggggacccttgggttgggacgtaaacgcgcataaggccgccgccgccccgccgggtggttggccgacaccgcccggcgggaggccaaaatgccgttaaagaggttcggggggatcggccaaggggcctttgtaaactacggcagggggtttggccgcttggtcgtaatcgtcgacgtcgtcgaccagaacagggtttttgttgttgcccccgccttggttggttgccaaatgaacttaaagcggttttccttgcctgccataaagattgacattaaacttgtccaaaagaagactccattgttcaaggcattggtggaagcttttttgaaaagcaagtgggagattagtttatgggg

SEQ ID NO: 110849 - DNA, 484 bp, Zea mays
  Clone ID: MRT4577_32587C.1
ctttccgcttcagctccgctgggccaccagttttgaccgccgcctcccttcccctccgctactgctcctccccaccccactcccccgcaggagcggcggcggcggcggcggcggcgaggccgcaccccacatcggcgagcggcggcggcaccgccggaggcaaaggcaagatgttcgggcgcgcgccgaagaagagcgacaacaccaagtactacgagatcctcggggtgcccaagtcggcgtcccaggacgatctcaagaaggcctaccgcaaggctgctatcaagaaccaccccgacaagggcggtgaccccgagaagttcaaggagttcttttttttctatgacgccccgagcgatccagagaaacgcgggatttatgatcagcacggtgaagatgcccttaacgaaggaacgcgcgccggaggatcccatgttgatccatttgacatcttctcatcattttttgcaccctcttttggagg

SEQ ID NO: 110850 - DNA, 257 bp, Zea mays
  Clone ID: MRT4577_32588C.1
cggggccgaccgacgcgtacgatctaattttctctgctgtgatgatttattttttgccatggaggataaagccgtagtgcggcattttttatacggtcttctggtgtctatatgctactgagttgtttattttttattgtcgcatattttgtggttgttgtttggttattctgttaatcatctcatttcaggcttttgttattaaatatttttctattgtaagtatgttaactttctatgaagtcacatgctggatt

SEQ ID NO: 110851 - DNA, 721 bp, Zea mays
  Clone ID: MRT4577_32589C.1
cgggctcttcgcttctaactccgctgggccaccagctttgaccgccgcctcccttcccctccgctactgctcctccccaccccactcccccgcaggagcggcggcggcggcggcgaggtcgtaccccacatcggcgagcggcggcggcaccgccggaggcaaaggcaagatgttcgggcgcgcgccgaagaagagcgacaacaccaagtactacgagatcctcggggtgcccaagtcggcgtcccaggacgatctcaagaaggcctaccgcaaggctgctatcaagaaccaccccgacaagggcggtgaccccgagaagttcaaggagctcgcacaagcctatgaggttttgagtgatccagagaaacgtgagatttatgatcagtatggtgaagatgcccttaaggaaggaatgggcggtggaggatcccatgttgatccatttgacatcttctcatcattttttggaccctcttttggaggaggtggtggaagcagcaggggaagaaggcaaaggaggggagaagatgtagctcacctacttaaagctttctctggaagatctttacaatggcacctgaaagaagctctctctttcgcgcaatgccatttgctccaagtgccagggctagggcgctcgaagcctggtgcctctatgaggggcccctggttgcccgggcctcaggcctggttggcactgttcggcgtctgggccccttcc

SEQ ID NO: 110852 - DNA, 1459 bp, Zea mays
  Clone ID: MRT4577_3258C.1
ctgggacctgcccgacctagagcacgacgccatgccgcccatctccgcggcttcccccgcggcggcgtcgggcattgccgccgtagctgccgcgccttcccccacgacggcgcgagccgggcggagtgctccgtcgacctcaagctcagcgggctaggcgagttcggggcggcagacgacacgcctcgacagccgcgcggtcgctgcgcctgatgcccaccccttccgagatcggcaccgccacccggcccccatcctccgactcactcagttgtcgcgcattctgccgcaacatgatccctctgcgcgccacgcaatgccggccggccagccgcacgcgcacgaggttgtcgacgacggcgccgcgaacctctcgtcctctccaactgtcgacaaccggcccatttgccatagctgttccccgcgaaggtgctggccctcggaaaggtcttcgaggacaacaagttcgagcatgacgcactcctcggctccttgtcaaccgcgttctcgacatcctccaggacctgcacggcccccacctgcgcgaattcgtgcaggagtgctacgagctctcgtcgaagtacaagaatgaccaatatcaggctcggcttggttgaagttgaagaacaacctgaaatatcagaggcatatgaagttacaatgtttccatattttgttttctgcaagagtcaaatttggtctaacgattcagaagtgaaagctgctaaccggagttgtacaactgagaataattccaggggtgttgcgtatcctagccatgctctggatatggttcccataagaacacttcagtgaaatttgctgcataaatcagatgagttgatccattaaaaaggcaaaaaactgcattgatgctacttagccttcagtgcacattgggttaaagatttctcctatggcgggaggtgcttcaaccccgacaccgtccacgaccacgcgtcctacgccttcaacagctacccgcctcaaccagctgcgacttccgtggtacggccaccatcaccaattgtaggaggaataggcttacgcggacgcatcgacgcttgtagtaaagctggagcaaaaggtggcaactatttggtggttgcaccaatgcttcaagtcaattgtttcaatgtatgaagacaggttcaagttatatgttctatgcaacaaaaaatgtgaaaacagacgacaatcaagctgggaggaaaattggtggaggattgcatttggcaagcctaatgtgcctactcctaattatgttaacatcagtttattttcccttccaacaagaagtatgaaggaattaagagctttgattgtatgaatgcttcttttgattttacttgtaagaaagaacaacatcttttttctgaataactgaaatttgctattagatccttttgttactttattgggtggactttgatgcccattgaaacttgcatatttccat

SEQ ID NO: 110853 - DNA, 761 bp, Zea mays
  unsure (1)..(761): unsure at all n locations
  Clone ID: MRT4577_32590C.1
gccgggctcttcgcttcaactccgctgggccaccagctttgaccgccgcctcccttcccctccgctactgctcctccccaccccactcccccgcaggagcggcggcgacggcggcggcggcggcgaggtcgtaccccacatcggcgagcggcggcggcaccgccggaggcaaaggcaagatgttcgggcgcgcgccgaagaagagcgacaacaccaagtactacgagatcctcggggtgcccaagtcggcgtcccaggacgatctcaagaaggcctaccgcaaggctgctatcaagaaccaccccgacaagggcggtgaccccgagaagttcaaggagctcgcacaagcctatgaggttttgagtgatccagagaaacgtgagatttatgatcagtatggtgaagatgcccttaaggaaggaatgggcggtggaggatcccatgttgatccatttgacatcttctcatcattttttggaccctcttttggaggaggtggtggaagcagcaggggaagaaggcaaaggaggggagaagatgtagttcacccacttaaagtttctctggaagatctttacaatggcacctcaaagaagctctctctttcgcgcaatgtcatctgctcccagtgcaagggcaagggctcgaagtctggtgctttcatgaggtgccctggttgccanggctcagggatgaaagtcactattcgtcagctggccccttccatgataccgcagatggcagcaccttgcaatgagtgc

SEQ ID NO: 110854 - DNA, 412 bp, Zea mays
  Clone ID: MRT4577_32591C.1
gtacgggtgtagtttttcttttgtaagaaccttccttttttttttttttttttttgcatggtgtgaattaagatcaaacgaatccgagcccttccaaaccctaagctcgcctcccctcccccccaaacaccaccgcgcacctatggcgaagtacggcgagggcgacaagcggtggatcgtggaggagcgcgccgacggcaccaacgtccacaactggcactgggcggaccgcgcctgcctgaatgggcccgggccgcggtttttttcctggttggggggcttaacattcttgaccgggagggggggcttaggtttcggaacggcgcgcttgaaaaggttggtggggagggctacctcaaccttcggaagggccagggcattccggggtaccaggttttgcttacccttttct

SEQ ID NO: 110855 - DNA, 1824 bp, Zea mays
  Clone ID: MRT4577_32592C.1
ggcttttgttgccaccgagcattactgttcaagaccctggcggattccatcaatctgccctgtcgcattgtgaagggatgcaagtactgcaaagctggtgctggcacttcttgcttggtgcgctttggtcatgacagggaatgcctaattgatttaattgggaacccgggattcttatctgaacctgactccctcttgaatggactatcatccatctctgtttcttcaccattgcgcccaccaaaacatgactcagctgatatttctgataatttcaagttgtttgccaagaaatatttccttgattgtcagtcgttaaatctcatgttcagtgatccagcagctggaacggttatcgacttagatgaggctatgggatcaaatctaggtctaaactcatcacatgcaacaaacagtgattgtcaagctacctttactcatcttaaggctggtactcgacgcagtagtcaagatgggagttttataatgcagaggagttccccagaggatactcaatctggactaagtgatccctttagcgatatgtcccttgagatagaagacttgattatcccatggagtgagcttgttctgaaagagaaaattggtgcaggttcttttggtactgtgcaccgtgcggattggaatggttcggatgtcgcagtaaaaattctaatggagcaggacttccatccagagcgtctcaaagaatttttgagagaggttgcaattatgagaagtttgcgacatccgaacattgttcttcttatgggtgctgtcactcagccacctaacctttcaattgtgactgaatacctatcaagaggtagcttatacagacttttacacaggcatgctgcaagggaaaatctggaggagcgccgccgcttgagtatggctttcgacgtggcaaaagggatgaactatcttcataagcgtaatcctccaatagtccaccgggatcttaagtcaccaaacctgttggttgacaaaaagtacactgtgaaagtctgtgactttggtctctccagattgaaggcaaacacatttctgtcttccaagactgcagcagggactcctgagtggatggcaccagaagttctacgagacgagccctcaaatgagaagtctgatgtttacagcttcggtgtaatcttatgggagcttatgacattgcagcagccatggagtaatttaaatccagctcaggtcgttgcagcggttggtttcaagggacaaaggcttgagatcccaagcagcgttgatccgaaagtggcggcagtaatcgagtcctgctgggtcagggagccctggagacgaccctcttttgccagtatcatggaatccctgaaacttctcatcaagacattaccacccaatcagctcctcgaagaaaattagttaccacccaagcaacttgcaaattatgtcacctctagagttttctcgatttgtttagatccgatatgcgccaggcctctcaaaccattcgtcttcggcgccacgtattccctgatgagaaatattcaaaactacacctgtcacaaaaggggaaaaactatggttggacaataagattcatgaaaaaaatatgtgatccaaattaagtgtacatctcttttatcaaggaaccaaatgtaagttggtcaaatatatacatataagtactaatatttatggaatatatacttttacaataaaattattaaagatatacaatatagagcttgaaccatacaaaccctaactgataatgagtaaccataacatatgtatatgtactccattcgttaccaacaataaggtgtcttacatatcaagtaa

SEQ ID NO: 110856 - DNA, 974 bp, Zea mays
  Clone ID: MRT4577_32593C.1
ctcgaggccggccgggccgggactcttcgagagtgcgagctagttgtagatcggcgaggccgtctccgttcgcacaagccagacctcttcgcgccggcaatggacaggctcggcgcgaatccggcgaactcgtgcccgctgacgccgcttggcttcctggagcgctcggccaccgtcttcggcgattgccactccgtcgtgtaccacgacacggtcttcacctggtcccagacacaccggcgatgcctccgcctcgcctccgcgctcgtctctctcggcatcaaccgcggcgacatcgtgtccgtgctgttgcccaacgtgccggccatgtacgagatgcagttcggagtgcccatgagcggcgccgtgctcaacaacatcaacatgcgcctggacgcgcgcacggtcgccgtcctgctccgccactccggctccaagctcgtcttcgtggacccggcgtctctaacgcttatcagagacgcgctgaagcagctcccgcaggggcacccggcaccgcgcgtcatccccgtcgaggatccccacgagaaggggctccctgccgccccgcccgggtcactgacgtacgaggggcttctcgagaagggcgacccggagttcgcgtgggttcggccggccagcgagtgggacccgatggtactcaactacacctccggcacgacgtcggagcccaagggggtggtgcactgccaccgcgggatcttcttgatcacgctcgactcgctcatcgaatgggccgtcccgccgcagccgacgtacctgtggacgctgcccatgttccacgccaacggctggagcttcccatgggggatggccgtggtgggcgggaccaacgtctgcctgcgccgcgttgacgccgccgaggtgtacgccaccatcgcgggccgcggcgtcagccacctctgcggcgcgcccgtcgtgctcaacatgctggccaacgccccggagggcgtgcg

SEQ ID NO: 110857 - DNA, 184 bp, Zea mays
  Clone ID: MRT4577_32594C.1
tcgtgcgacgacgccttccacagacaacgcgatctttcgcctgtgtcctgctgtccatctttttcatcgggcatgtcgtcaacgaagtgtcaaccggcatccattcgaaatcgtacggccccgacgactcctccgacatcaccaaatcctgcacttccacctacggcaagacagacaactccat

SEQ ID NO: 110858 - DNA, 196 bp, Zea mays
  Clone ID: MRT4577_32595C.1
accacgcgtacgaccacgcgtacgctgagactgtggaacttcagattggtctgaagaattgtgatccacagaaggacaagcgtttcagtggctctgttaagttgtcggatatacgttgttccaagatgaatgtgtgcatacttggtgatgcccaggatgttgaagaggacgtgaagaggggacttgactacatgga

SEQ ID NO: 110859 - DNA, 291 bp, Zea mays
  Clone ID: MRT4577_32596C.1
aggcacgcgtatctgagctcgtagttcgggtcgagcctataccggcaatgcagctgttaatagatgcccatattttaataggagggaaatgacaatgtactagacatttctgcttggcatgcctgcaggccatgattatctgcttggacaaagcctttctgaaacgcagcgtacactgaatcttgatgatgttatgatacgagctatgatgggggctcttgattggagcttccggcatgtgatgacgggatgtcatgtatgcatggaggtactcaactgtgtttaatactc

SEQ ID NO: 110860 - DNA, 390 bp, Zea mays
  unsure (1)..(390): unsure at all n locations
  Clone ID: MRT4577_32597C.1
agaaanggggggaccgacgcctcctcccgacttccgacctaatattaactcattttcatgctccgcccacctctctagtagccgacgagccattcatggtggaacaaactgataaggctattctcaatcatcctaacctgttcctcaactcacaaaaaactggcatgggtaataaaccacgcattgatgacgatcaatctttcaagaacatcttccatcgtttcatgactcccgctgttgcaattgaagaatcctacattgtcaacaaatgtccattctctgcaacaatttctatcagatgcaaacatattgctaagacatcctacaccactaatattaacagaaccatcattgttcgcacgaactatcttcactttttttaaaaatacc

SEQ ID NO: 110861 - DNA, 205 bp, Zea mays
  Clone ID: MRT4577_32598C.1
atctttctttccattgtttacatttgcgttagtgcttatgctggagtagtctttttgaaggaaattgtgtcatcactacagtaaacggaacaacgtccgacggccaaaaccgtcggacataaggattaaaaaaaaaaaaaaaaaaaaaaaaaaaacaaaaaaaaaaaaagaaaaaaaaaaaaataaacagaaaaaaaattgagaa

SEQ ID NO: 110862 - DNA, 161 bp, Zea mays
  unsure (1)..(161): unsure at all n locations
  Clone ID: MRT4577_32599C.1
acccagcgtncggacacactaaagaccgccggttcaaacttggacgcgaacagaccaaaggtgcgggggtcatattaaaacgggactaagcacaaaacaccaaccgcctataaaagaataaaaccagagacgctctggaaaaaaaacattggccgaatatg

SEQ ID NO: 110863 - DNA, 368 bp, Zea mays
  Clone ID: MRT4577_3259C.1
aacgggtccgaaatccccgggcggaccacacccgtccgaacccccccgcttgggcgaattcaattcgccataaacccaagggaattgggaagcccggttaggttccttgtggttagggggcgccaaaagcaaaaaccttgaagaaggttaataaagaacaagaacccaacccaatcaaaaaacggaaggcaacgccaagggttggtcttcgccccggaacccggaaaaaatctgtcctgtttcgttggttcgccccgggccgcctgttgggggtccctttaattttctctggtcagacttttgtttgttttttttaatatctctttatttatatatttaattcatgtttttggttttttttatttttt

SEQ ID NO: 110864 - DNA, 1931 bp, Zea mays
  Clone ID: MRT4577_325C.1
ggcaccaacaacgtcactcaacacagcacaggcagcttgagagagacagagagagatagggagggggtgggtcgggcaccgtctccacaaccaggcgggtcccccggagccggtccccaacccggcgtgagggagcgtatgtcgagccacagagaaccactgcgtgtccaggggggaaacgcgtgctgggagctgtactgcctcgagcatggggggggggggatggtcagatgcccggggacaagaccattgggggaggtgatgatgctttcaacaccttcttcagtgagactggcgctggaaagcacgtgccccgtgctgtttttgttgaccttgagcccactgtcatcgatgaggtgaggactggcacctatcgccagctcttccatcctgagcagctcatcagtggcaaggaggatgcagccaacaacttcgctcgtggtcactacaccagtaagtgatctgatcggatcgtcagttggtattgatcccagatattcaatctgtaatgaaaaccatacttaaacttgatttgcttgtcttgcagttggcaaggagattgttgacctgtgccttgaccgcatcaggaagcttgcagataattgcactggtctccagggcttcctcgtcttcaacgctgttggtggaggaacgggctctgggcttggttctctcctcctggagcgcctgtctgttgactatggcaagaagtccaagctcggtttcaccgtgtacccatccccccaggtgtccacatccgtggttgagccatacaacagtgtcctgtccacccactctctcctcgagcacactgatgttgctgtcctgctcgacaatgaggccatctatgacatctgccgccgctcccttgacattgagcgcccaacctacaccaacctcaacaggcttgtgtcccaggtcatctcatccctgactgcttccctgaggttcgatggtgctctgaacgttgatgtgaacgagttccagaccaacctggtgccctaccctaggatccacttcatgctttcgtcctacgctccagtcatttctgctgagaaggcctaccacgagcagctgtctgtggccgagatcaccaacagcgccttcgagccatcctccatgatggccaagtgcgatccccgccatggtaagtacatggcctgctgcctcatgtaccgtggtgatgtggtccccaaggatgtgaatgctgctgtggccaccatcaagaccaagcgcaccatccagtttgtggactggtgcccaactggctttaagtgcggcattaactaccagcctccaagtgtggtgcctggtggtgacctggccaaggtgcagcgcgctgtgtgcatgatctccaactccaccagtgttgtggaggtgttctcccgcatcgaccacaagttcgacctcatgtacgccaagcgtgccttcgtgcactggtatgtcggtgagggtatggaggagggcgagttctctgaggcccgtgaggatctggcagcgctcgagaaggactacgaggaggttggtgctgagtttgatgagggcgaggaaggtgatgatggtgatgagtactagaagtatcctgatgcggtcatcgtcaggcttgtgtgctgctcttgtccccggtgtggtttgcaacacctgatgttgtaagactttctggttatgtccgccccgctttgccactgggttattaagaacgtcgttatggaaaaaaaaaaaaaaaaaaaaaaaatttttttataaaaaaaaaaaaaaaaaaaaaaaaaaaaaaaaaaaaaaaaaaaaaaaaaaaaaaataaaaaaaaaaaaaaataaaataaaaaaaaaaaaggttttttgggtttttccccctttttagggggaatttttggaaatttttttaaaattggggggggtttataaagatattaaaggggcccaaattccct

SEQ ID NO: 110865 - DNA, 945 bp, Zea mays
  Clone ID: MRT4577_32600C.1
attgggtacctcgaggccggccgggaagctgagcacaagtgatcgaacaagtacagtacatacactctatcgatctctgtgaattaatttagttattaactcgatcatggcgcggccccagaacaaccagaaccccagggtgttcctggtcctcaacatcggcggcgtgacggttggccgcgtcgtcatcgagctgttcgccgacaaggtgcccaagacggcggagaacttccggctgctgtgcaccggagagcgcggcgtgggaaagtggtccggcaagcgcctgcactacaagggcgcggcgttccaccgcgtggtgcccgggttcatgtgccagggcggcgacatcacggcgggcaacggcacgggcggcgagtccgcgatcggtgacgcccggtacttcgccgacgaggcgttcggagccgtccggcacgatggcgccggcgtggtgtccatggccaacgccgggcccaacaccaacggatctcagttcttcatcaccttcgccgacgcgtcgtggctggacggccgccacgtcgcgttcggccgcgtcgtggatggcatggacgctctgcgtgctatcgaaaaggccgggtccatcagtggcaggactatgaggcatgtcgtcatcgccgactgcggcgagctcaagcactaagctgccatgtcctaattattcacgatcatacttactctctaccaaatctgacactatctagtacgtatacgtatacttatatattattatgattgttgtttgttgctgctgctgttacaagatgcgtttgagactaggtagatgatgagcatatacgcgtgattattttcgggtcttgatataaattctcaagtgtgagacaggttaattctgtgtaattgtaataccatggttaatgaaattgctcgcttttattgcatagcaaaaaaaaaaaaaaaaaatccgta

SEQ ID NO: 110866 - DNA, 390 bp, Zea mays
  Clone ID: MRT4577_32601C.1
ttcctctaaccctttttacctatttttaaatcgcgtccggcctttttataaattccaaccttacggcccggtccttcctacgtaatggctggtctttatttccacctaaattcaattaactgcccgcctttttccaacttcttaacttgaaaaccccttcctttcccaaacttattctctttccacaacatccccttttccccagttgccttattaccaaaaagcccctaaccaatcccccttccaaacattttcccacccttattgccaattggaaccccccctttatctcccctttaaccccgccggtttgtttgtttacccccatttttcccatttaattttccattccctttacccccattcctttcccttttttcccttcctttt

SEQ ID NO: 110867 - DNA, 232 bp, Zea mays
  unsure (1)..(232): unsure at all n locations
  Clone ID: MRT4577_32602C.1
aaaactatataaattattaccaagaaaccaatcccttgggggaagttttaatttaaagncccccacccgcacccccccacaaaacaaaaaaagttatatacaaaaatttgtctattgacaaaaccaaaaattcaattatgcacaccaaacaaaaacaacacactaaacaactcataacaccctataatgatgccacaaagtttcatcaaacacaagatcaaataaccttcaa

SEQ ID NO: 110868 - DNA, 1697 bp, Zea mays
  Clone ID: MRT4577_32603C.1
ctcgaggccggccgggaattgcactcgcaactacaccgcccccttccgcaagtcagagggacattgcattgggggaactacagaaaagggtccgaatcgaatccgtggtgcactgccccttcctcccccacaagccgccgccgccgccgtgaggactccggcgaatggcgtcccgcgtcgcctcgggcctcctccgccgccgcgccggcgccacactaggcctcctaaggagttatgcacatgtcagaagctacaacagtctttgaggctgttgtgcccttcatgggtgaatctgtaactgatggaactcttgctaacttcttaaagaaacctggagacagagtcgaggctgatgaacctatagcgcagattgaaactgataaggtcactatagatgtcgcaagtcctgaggctggtgttattgaaaagctcattgctagtgaaggcgacacagttactccaggcactaaagttgcaatcatatccaagtctgctcaacctgctgaaacacatgttgctccatcagaggaagcaacttcaaaagaatcatctccaccaaaagttgaagataaaccaaaggtagaggaaaaagccccaaaagtagatcctcccaagatgcaagcaccaaagccaactgcaccatcaaaaacatccccttcagaaccacagctccctccaaaagaacgagagcggcgggtgccaatgccaaggctcaggaagcgtattgcaaaccgtcttagggatctcagaacacctttgcaatgctatctacatttaatgaagttgacatgaccaatttgatgaagcttcgttctgattataaagatgaatttgtcacaaagcatggtgtcaaattgggtcttatgtcttgctttgtcaaggctgctgtttctgcacttcaaaaccagccaattgttaatgctgtcattgatggcgatgacatcatatacagagactacgtagacgtcagtgttgctgttggcacttccaagggccttgtggtgcctgttatccgagatgctgataccatgaactttgctgacattgagaaagggataaacaaccttgcaaagaaggcaaatgagggggcgctctcgattgatgacatggcaggaggaacattcactatctccaatggtggtgtctatggaagcctcctcagcacacctatcatcaaccccccacagtcgtcaattctggggatgcattccattgtgcaacgccctgtggttgtgaatggtgacattctcgcaaggccaatgatgttccttgcgctgacatatgaccacaggctgatcgatggcagagaggctgtattcttcctccgtcgcatcaaggatgtcgttgaggaccccaggaggttgctgcttgacatataaagttacttaccagtgctttcccgccgactgttttgtgctttctggaaataataccatgcaaatttttgactgatgaaaaagaattgcttcctcggaaagacgaattctgagctgaggatacagtgaggtttttctctataatcgtagaagagagcagcaaactcaactcaatgtgaggtcatgtttcattttcgggtataagatgctccatttcgggatgcagttcccagtaattttatttgccatgcaagagcaatagaagctgctgcatttttgtttgttggttcaaaaaaaaaaaaaaaaaaggcccctagggcc

SEQ ID NO: 110869 - DNA, 2100 bp, Zea mays
  Clone ID: MRT4577_32604C.1
gcaagtcagagggacattgcattgggggaactacagaaaagggtccgaatcgaatccgtggtgcactgccccttcctcccccacaagccgccgccgccgccgtgaggactccggcgaatggcgtcccgcgtcgcctcgggcctcctccgccgccgcgccggcgccacactaggcctcctaaggagttatgcacatgtcagaagctacaacagtcaactttcagctttggtttctgctacatctgaatgctcaaatctgccgaggtaattatcagatagcatgctctagttgatgaatatggatgccattactgacctcatgccaaataatcaaatattttctctttccatttttagacatttatgtattacattattgcaattgaattttgtagaagatgctattacttacctaatccctctccataccaagtttggagtaggtcatttgcttcagacaacggtaagccacaatagccttttggggcagatagttttaacaaatgtgttccttcttatggctttattaagttctatttttcattctatataggagacaagtttgaggctgttgtgcccttcatgggtgaatctgtaactgatggaactcttgctaacttcttaaagaaacctggagacagagtcgaggctgatgaacctatagcgcagattgaaactgataaggtcactatagatgtcgcaagtcctgaggctggtgttattgaaaagctcattgctagtgaaggcgacacagttactccaggcactaaagttgcaatcatatccaagtctgctcaacctgctgaaacacatgttgctccatcagaggaagcaacttcaaaagaatcatctccaccaaaagttgaagataaaccaaaggtagaggaaaaagccccaaaagtagatcctcccaagatgcaagcaccaaagccaactgcaccatcaaaaacatccccttcagaaccacagctccctccaaaagaaactggagcggcgggtgccaatgccaaggctcaggaagcgtattgcaaaccgtcttaaggattctcagaacacctttgcaatgctgagtacatttaatgaagttgacatgaccaatttgatgaagcttcgttctgattataaagatgaatttgtcacaaagcatggtgtaaaattgggtcttatgtcttgctttgtcaaggctgctgtttctgcacttcaaaaccagccaattgtcaatgctgtcattgatggtgatgacatcatatacagagactacgtagacatcagtgttgctgttggcacttccaagggccttgtggttcctgttatccgagatgctgataccatgaactttgctgacattgagaaagggataaacaaccttgcaaagaaagcaactgagggggcgctctcaattgatgacatggcaggaggaacattcaccatctccaacggtggtgtctatggaagcctcctcagcacacctatcatcaaccctccacagtcgtctattctggggatgcattccattgtgcaacgccctgtggttgtgaatggtgacatccttgcgaggccaatgatgtaccttgcgctgacttacgaccacaggttgatcgatggcagagaggctgtcttcttcctgcggcgcatcaaggatgttgtcgaggaccccaggaggttgctgcttgacatataaattcatgcaccagcgctgcgctgccctgccggactgttttgtgcaattgtgcttatctggaaataatgccatggaaatttttgactgatgaaaaagaattacttcctcagaaagacgaaatctgagctgaggataccgaggtttttctctatataatcgtagaagagcaaactcaactcaacatgaggtcatgtttaattttcggatctgagatgttccattacgggatgcagttcccacaaacagtcattttatttaatatgcaagagcaatagagctgctgcatttttgtttgttggttcacaatttcgcctccagctggccagcctgcaactcgaggaatctggattgtataatgtgacgttggagcggtgctgcaatcgcacgctctgttgaatggtcaaaaaaaaaaaaaaaaaa

SEQ ID NO: 110870 - DNA, 608 bp, Zea mays
  Clone ID: MRT4577_32605C.1
aaaaaaaaaacaaaaaaaaaaaaaaaaaaaaaaaaaaaaaaaaaaaaaaaaaaaaaaaaaaaaaaaaaaaaaaaaaaaaaaaaaaaattggcggttgggttaaaatccggaaggggtttgtttttcgaacccatttttgtttggaaggtttaaggcatgatttttaaaatttcccccaccctgtaaagtaaactttggggggaaaccaatcaataattttcaaggaatgaccgggtttgggaaaaacttgccccaaatttttttgattttttgtaaaaaactgccttttgggaaggaaaagcccttgggcctcctcacccaaatttttgtaaagctttttttaaccatgaaggtggaaacaatttcattttgacaaaggggcagggtttttctttggaaacaaccttgtagagggcaccttgaaaagttggcgcatgctttccttttgttaagtcccatgttggggtaaaaggccttttttttcctaatggaccccccatgggccccatgtaagcagatttgccccccaatcttaaaattttggtggtaaaaccactttattggttaaaggaggttttgggcaataaaactgggttcaggggtctttt

SEQ ID NO: 110871 - DNA, 407 bp, Zea mays
  Clone ID: MRT4577_32606C.1
caccccaaaatacaacagtttaggttttaaacaacgctccctgccatggcatgcccatcgcaggcgggggcagggcacctccccaaagaaaaaagaacaacgccccacacgcacacacatttggatcgcccaatacaacgaaaagtcaacgacgagaacgacgggggcccaatttggaaacatacacgtgtccaagttttattttttaatgtattttcctcctccttttttcctcctccggccatgcccgggcggaaaaatggatggcggcccttggcgttttttaattgatgttgatgggcagcggtttgccgtcccactccttgaggcactcaagcatggggtcgacaagcttgccctggttgatgccaaggaacaccttgttgcactcctcgccgggggacttg

SEQ ID NO: 110872 - DNA, 359 bp, Zea mays
  Clone ID: MRT4577_32607C.1
ccgtatcgagataaatctcaatcaatatattgattatttctaggaaacacatgtcggtatgagggcaccattgtcgagtacatcttatttgtaatctaaaagatggcccctccaacgatgggttgctgcaaggtagggttcattcaaaaagaactggttgtttggcaacaatttttgtttctgctgcatgaaggtacctaccaatgggttaccccctgccaatggattaagtaactgttgttcctgttgtaggcacccagcaaagtttgaccacaaccagttggttgaatggaagcaactgttgtaagtaggccgtagggtttgccacagttagttgaatcagaactggttcaatttgt

SEQ ID NO: 110873 - DNA, 310 bp, Zea mays
  Clone ID: MRT4577_32608C.1
aaagcaaataatcccataatttgaaaaattattcccaaaatttgggggcatggggggacaactttttaaaaaacactaacccccccggtgggggttacacacacccacattttaggagttgtaacggaaatacaaaagggggggaaaacatttgcttaaaaggggggggtttaggattggaggaacttattgtcccaatgtggtgttccacaggggcgataacttttaagcccgtggtattgaaaaggggtgctctttcttgccggactggttttccatggggaacccctgggttgggggggtttgggac

SEQ ID NO: 110874 - DNA, 281 bp, Zea mays
  unsure (1)..(281): unsure at all n locations
  Clone ID: MRT4577_32609C.1
agaacttaatgagtcgtgtaagtacacactctcaagtgctatagagtgctggtctgctgcacaggctattgttaatgttggcattggttcaactgaagatgtagtgattcagaaactatgtacangtaggatggttcacaaagattacacaagtgataactcatgttcatcagatactgaaacatgtagcaatatctcactctctctggctcctgaggaacgatgcatacagaaaattgaagaaggtacctcagttggcactccagaacacccagatggtg

SEQ ID NO: 110875 - DNA, 2076 bp, Zea mays
  Clone ID: MRT4577_3260C.1
ttctcgatccacaaatgcctgcacactctccatcccgaaccctgaaatcgaggagcgcgggaggacgccgcaaagcgcgttggctcttagggtttgccggtagggttgggaggctccgatccgaccattttctgaggatctggtcacatggatcaggccagatgggagtgcttgcattgcccttgcgctcggccgtgcgctgcgcccggggcggcgcggggttggtggtgtggtgagctcggtgtccccttggggtccctggttccgcctgccttggaccccgctccgggtatcagtccccgcctgtttcctgcttccggcttccggtttgccccctcccgggtgcttttttgtcgtgccggggtttgcatcccttggattgcggtgcaaggtggtagcacctatgtccactgtaaggctggaaggggacgaacgaagagtgcctatgctccgtatctggaggagtcactgaagattttgatccggcacagtggttatttccatgaagatgtcaggctgcaggcagtcatatctttgaaacatattctaactgcagttagggcaatacctcctgcacatgctgatgtactagagaaacagaaggatgtccttgatactgttctgaacatctacatcaagactatgacagaggatgacgataaagaggtagttgcacaagcttgcatgagtgtagcagacattgtgaaggactgtggttttgctgcaattgagccttacatgctgaggcttgctgaggtaacactggtccttttacgccaagaatcaagctgtcagcaagtagagtcagatggtgaggatgatggcgacattgaccatgatgaagtcctcatggatgcagtttcagatcttttgcctgcttttgcaaaagtgatgggatcttattttgatcccatatttgcaaaattatttgatccgttgatgaaatttgctaaatctccccatcctccccaagataagactatggttgttgcaaccttagctgaggttgctcaggaaatgggtgctccaatatctgcttatgttgataagataatgcctttggtgttgaaagagcttgcatcatctgatgctactaataggagaaatgctgctttctgtgctggcgagatatgcaagaatgggggtgctgcagcactgaaatactatggtgatatacttcgttctctgcataatttgtttagtaactcagaatcagatgatgcagtaagagataacgctgctggtgctattgctaggatgataatggtgcagcctcagtcgattcctctcaaccaggttcttccagtttttatcaaagctttgccactaaaagaagatcatgaagaatcaatgactgtctatggttgcgtctgcggtttattattatcatcacatccccagatcctccctctggtgcctgacgtcatacatgtctttgcccaagtggtggtatccccagatgagagcgatgaagtgaaaacaaatattggcaaggctatttctcacttgatatctgtctatggccagcaaatgcagccaatactgagtgcccttccaccagcccatgcaaacgcgctggcttcatttgcgagtagaagatgacctcggaggaccagcttttctttggttccttgttctgcttgagtttgttttggttttgtcgacgattgccattttctgaggatctggtcacatggatcaggccagatggagtgcttgcattgcacattggcaagggcgagcggagttgtcaggttggcgcatgattgattatatggtgagcttggtttctctttgagatacacagttgtgcttgctttggagccctgtacggttaaaggcagaccttagtcgacagcgcatctgtgagtgcctgcctgtattcaggttccggatttggttatttatgctcttgttttttatttttttgcctgtatttgcaattcattgattgctgttgtatatagaagagagttttaaatagagagaatgtacgactctgcaactggcaaattttgtatacatactgctcataccacttgctaatgtttatccggattgcgtaccttgtgcccg

SEQ ID NO: 110876 - DNA, 245 bp, Zea mays
  Clone ID: MRT4577_32610C.1
gctcataaaaaaaaaacgccttgttcttgcgggtagatgcccccattcattggtggctgccccccaaaaaagtggtaattacggattaaccccctaaaatacactgttgggggctaaactgtatggcgagcccctttgctaaaatactaggctgactgtgaaaaaaaccacgcggaggataaacagttccaattttttttcccaggagttcaaaagggggggggggggcccttataaaagggggg

SEQ ID NO: 110877 - DNA, 281 bp, Zea mays
  Clone ID: MRT4577_32611C.1
accttatcacacttaagccactcacatacaaaatttctaacattatcctactcattacacacatatgccacatatgaacaaacgatccattatccagcaaaaaaaaaaaaaaacaataaaaaaaaaaaaattaaatattttaaaaaaatactgttatacatatacaatacattaaattattttaattccctttacttgacccatatggtaccattttaaattatcttactatgcacataaaatctcttatttcactgttcacctatattatccacatgctt

SEQ ID NO: 110878 - DNA, 556 bp, Zea mays
  Clone ID: MRT4577_32612C.1
ccggccgggaccctaccctgagaaccgcattggcggcgtctttgtactctcctatcttcgcgactcaaagctttccccaattcctgcccctatctaccatgttctacactcaccgatctggcgggtcactcccgcgcttcaacaaacatccattgagaggacgtagccatcctcagagtccacactctagtccacggctcgttagtacagcggtcggcaaagcgcggtgcatgcggagactgtacgtgcactcgaggcatggtagttcagagcctgagtggttcattatgcaccggctgacagagacgcattggcgggagtgagatggatgctcttcaacacactgtattcagcagagactggcgctgggaagcacgtgccacgagctgtttctgttgaccttgagcccactgtcatcgatgaggtgaggactggcacctaccgacagctgttacatcctgagcagctcatgatgggcttggaggatgcacccaacatcttcgctcgtgggcatctacaccattgacaaggagatagctgacctgatccttgaccg

SEQ ID NO: 110879 - DNA, 529 bp, Zea mays
  Clone ID: MRT4577_32613C.1
acgcgctctgggtgttcgacgccaaaaccaacagctgcaccgtggtccgcccgccgccggggtttgccgggttcgtattctccgccccgtccgtccggacctgaggatctgcattttctactgagtacgtacgggcaccggtcttcgtgccatgcatggtatccgatgaaacacttatcctcttcaaaagctacgtttgcaatgcgaggatctgtgcatcccctgacttactcacggctccttgcctttgattcgtccaaggatggtgactatggcgatcgacgccaacaatgcagagaatacctggaggatcggggagccatgtggcggttgtacaaatcttgaaaaaaaagtggtcgagcagctgtgaattaccgatctggtggtgagttgaatttggatgaggtgtgcgtttttgggccaggcgaagcacacacctgctgattagcgctcttgccctacagccatgcttttgctattgctagactactagtaataaaaaccactgcccgtaagcgtaccaactttc

SEQ ID NO: 110880 - DNA, 266 bp, Zea mays
  Clone ID: MRT4577_32614C.1
aagcaaacatatcttgttggagttagatgatatcaatagagaagctgccccagggcgacgatacaactggtagtacggtaggccgttgtggttggttatactatcgacgcgccgccgagtgcttgtcggttattgcgcgaccagaccgtgcaaaggtatggcaggcgggcctaacaattttaatgcatggtgtacgatcgagccatgccacgtgtgtggcccttgtcgagccagccaggaggcaaatcaaaccgccggccgacgcc

SEQ ID NO: 110881 - DNA, 1496 bp, Zea mays
  Clone ID: MRT4577_32615C.1
atttcagttgcctggccgcacagataatgaaataaagaacttttggaataccagaaaaagaagaaaacagagatgtggttcgcctctctatccagaatatatgctttctcaggttagtcataaagacatggactttgaaactcttggagagtcacatggcaagaaacggtcaaatgatttttcaaaagaaaaggttggtgatgtgcaagaacttgtggatgagttaattgtatttgagcaccttgactatggtaaggatatagtgtttccaatcagacctttgaaatgccatgcatctactggcagtgtgcaaatttctggtgacattcggaaaaccttttgtcccactgatttgaactatgtaatgacaaagaatcagtcggtgcctgttggtagtgccattggcagtggctatccagtatatggtggcagactctctacttcagggaccatattcggttccattcagacagagattccttcgatccaaagttccagctatagcccaagtaatgactggttggctcaatgtccttcggcttgcattgagcaacggattccaatggaatgcaatacaatatctcagtcaaaagcttaccttatgatgcattcttcttcagctttctgtgcccctgaacatgatgcctgttctgaaactcaagctccagacttatgttcaggttcagatgttgttttcgaccccagccaatgttatccagttgctagtttttctgatcttgggatctcggataccccactaacatcagtttcttgaatgatatagcactagcaagtttgttgaatgttaatttgaaggaccagtcacatatcaacaggcaggaacctaccaatgatacatcactaggaggagcaagtttcttgaatgctaatttgaaggaccagtcacatctcaactggcaggaacatatgaatgagacatcaccagtagcaggtttattgaatgctaatttggaggagcagtcacatctcaactggcaggaacctaagaatgagtcatcaccagaagcaggtttcttgaatgctaatttggaggagcagtcacatctcaactggcccttgcaggaatgtgagccatggattgagagacaaatgttttgaccaatagtttgatccttgttacaagcctgacttcccatgttcctgagcagcagtttcctctactgcacaaccagggccagagtgagcaacaaccaagatattcttgtgagcgtgatggaaattacattttagttctctgccttcgctgtcttaagctctctgaagtattgtcttcgactttgctgggatgatgagctgctgccccgagacaacaacagtcagccagaccaaaatcacttaaatagttttaacaatgtattaagttttgtcttgttacctgctgtctggcgtctgccatgttttgtctactctcaaacttgtccgataatacccttttagggctaatttggaaagcctcaatgtctttagcttgggcc

SEQ ID NO: 110882 - DNA, 362 bp, Zea mays
  Clone ID: MRT4577_32616C.1
tcgctcatgcgtgcgcggcccaaggatcattttctttatgacaagtacattgacatggaagagatcccacagctttcagtcatcaacacaagcagcaaggaggtcgagcttgcatcagttgtgttcatttctaaagcgattgagctgccgtcagatggaaatgtagttttcgaaaagattgcagatcacctgcacaaagtggcctatgcgcttgttcggagcacatgaaccattggtggaaacatcattatggcgcaacggttgcaattttcctcggacatagcgactgctctactagctgcaggtacaactgatactatccaaccggttttcaaaaggctgtccctcacctttgaggagtt

SEQ ID NO: 110883 - DNA, 356 bp, Zea mays
  Clone ID: MRT4577_32617C.1
aagcatgccctttatttatcgaattaacgagacaaaaaattaccggaaaggcttatttgggtgacggtacattaattgggctgtcatatatgggtatgaagcacgtcgacgaaactattcattggggggcataaaaagggtagggatacccatgcatgcatgcctcaaaacgtcatcgcatcccatgcatgcatgtatatatgatgtatcagggattcagtggcacgcaagcaggcaaaaaacgacgaccggggggcgtgctttgcggttaggaaggaggaggggtgcaggaacttctggaggttttggtgtagaaaggctggttttccttggcgcaggtggtgttgcaggccttg

SEQ ID NO: 110884 - DNA, 1943 bp, Zea mays
  Clone ID: MRT4577_32618C.1
ctgtctacctcgctgcagtgatgagagcacgaccccacttcctctggagcaggtcccggccgtctgcactcgccagttcgtcgccctgggaacccggggactcgcgccgggaaactggctccgcacaggcgcacaggtacgcaaggcacagcccaagaccaccgcaccgcacctgcacaccgccagggatggcggcaaccgcgcacctcaccggtgtcctcggcgtgtcgtcgccgcctctcgctccgtcccactgcagctgcagcggcgccaagaagcagagctgctctctgcgtcaggggcggcagcagaggaggcgcctccgcgtcgcccgcgccgtcgaggtggacgcgccttccgccggcgcaccggagccggaggaggcggaggagccgtccgtcgacttcgctttcgtcagcccgcggctgctgccggacgggacgccggacgtgcactaccggacggcgcgcggcgggcagaagctcagggacatcatgctcgacggctacatcgacctctacgggccctacgataaggttcttctcaactgctcagggggcggcgtgtgcgggacctgcatcgtcgaggtggttgaaggcaaggaaatgctgtccccgaaaactgatgtggaaaaggagttgctcaaaaggaaacccaaaacgtggagattggcgtgccaggcaacggtgggcaacgcagattcgactggacagatgatcattcaacagttgccggagtggaagatacacgagtgggacaagtaggggttactgctttactggtcttgaagagtgctctcgtggccatactatagattacatgcagtggaaatgggaaaaaaaggaataagaagcagctgatcagtggaagagctggtgcagattgattgatgaagcttttcatactccaaacaaacaaacaaaaacctgggcatgttttttcaccatttgtagcaaccgaaaggagcatggatcaattagccccgttctgtaaaccgttcccttatacacaaaaaaaaaagcaaaggcgacttgttcattatgatggggaatgaaggatgtttgtggtcctctgaaggctgggtgggatcttcaaatggcgttggcagcagatgcaggcaaggcggccaatgaagttggcatcgctgccaaactaaggtcaaccaccgataaactgagagacttgctgcgcaaatgagccggcgaaaggcaacctgcacctctatctgatcatggaactcagaggcccataataattacatagctgtgtaacggttagcactgtgccgttaaacaatgtcattgtcaccatcgatatgttgtttgtttgctcgctggagtgtatgaggaattgaagtttcaagacgggaccagaatgggtggggcgtgtttggtttgcgtttttatacaaggtctgtctagccagcgatgccaggctgttgcttgcaaaaaaaaaaggaaaaacaaaaaaaaggaactggcaaacaaaagcaaggaataataaagcttagaagccaggagtatgattggttctatgaaaaagcaacagcagcccttttcccagatgcatgggaaccctttagagattttattcctgaggatgaaaggaattgtttcgtagatgcttataacaaaaggtgttgaatgctgatttgttgtggcctgttacgtcttccccagttcatatattaaactttaagaaccccgtggttgaagaaaagctccctgaaaatgagtaatacgtcatcttcgtcaagtggtgagcgtgctatgcagcgacagagggcaaggggtctatcttggggtgggtcttttttcttttcttttcttttcttttctcttttccggcaacatagagtcccttttacttattaaagagatcctgcctgttttagttcctccttaacatatcagatgatggtaaatggttgatggttatgttcc

SEQ ID NO: 110885 - DNA, 2959 bp, Zea mays
  Clone ID: MRT4577_32619C.1
atcttaggaataaggaaatgttaagagatgacaggttctgtgagtcatcaatgtgtaatgcggatgagattccgagaaaatgtaatgaacttgagttgaaggtgcaaaattttaggacgcacacatgtgaatcagaagaaaagttccgaaaatgccaagaggagctggaacaaagaaatcttgagttatctgcgctgagaagaaagataaatggtttacattctaatgaactggaagtttgtgaatctggtgcgacatggaagtaccaagctagaatagcagatctagaggatactgaacctgagacagatacacttaaggctaggtttgaactgcagttgaggagaaaatgatgaccttcgtcgttccaaggttgagatgcagaattttatatctgagtttcaggcagagaagagtcagcttgaggaacgcctatccgcgtcgcttaaagagagcagcatcacatctaaatgactggatgaagtgcggaaagatgtccttgtgctttccagcagtagagattcccatgtttcaaccaataaacttcttgagaggaacttagttgagctagagagctgcaaagctggaatagagttgcatgtatcgtagcaggaacaggaaaacgtcgagttgtcaaaacggatatctggacttgaaacacaactgacttacgtgacaaatgaaaaggagtcaagcgagctgcagttgcatgactccagatctctcatcatcaatctcaaagataaagtagagtgtcagcaatcagagatggaaactcaaaggctccagtttaagcagaaacaacaagaatctcaaagaagattgtgcgaagcacaagatgattctgaagttctgagaagatctaattgtaaactacaatctacggttgagagtcttattgaagagtgcagttctcttcagaatctaattgctgatctgaaaaggcagaagttggaattacatggtcatcttacgcaaaaagagcaggaattggatgagtcgaaaaaaaagaactttgagtttagcaaaacagtggagttccttgaggcaaaacttttgtcactacagaaggacatttcttctaaagaacaatctttattgtcagaattggagaatattttccaggagcacatggaacaagaagaaagaattaatcgcgcacatttcatgctcaataagatcgagaaagaaaagactcttgaagtagagaatcttgaaagggaggtcgtcagcctcgctgcacaggtctcctccacacacgaggagcgagaaagggaccctctagatgcggttctaaaagttcagagttctcgtgatgaggctaagtacggtgaggggaaactgcaagatattagacaacaggtgagctgttacgagtctcaattggaagaccttcgtaaggagtctaaaagtaaaattaaaggattggttgattcccttaatgcctccaaacaaagcgaggaaatgttgacatcagatgctgaacatatgaaaaagttgatggaagctgctaaatccaatgaagatgcactaaggaagacttctaacgaactagaactgaagcttaaatccagtgattatgtgaaacaacaaatgctggaagaaatatctggcctgaaacttcaggctcagaaaataatgaatcttcaagatgaggtttccaaacttcagagttctcttgatgaggccaagttcgaaaaagggaaacttgaggagtttctgcgctcggtgactgaggaatgtcaagaactaaaagcacagaaggctatgctaacagataaagtttcttatatgcaggagaccttgagaaatggtgaagaagaaaaccgaaacagaatagctatgcatgcaaagctcatgaggttggagagtgatctaacagcattagaagcatcacatgtacatgaagcagaattaaagaacgaactcagtaggatcaagagatcaaacagtgagtatcagaggaagatacaatctctcgggcaggaaaatgaggatctcactaggcgagttcaaattatggaaaagggttttgagcgaatgtcccacgctaaagagaaccttggaaagcaggagattggaggagataaccaggaagccatccagtcaacaattcagttactggaaattaagcttgcagaggcattggaggaaaataagatatacagagctcaacagaagagttcgatgtctgaggggcaacctgctggtggagatggcaaggagggcaataccgacaggattttgcagttggaaggagagctgagagatatgaaggaacgattactcaacatgagcttgcagtacgcagaggtggaggctcagagggaacggttagtgatggagcttaaagctatcaagaaaggcaggtggttttagcaggatgcggagttgttgcctgacataaaacatgaggctgacaccacagaactacaggtgggcatcatcaagccgtgctatgtccgtgcttgtagcaatacaacgtttattatcatgtgagactgagagcaagcaagtgcaagtgcagagtcagacagtgatgtagcctggacgtgctaactggtgctggagcatgtgtctcactgaagctccgtatgatgcggtacccagcccttggggcgttgtcccctagagtcatgatcccgttcttattggtatttatttttaatggtatataattaatatatacgccagtatgtattgagtttgactggagagtgatggtcagttgttgataccatccgatccctctgttttacatgattgattaattgtcgataaatgtagtacatctattcattctttctttcatttttaagacagcagtgaagtgactgggttagtgggtagcagtcattatgttgcactcaaacaatattgttttagtttgggtgtagaataatgtggggaaaaccaaaaaatttgttaaagagggtctctttgtttgtttgtttgtttt

SEQ ID NO: 110886 - DNA, 309 bp, Zea mays
  unsure (1)..(309): unsure at all n locations
  Clone ID: MRT4577_3261C.1
natcccactaggggccgcgtatcccactttttcctatagagatcgagatctgatattcgatacccgaaggccaaggcaaccattggccgccgaacaacttgcgtgcacatacaagactactcatacctcttggacgcagtgatcgccaacaagactcgagcaagatggcgacgatcacgtcgttgcttcctttcatgatacaatcctacatgtcactgactctatctggggcgcaaagtacactgcagagtagaggagctctgcatctcagaggtagaagaggagaggacgtctccttatgccgcgtat

SEQ ID NO: 110887 - DNA, 1112 bp, Zea mays
  Clone ID: MRT4577_32620C.1
attgggtacctcgaggccggccggggccgggaaaggtacgcaagggcagcgcacgcctgcgtcgtcgaacagcccaaggccaccgcacttgcacaccgccagggatgggggcaaccgtgcacctcaccgtaaccggtgccctcggcgtgacgtcgccgcctctcgctccgtcccactgcacctgcgccggcgccaagaagcagagctgctccctgcgttcgccgcgtcagcagaggaggcgcctccgcgtcgtcgagatgggcgcgccttccggcggggagccttccgccggtacgccggaggaggtggaggagtcgaccatcgacttcgcgttcgtcagcgtgagttcctctcgcgcttcccttgtgtgtgtgtgttttgatgcgccgagctgtccgcgcgttcgtgattggttgacggcggttgaattggtgcgcgcgctcgtgagtcgtgacgttgcagccacggctgctgccggacgggacgccggacgtgcattaccggacggcgcgcggcgggcagaagctcagggacgtcatgctcgacggctacatcgacctctacgggccctacgtgagtcacactgactacatgcgagggggcggcgtgtgcgggacctgcatcgtcgaggtggttgaaggcaaggaaatacgcgtggcgaaacgcgtgggggaaaaggagttgctcaaaaggaaacccaaaacgtggagattggcgtgccaggcaacggtgggcaacgcagattcgactggacagatgatcattcaacagttgccggagtggaagatacatgagtgggacaagtaggagttactgttttactggtcttgaagaatgctctcgtggccatactatagattacatgcagtggaaatggggaaaaaaaggaataagaagcagctgatcagtggaagagctggtgcagattgattgatgaagcttttcatactccaaacaaacaaacaaaaacctgggcatgttttttcaccatttgtagcaaccgaaaggagcatggatcaattagccccgttctgtaagccgttcacttatacacacacaaaaaaaagcgacttgttcatgatcattgaaagacgtgattttttttgttcccc

SEQ ID NO: 110888 - DNA, 316 bp, Zea mays
  Clone ID: MRT4577_32621C.1
gttgttttttaaaattaatgggcttttataacaaacaagcttgaacaataaatgggccaacgacatgccaagtacacaacgacttgaacaaaaccccggagggaaacaaacacagggtttcgaataaccggacaaaaactgaggcaaaaaagcattacacattttacacgaacggaagaaaaaacaaaagatacaaccccaagcattgcagacaagccaccaaaacataaaccaaccctatggctaggaacatgcgtccacaaaaagaaatgaaaaccgaggtgcccacacctaaagccttttgccgggaccctaa

SEQ ID NO: 110889 - DNA, 2242 bp, Zea mays
  Clone ID: MRT4577_32622C.1
ggtaccctcgggttcggccgggtgattctgaagttctgagagatctaattctaaactacaatctactgttgagagccttattgaagagtgcagttctcttcagaatctaactgctgatctgaaaaggcagaagttggaaatgcatggtcatcttacgcaaaaagagcaggaactggatgagtcgaaaaaaaggaactttgagtttagcaaaacagtggaattccttgaggcaaagctttcgtcactacagaaggacgtttcttctaaagagcaatctttattgtcagaattggagaatattttccaggagcacatggaacaagaagaaagaattaatcgcgcgcatttcatgctcaataagatcgagaaggaaaagactcttgaagtagagaacctcaaaagggaggtcgtcagcctcgctgcacaggtctcctccacacatgaggagcgagaaagtgccactctggatgctattcaagaggtatctgtcctgcgagcagacaaggctaaacttgaggctaatctccaagatgttagtgaacaattgagatgttacgagtctcaattggaagaccttcgtaaggagtctaaaagtaaaattaaaggattggttgattcccttaatgcctccaaacaaagcgaggaaatgttgacatcagatgctgaacatatgaaaaagttgatggaagctgctaaatccaatgaagatgcactaaggaagacttctaacgaactagaactgaagcttaaatccagtgattatgtgaaacaacaaatgctggaagaaatatctggcctgaaacttcaggttcagaaaataatgaatcttcaagatgaggtttccaaacttcagagttctcttgatgaggccaagttcgaaaaagggaaacttgaggagtttgtgcgctcggtgactgaggaatgtcaagaactaaaagcacagaaggctatgctaacagataaagtttcttatatgcaggagaccttgagaaatggtgaagaagaaaaccgaaacagaatagctatgcatgcaaagctcatgaggttggagagtgatctaacagcattagaagcatcacatgtacatgaagcagaattaaagaacgaactcagtaggatcaagagatcaaacagtgagtatcagaggaagatacaatctctcgggcaggaaaatgaggatctcactaggcgagttcaaattatggaaaagggttttgagcgaatgtcccacgctaaagagaaccttggaaagcaggagattggacgggataaccaggaagccatccagtcaacaattcagttactggaaattaagcttgcagaggcattggaggaaaataagatatacagagctcaacagaagagttcgatgtctgaggggcaacctgctggtggagatggcaaggagggcaataccgacaggattttgcagttggaaggagagctgagagatatgaaggaacgattactcaacatgagcttgcagtacgcagaggtagaggctcagagggaacggttagtgatggagcttaaagctatcaagaaaggcaggtggttttagcaggatgcggagttgttgcctgacataaaacatgaggctgacaccacaggtgggcatcatcaagccgtgctatgctccagcaccagtgagactaagagcaagcaagtgcaagtgcagagtcagacagtgatatagcctggacgtgcacgtgctaactggtgctggagcatgtgtctctcactgaagctccgtatgatgcggtacccagcccttgtttaactggacgtgctaacttgcgttgtcccctagagtcatgatcccgttcttattggtatttatttttaatggtatataattaatatatacaccagtatgtattgagtttgactggagagtgatggtcagttgttgataccatccgatccctctgttttacatcattgattgtcgataaatgtagttactctattctttctttctttcttttttgagacagcagtggagtggctgggttagtgggtagcagtcattatgttgcactcatacaatattgttttagtttgggtgtagaataatgtgacgaagggagacccatttgttcatgtaagtttgtttgtttgtatgtttgttttcacagcgtagatcacggataataatgaagtttccgttgtgcggttgtggtacgtgcatcgcattattgatgaaactttaaacctcacaaaaaaaaaaaaagggcggcca

SEQ ID NO: 110890 - DNA, 810 bp, Zea mays
  unsure (1)..(810): unsure at all n locations
  Clone ID: MRT4577_32623C.1
atccttgcttcttctccagccatgcagcttcagctgagcatgagctagatgaaaacatatatgacaatggaatacatgagggaaatgcctatctgctcgaacagggagtgcatcaaggagcacatggacattctggagtgagatttgttagtggaataatattaaagtcgaaggcacttgcttttgagcggatgctttttcgagctacaagaggaaacatgttattcaatcaggcatctgcaggggaacctgtaactgatcccatatctggtgaagaggtagagaaagctgtttttgtagttttcttttctggggaacaagcaaaagcaaagatactaaagatttgtgattcatttggagcaagttgctaccctgttcctgaggagatggtcaagcagagacaaattttcaatgaggtatcggctcgtctctctgacctggaagttactttggatgctggaatccagcacagaaacaaagctcttgagtcaataggatcacaattggtggaggtggacaatcatggttaaaaaggagaaagctgtatatgacacgctcaacatgttgaactttgatgtgacaaagaagtgccttgttggagaaggatggtgtcctatatttgctanatctcagatcaagggattgtttgcagcgttccacaattcacagcaattcacaagttggtacaatatttcatgagatgggcactattgaatcaccacctacatatttccgaactgataagnttaccaatgcttttccaggaaaatgntgatgcatatggcgttgcccgatatcaagaagctaatc

SEQ ID NO: 110891 - DNA, 449 bp, Zea mays
  Clone ID: MRT4577_32624C.1
ggggaagcaaaaataaaacattggttaccactgcttgcaactggaaaaaggaaagccctttttactttcgacatggtaaaaaggaacattacccaaaaaagggggggccacaaccacgggggggggcccaacgggaaccacttttttacttcaggcaacttggatttcagctgcaaaaggcccaaaaaattcatccttttccttaggcccgggaattggaaccaaataagggaaaggcagggggggcccttgcttgccctttggatcccaggccaaaaaaaatttaaccttgaaaccaaacacaccctgggtaaaaaaaacaaggctcacaactgaaaaaatggatagggggacagggggaccaaaaaaaaaatggccccccccttgaacttaaaaaactaaacacgctggaccctgggcttaccacttacaaaaaccccacagccctt

SEQ ID NO: 110892 - DNA, 320 bp, Zea mays
  Clone ID: MRT4577_32625C.1
aaaaaaaaaaaaaaaaaaaaaaaaaaaaaaaaaaaaaaaaaaaaaataaaggaagagaaaataaaataaaagggaaataaaataactataatgataatgacacatgggaaggggcatataaaaaaataatgtaagaaaaatatactaaaaaatgggggggggctttttggggggccacggtttacgccgcgtggttgggatgtcatttattttttttttggggcgccctaatgatgttttggggggcggggttttcctctctgctgttcgaaaaccccgtggggtccccccttttattgggctggaagaaaacccccttt

SEQ ID NO: 110893 - DNA, 226 bp, Zea mays
  Clone ID: MRT4577_32626C.1
ctggaaaaaccaaatctaagtttttaaaaccggggggtttatttgggccggcccccggtgtctttttaaagcaaccggaagtttccccccggtggggggggcgtattgcactgccccaaacaaacgaggcgcggggggaaaaaccatattcagggggtgcccagcacttaaatggaatcaccctttatttggacttgttagggggtgtacctgaaatttttttttt

SEQ ID NO: 110894 - DNA, 663 bp, Zea mays
  unsure (1)..(663): unsure at all n locations
  Clone ID: MRT4577_32627C.1
cccacgcgtccgacctgccaatgctttggtggttttctatcagtgggaacaacattcaaggccgaattccactgggatttgcagcatgccagcgcctgcaagttctttacttaggcggacttcctcaccttactggacctatcccagctattcttggcaacctcacccgtattactgatatagacgtctctttctgcgacctgactgggcacattccaccagaaataggcctgttgcaagacctaaagaatctacgtctaggaaacaaccggctaacaggtccagttccagcttctctaggaaatttgtctgcattgtctttgctgagtgtggaatcaaatctattgtctggttctgtacctagaacaattggaaacatcccaggtctgacccagtttagattctcatggaacaatttcaacggagatctcgactttctgtcctccctttccaactgcaggcaactcgagctccttgacatatataataattccttcaccgggccactcccagaccaggtggggaacctgtcacatatctaattgaattagagcanatgcnaacagctatccgtgagctccgtcgtcattgtcaacttagcagccttgtagatctatttcacgacaccctactacagagcatacagaatcatacacgttacaa

SEQ ID NO: 110895 - DNA, 1031 bp, Zea mays
  Clone ID: MRT4577_32628C.1
cccacgcgtccccccccgcccccgccgacggacgaggcaaccatggccgcggggggcaccgccgacttcttctaccgcgagtcgcagcgtctgggctacgtcgcccgctctgcgtttaagctgatccagatgcagaagcagcacaagctcatcgcgccgggcgccgctgtgctcgacctcggctgcgcccccggcgcgtggcttcaggtggcttgtcagaacctgggtcccctcgagaagggtggcattgtcgtcggcgtcgatgttaagaaggtgaaagtgccctctgcgcactgtgactcacgggtcaggacggtctgtgcagatgtcatgacgctgatgaagcggcaggctcgggcaatgtcgccacaggaacgaggattctctgtgatactgtcagacatgtgccccccagtttcagggatcacgactaaagatggagctatatcttgtgagttgggcatgcgcgctctctcgttggcagtagggaagataaagttaaaagattctaattacagtgataccctagagaagtatctgagctccactgagcctgagtctgacgaggatggcgttcttcgacgtggaggcaacctggtagtgaagtttcttgagaatgaggacatatcagggtttggcaaattctgcaaggtgaagttcaagaaagtatcgttgttgagacccaaggcgactcgacctagctcgagggagatctacatgatctgcgaaggtttgcggtagaaaggagggctcttcagaaggcaagcgaagactccaagaagctaggtcagttgagttgccctgaactgggcgctgttagttctagctgctggtgcaggtgctggctgattggcaatgtgatacagctgtttgatgctgatagcctcccagagcaagttaccacaaagctttgtgtgattgaaccatgttagtagttcgtctagatgttacctgtaataattttgttgaactgtgatactagttcgtctaggagaaacaagcatttgacttgagccctttctgagaacctg

SEQ ID NO: 110896 - DNA, 151 bp, Zea mays
  Clone ID: MRT4577_32629C.1
catgggtcatcttatgaggctgtaaatccgatgatctgctccatgtcttacgagtaggagggcgtcattgagacctccagaggcgctcctactcgtaagacatgggtcatcttatgagaccgtaaatccgatgatctgccccccttttttt

SEQ ID NO: 110897 - DNA, 374 bp, Zea mays
  Clone ID: MRT4577_3262C.1
gacacctgctcatttgcactcccgctcgtgctgacatctcgtcctgtccttttgtttcgaacgctaacgagcccggacgatggccagcaccgaggtgaaggacggcgagcaactcaataagcttattgccgaggacccccaagctggagcacacagtgagaacaagaaaaccgggtttgatggagcgctcctgtcatggttacctcagcggggaggggggtcacttacactggaccaagatccaaacctgttcggatgaggagaaccgcgccctaccataccgtcgtggtgctctacgcacatttgtgagagaccaacaaggtcatggatgacttctacgtgctgatgctcaacgaaggtggtcgggaccacca

SEQ ID NO: 110898 - DNA, 593 bp, Zea mays
  Clone ID: MRT4577_32630C.1
ttctgattcctccattattaactatcaactgagggcatgactgcaaagtattggaaagtaacagtactggacaggcatattacgaagaggtaaaaattgctcgtgaatgccaagggggggtactaatgaatacaggccacaggctcgaaaagtagcatgcatgaatgctgctgttaacagatggctaatcaaggggctacatgctctgtggatctgacttgtaatgaaactgattattaagcagctgagattgttgcctactaaaagctgggattacataactgatgccttaaaggactaggaggaccatctaatgggaagaggaagagggagagatggtagccatcatggggtctgtattaaagccggatgtgaaccgtgtgttagtttcgtactcagctagaggagctaacttatgtacataggacgggagtgccagttccatcagcacatggtgtcactaaagatgtgtttacttagaggacaaaactggatgagtgaggaactacattggtcactcgactttttgtgatcacagcaccacagaaaaatactctaggggttttcttgctcatggcgtgattctcatacat

SEQ ID NO: 110899 - DNA, 392 bp, Zea mays
  unsure (1)..(392): unsure at all n locations
  Clone ID: MRT4577_32631C.1
ggggggggtggggccctccctttttaaaaaaggcccccaagcccaaagggcgggggggggttctcgggggctttagttttgacaaccttgggggggctatatttccctgggttaggttccctgcctccctccctatatccccccccgacggaaaaaccaagcgggggaattcccccctggtttcggggggcttggggcctaaacctcaacaggggggggggaaaaactttgcaatgagtcccaacaggggaacgagcggatcttttgactggtttccgaattttggcccgttttccccttcagatgggaagcctaacaaaaaggggcgggtcaaaacctgggctggcnaaaaagctgggcttttattctggcggggggcccttcgggggact

SEQ ID NO: 110900 - DNA, 288 bp, Zea mays
  Clone ID: MRT4577_32632C.1
cccggctacgtcggccgtgcgtaccgtcccctggtccgtctggaacaggtagggtgggagagtctaccggcacgacgggttagaccggggtcggtcagccccagctttgccgatacgagagtgtcacgctccctattctcatatcggctccatctccgcctactcggaaagagttgtagagaggagtaagggaaggcgaggtacctcagcgccccgcaaatagggcgaagaccgtgcacgccgctcgactctcgacggcgttcttgtcacgacagcatgcgagggaga

SEQ ID NO: 110901 - DNA, 2778 bp, Zea mays
  Clone ID: MRT4577_32633C.1
tctgtacattttagaaaatacaagtaaatcgacaaatcgtaccctgtgtgactctgtcaataaggcatgtaaaccctttgtaaaaaagaatgaagagaagaagaaagatgatcctgtacgctcgtcgaaaccaaagaaatacagtgcgtactacccttcaaagctcttgccttattattttcaatcatctcgtgacggaaaaacaaagtcaacacgaaggactcggccggtagcactggcgctagcagcagcagagatcgaccggccatcgccgttttataaaaagagagtccagcggtagccgtcgctgacggacgcccccctcccagacctccgcccggatctcgccgcctctcccgcccctgctcgcgagccgccgtcgacagccaccgccatgggcacggccaacggccagcagccggcagagggcgctccctctgacaagctccgccacgtcgagtccatgtcggagctgccctccggcgccggcaagatctcggggatcaacgccgtcgtgctcggggagtcgctcgccgccgaggagaacgacctcatcgtccccagccccgagttctctgccagcgccctcgtctcttctccgaaacagtatcgcgagatgtatgagaggtccattaaggacccggccgggttctggtcggagattgccgagaccttttactggaaggagaagtggaaccccgccgaggtctgctcggagaacctcgatgtcaccaagggacccgtccagatcaactggttcaagggagggaaaaccaacatatgttacaacgctgttgaccgcaacatcgagtctggcaatggcgacaaggttgcaatgtactgggagggtaatgagcccggtcaggatgggaagcttacctattccgagctcctggagaaggtttgccagcttgcaaattacttgaagagccttggtgtcggcaagggtgatgctgttattatatacctaccaatgttgctggagcttcccattgccatgcttgcctgtgcccgcattggtgccgttcactcggttgtgtttgctggcttctcagcagattcgctagctcaaaggattgtcgattgcaagcctaagcttgtcatcacgtgcaatgctgtgaagcggggagtcaagcccatctttctcaaagatatagtggatgcagctttggttgaaagtgagaagaatggagtctctgtaggtctctgtttgacgtatgaaaaccagtcagccatgaagagggaaaacacaaaatggcaagcagaaagggatgtttggtggcaggacgttgtcacaaaatttccaaccaaatgtgatgtggagtgggtggatgcagaggatccattgttccttttgtacacaagtggcagcacagggaagccaaagggtgtactgcatacttctgggggctacatggtgtacactgcaacaacatttaagtacgcatttgactacaagccaactgacatatactggtgcactgcagactgtggctggattactggacatagttatgtaacatatggtcctctcctgaatggtgctacggttctcgtttttgaagggacgccgaactaccctgattcgggccgatgctgggatattgtggacaagtacaatgtgacaatattttatactgccccaactcttgttcgttcactcatgcgtgatggcactgagtatgttacacgttactctcgaaagtctctccgagtcctgggaagtgttggtgagccaatcaatcctagtgcatggagatggttctacaatactgttggggattcccggtgccctatatcagacacctggtggcaaactgaaactggcggtttcatgatcacccctttgcctggcgcctggcctcaaaaaccaggttctgcaacctttcctttctttggtgttcagccggtcattgttgacgagaaagggcaagagattgaaggggaatgtagtggatatctttgcataaagaaatcatggcctggggctttccggactctgtatggagatcatgagagatacgagaccacgtacttcaaaccatttgctgggtactatttcactggtgatggttgcagcagagacaaagatggttaccactggctgactggaagagtagatgatgtcatcaatgtcagtggacaccgaatcggcacagcagaggttgagtcagctttagtgtcacatccacagtgtgcagaggctgctgttgttggtgttgagcatgaggtcaaaggtcaaggaatttatgcttttgtaactttggtggatggtgttccgtatagtgaggaactacgaaaaagcctcataatgacagtgcgcaaccagattggggcatttgcagctcctgacaagatccactgggcaccgggacttcctaaaacccggagtggcaagatcatgcgaaggattttgcgcaagattgctgcacggcaactggatgaacttggggacataagcaccctcgctgaacctgctgtagttgaccagcttatttcgctcagcaattgttaggttgcaacgtaattggatggtggatacatccttgagcgcatgttgcgtttgtctgtaatatgagtagaaggtgcatttcaatatcgagaactcaagtgggacgtggtgacatgttgtcgatgtttccttttaaacttttgtatcagatatcaagataggtccatcagaatgtattattgattgacacagacaaatatatcaataaaattgttaatttttcactaaaaaaaaaaaaaaaaaaaaaaaaaaaaaaaaaaaaaaaa

SEQ ID NO: 110902 - DNA, 401 bp, Zea mays
  Clone ID: MRT4577_32634C.1
cgggcttgctcgctgcgccggcgactaccgacatcgtccttcgtgcccacgagcaaccgataatccgccggcgttgagatgtctggttatatcacgatctgctatctggcgacaagctcctggcgcattcattcacctacaaggagctcgagaccggcggcctgggggacgtcgagggacatggggtcatcaaccggacggctcgcgagatcattgacgcggggggggacgacgagctcaaggaggccttccgcgtgttcgacaaggaccagaacggcttcatctctgctgctgagcttcgacatgtcatgaccaacctatgtgagaagctgacggacgaggaggtggatgagatgattcgtgaagccgacgtggacggtgatggccagatcaactacgag

SEQ ID NO: 110903 - DNA, 219 bp, Zea mays
  Clone ID: MRT4577_32635C.1
gagctcactatttggcggccgcccttctttgttttttttggggcgcaaataacaagactgatccctgagaaatcaagcagtctctgaggatgacttcatgaagacgactacatgccctagcagagttctagaatgggactggcttaatgcctaccgaaactgacatgtcagattacgatcagggtgggatgagtcgcgtactgaaaccactatctactg

SEQ ID NO: 110904 - DNA, 572 bp, Zea mays
  Clone ID: MRT4577_32636C.1
taggggccttttttttttttttttttaaaactggtactttaattatagtaagtatggaaatgcgcagtgtttattttacagcatatataatccacgtgatagatgctgacggtggtcagctgacgactgattccagcaaggtgctcattagcccatacgcctgtttgatctgctgctgcttccgaaggagtttagttgtggtggtggacgtggatcagccggttccgcaggtcgaccacgtccacctcttcgaaccggttctctgggatccagcagcccgtcttggggtccctcatccagaacttgtcctgcttcgtcttgttgttggtcgcccccgacgcatccgctgccgcgacgacgcccgctttcgtcgccgccgctgcagcagcggaggcttgagcattcaccgccatcgcgtgctggacgctgccgtagctccgccggctgaccaggccggacacgaagctgcctatcttggacattgtcacagtaatccaggagacctagctacaagaagctagctggcctgcctatctctctctgtctaggttggagctccgataacggccggc

SEQ ID NO: 110905 - DNA, 366 bp, Zea mays
  Clone ID: MRT4577_32637C.1
cacttctctttgaagctgggaaaaactggcaacctttgccttggatccgacctcaaagggagagtttggtgtttttcaaatgggcgcaaccatttggcaggcccaagaaggcccatttttttccttgggatttaacccagaataacgcctgtcgggggatacagcacccatggatccgcaggccatgctggatgatgcatgggactgctggagccggggataaacacagtacttacaactgacacaaagggaccttcaattaaaaacccaggtgggccaccccaaacacgggacggacggagataaacactttggactagggtaaacaacccggtagcgaacaggataacttggccgcgggggccc

SEQ ID NO: 110906 - DNA, 651 bp, Zea mays
  unsure (1)..(651): unsure at all n locations
  Clone ID: MRT4577_32638C.1
gtcgcatggcaccgcgtnnnacgtaagnncttggnatnncctctagaagncggcnncgcccttgttgtgtttttnnttttttttnntttttnnntttttttnnttttttttttttttttntttttttttttnttttttttttttttttttttttttttttttttttttttttttttttccaaagaaaagcctggggggggttcatggcaaaaggaaaacccccccccggggggcccggggggaacccaaaaaaagggggggggggaacattaatggacaaaatggaaagagcacagcccacccggaaaagcccgcgggtttttttaaaggcagggaaatctcgcaacggatcgggtttattaaacaggcaaaatttataaacccccccaaagggggccgggaattttgaggcggggaaaaaacagggccatggggaaggaaaaaaaaacgggaatgggcccggggcttcaaaaaaaaacgggggggctccggggccttgggcggtcaacgggaaggtcaaggaggataatcccaatccccccaagggggaacataaccccgggggaaagccccttaaaaatgaacgggccgttaaccccccctgaaaggaaaacaacgggggggacggccccagggccggggtcctgggcc

SEQ ID NO: 110907 - DNA, 337 bp, Zea mays
  Clone ID: MRT4577_32639C.1
agccttccgtaaccattacaaaacacaccacgctacgcacattagccacactctcagcgctgtggtctccgatataatacctccttgtgctctttgtgctctttgtgagcagcagcacatgcgctcattattccacaacactgactagttcctagtaccattattacacagcagctcctaccacctacttcaatggtgttcgaacacccagctgttcaagcctatatgctacatcaagcaattactgccagcgacctacatcaaccaatttaccagctacaacaacaatcattggcacatctcactatacaaaccatcgcatcgcaacagaaacgac

SEQ ID NO: 110908 - DNA, 325 bp, Zea mays
  Clone ID: MRT4577_3263C.1
cgcccggttggtatagttgttttatcaccaatccaatttactttttaagggtggggcaaaaccaggaaaccacacattgggggggttaggctcggggaaaccaggacccccccgacccccctaggggggaaatggcaaaaatgataatgggaatggaacttgccgccggtacatttttaactaacacattcccgccttgggggtggggggatacccacaactttaaaaagatacgtactttttaaaaggtacgcgctaaccggcgggggaacgcgcttttggcccgccctggaatgtaaacaaagggttcctgggccttgttttt

SEQ ID NO: 110909 - DNA, 522 bp, Zea mays
  Clone ID: MRT4577_32640C.1
gggggggacttaaaccctttttttggacccaaaaattccccggaaaatccccccccaaaaggggggaaacggaaattccgccccctacaaaaaatttttggaaggcccaaaaaaaaaacctggggggaaaggcgggtttttaaaaaacagattccttaaccttaaacaacaaaggggggggggaaacccaaaagcgggtggaaacccccaactacccggaggcttagggcccaaacaagggagaaccttaaaacaacataaaacggactttggggggaaatcacagaacccccaagggggaaaacccggccagttttgggggaaaccgccccccctcgcattgtttggaaaaaaaaaaaggggaaaaaacaacgggggggggggctaaaaaaataaacattggttaaaaaattttttttccctggaaaatttcccgctccctaaaaaccccaaaacaaaaccccccccttagaataacccctccccccaaccggccgaaaattttcacggggcgataaattt

SEQ ID NO: 110910 - DNA, 297 bp, Zea mays
  unsure (1)..(297): unsure at all n locations
  Clone ID: MRT4577_32641C.1
ggaaaaccaaatcatattttttattgcattattacaaaaccactttacccaaatttattaattaaatcccctttttttaattaaattttccggtttgccgccccgggtanccatatcacaacacatcaataataatttttccaaacaacccttcaatttacctcttccaaatttaccacctcatcaacattcaccaaaaaccatccattcaactgcaatggcaaccgtggaccgatccattttcttccattcccccgtacttaaacacccccactctttttttatgttattcgccca

SEQ ID NO: 110911 - DNA, 328 bp, Zea mays
  Clone ID: MRT4577_32642C.1
ttggggggttttttgggttgtttttttttcccaggggggccccccaggtatttgacaccttctcaatcccccattaaactaaatatattttttatggggtggtggtattaagaaacccccagcgttgggccctttgttttctcgggtcttgtcctacattgggcccccgggtattttcgggccgacccccttgtgtggtacaaaaaccaatcctggggttttaatcgctcccgttaaacctggcgttctgggggtgaaattgttgcaaaccggttcataaaaagggtctccccgggggtttttatctgccaacccttttaacagggct

SEQ ID NO: 110912 - DNA, 287 bp, Zea mays
  unsure (1)..(287): unsure at all n locations
  Clone ID: MRT4577_32643C.1
gcngaagggtgtgtttgtttgtttatccatgtccatgtcaaaacacacgacgattattggtcagcatgtccatgtcaaaacatacatcgatcttgaggttattatgccgttctatatatatagcactgtaatatagtcatccttccggcctctacgttgacgcggcggcggcggtggcgctgggctccggtgctgctgccgccgctggctgaaaccgatggtgctgttggtgttgttgtagtagcggcgacttgcactgggcgcgcatgcgtatgtggtgggtgggg

SEQ ID NO: 110913 - DNA, 868 bp, Zea mays
  unsure (1)..(868): unsure at all n locations
  Clone ID: MRT4577_32644C.1
cctcgagccggccgggaaaggcatcgccgcatctttccaccttccctcccctccactcccgcaatctcgtctccgccgtccgccgccgcgccgtagcaaggtaacagagatcacaacaagttaaagcctcaaggaatgctgaaagatgtgctttcctagaagatatttctgttgcgacatcaaggaccttgctgctccccgagggctgctgatctgctcaactcttgatgacctgatctgcatcgattctacaacgttcagactgcgccacgaccaagccataagaagagagaagatatggagtcgacaggaaagattttgatggagcggtatgaggtggggaggctactggggaaaggcacatttggcaaggtgcactacgcaaagaatcttgagtccaacgagagtgttgccattaagatgatggacaaggacaaagtgctcaaggccgggctttcggagcagataaggcgggagatcacaacgatgcggttggtggctcataagaacattgttgagcttcatgaggtcatggcgacgcggaacaacatctactttgtcatggagtatgtgaaaggcggagagctctttgacaagattggcaagagtggcaagctcacagaggccgctgcacacaagtacttccagcagctcattggtgcggtggattactgccacagccgaggtgtgtatcaccgggacttgaagcctgagaaccttctgttggatgagaatgagaacctcaaggtctcagatttttggactgagtgcactttcagaatcaagggggcagatggcttactccacacccactgtgngactcccagcatatgtagctccagaggtgatcagcaagacaggctatgat

SEQ ID NO: 110914 - DNA, 1177 bp, Zea mays
  Clone ID: MRT4577_32645C.1
cccggtcgacccagcgtccgggcgacctgctctgctgctcctctgcgccgcttcggcctcacgctagctcctccccctgcgtcggcaggcaacggatagatacgcatcgaggcagagggcttggccgagatctccccactaccccgcagcgtctttaaaaccaggacctgcttgtttgattgtttcatcgatcgtcaatctaagtagctagccagcactacagaagggcgtggcaagaatcaggagagagatagcaggggggctagctagctgagctcgtgcgacgaagaatggccggaattggcaggaacatggtggcgccgctcctggtgctcaacctcatcatgtacatcatcgtcatcggcttcgcgagctggaacctgaaccacttcatcaacgggcagaccaactaccccggcgtggccggcaacggcgcgacgttctacttcctggtgttcgccatcctggccggcgtggtgggcgcggcgtccaagctggcgggcgtgcaccacgtgcgcgcctggcgccacgacagcctggccaccaacgccgcgtcgtcgctcatcgcctgggccatcacggcgctcgccttcgggctggcctgcaaggagatccacatcggcggacaccgcggctggcgcctgcgcgtgctggaggccttcgtcatcatcctcgccttcacgcagctcctctacgtgctcatgctccacacgggcctcttcggcggcagcggtggctaccgggaccacgactacggcgtcggcggcgcggccggcgagcccaagggggtcaccagggtctgaggattctgatcgatgcagctcgtacatgtgtcatcatatcaggcgctgctggagtgtgatgacgtaataagtagtacccatatatatatatggtgtgtgttgacgtaccacgtacactacgtacgtgtgtacctagtagctagctagtcagtccatcgtctgctcatctcgtcaggtcatcagatctctcggttctggtttgtacatcagtacgtgcatgcatgtatcccgtgtcaaatgtatttcgtcacccgtcagtttcagccggtcagtgaccaagtttatttcgtcacccctcagttcagtgacattggtgacatgaggtcgtggtgtcaacttttggctcaatgtattatgtacctgatcttttttac

SEQ ID NO: 110915 - DNA, 2010 bp, Zea mays
  Clone ID: MRT4577_32646C.1
cattgccgagcgcggggccggccgggatcgccgcatctttccaccttccctcccctccactcccgcaatctcgtctccgccgtccgccgccgcgccgtagcaaggtaacagagatcacaacaagttaaagcctcaaggaatgctgaaagatgtgctttcctagaagatatttctgttgcgacatcaaggaccttgctgctccccgagggctgctgatctgctcaactcttgatgacctgatctgcatcgattctacaacgttcagactgcgccacgaccaagccataagagtactgttcaccgtcatggatcatgacatgggggaggaaggctaactctttgcccagtcccacctgattggcgccagcagtgtgatttatactttttgcagagagagaagatatggagtcgacaggaaagattttgatggagcggtatgaggtggggaggctactggggaaaggcacatttggcaaggtgcactacgcaaagaatcttgagtccaacgagagtgttgccattaagatgatggacaaggacaaagtgctcaaggccgggctttcggagcagataaggcgggagatcacaacgatgcggttggtggctcataagaacattgttgagcttcatgaggtcatggcgacgcggaacaacatctactttgtcatggagtatgtgaaaggcggagagctctttgacaagattggcaagagtggcaagctcacagaggccgctgcacacaagtacttccagcagctcattggtgcggtggattactgccacagccgaggtgtgtatcaccgggacttgaagcctgagaaccttctgttggatgagaatgagaacctcaaggtctcagattttggactgagtgcactttcagaatccaaggggcaagatggcttactccacaccacctgtgggactccagcatatgtagctccagaggtgatcagcaagacaggctatgatggggcaaagtcagacatctggtcctgtggtgttgttctatttgtactagttgctggttatcttcctttccgggccccaaacatgatggagatgtatcgcaagatacagaatggtgatttcaggtgccctagttggttttcacacaaactcaagaagctcttgtacaagatcctcgaccccagcccagacacaagaatttcagtgcagaagataaaagagtctacctggtttcgaaaaggccctgtggagacccgtacagtaaaggagaaaattctgagtgagaatgacaccacaaatgctgctccagccgttgctatgaggcgcaagaagaatgttcatgaagacgtgaagcccccgactgtcacaagcttaaacgcctttgaaattatatctttctccacaggattggacctctctggcctatttatcagaaaggagtgtaagaaggagacgcggttcacttctgataagggtgccgtgtccatcatctcgaagcttgaagatgttgcaaaagcactgaatctcagggtaaggaagaaggacaatggtgttgtcaagattcaggggaggaaggtggggaggaagggtgtcctggagttcgacactgaaatatttgagatcacggcatcctaccacctcatcgagatgaaacaaacgggcggtgattcacttgagtacaagaaactgttggaagaggacatccggccagcactgaaggacatagtctgggcctggcatggagatgaccagcaacaaaagtagtagctttggatctctcttttttgttccataaaattgttagatctttcacttcagattgattttgttcgacatgtgcgtgttcttcttactagttacattctttctgtttctgtggaccattggactgtattctgtcgtgcaataattgttgggaggcctgagtttgttagtcgttccattctgaaaactggtatctgttctgtaatggttgtccctatcaataatgaaataattgcgtttgatccttgaaaaaaaaaaaaaaaaaaaaggccccta

SEQ ID NO: 110916 - DNA, 429 bp, Zea mays
  Clone ID: MRT4577_32647C.1
tctcactctttcttcattcctcgcgctttcacattcagattcttgcattcacctgttcattcgcttgacttgcttgttacccactccacctcaagaaggtttattgacaagcgcgcgacttctgtacccctgtgccgcgtgtgcccagctcttgtatcctttgtgtcatttttccatcctatcaagctctccaacaaccctcgcacagtcctccatactttggcaaacagtggacttagttctgacgagagcatatatataagcgccacagacaacatcaagccctcgtcctcaaaacccgccctcctcgagtccacaatgccgcccccacctgacattcctctgacagagacagaagcactactgatcgaagcctacaacaggattctaaacgaaccctttgaggacaagtacgaagatctttgggag

SEQ ID NO: 110917 - DNA, 1950 bp, Zea mays
  Clone ID: MRT4577_32648C.1
accatattattgagaccaactagcaacatagaaagcacaatagtgtaccaacaatggcagccaaaatattttgcttccttatgctccttggtctttctgcaagtgctgctaccgcaaccattttcccacaatgctcacaagctcctatagcttcctttcttcccccatacctctcaccagcggtgtcttcagtatgtgaaaacccaattcttcaaccctacaggatccaacaggcaatcgcagcaggcatcttacctttatcacccttgttcctccaacaaccgtcagtcctattacagaagatacctttggggcatttggggggacaaaacatcaaggcacaacacctacaaacccttgagctaggaaagctcgctgcctactctaagaaacgcgttgtttcggcgcaagtttgtccattcgcattggtctgaatactgtagctactagcgcgagtgccactgtggcttggctgccagctcgccactaccccgaggcgtctttaaaaccaggacctgcttgtttgattgtttcatcgatcgtcaatgcaagtttgtccattcgcattggtctgaatactgtagctactagcgcgagtgccactgtgccgcagctgcctgctcgccattactgcaagctgtgttcaatcaaagcttaattaggctccctctacatctgatccagctaagtagctagccagcactacagaagggcgtggcaagaatcaggagagagatagcaggggggctagctagctgagctcgtgcgacgaagaatggccggaattggcaggaacatggtggcgccgctcctggtgctcaacctcatcatgtacatcatcgtcatcggcttcgcgagctggaacctgaaccacttcatcaacgggcagaccaactaccccggcgtggccggcaacggcgcgacgttctacttcctggtgttcgccatcctggccggcgtggtgggcgcggcgtccaagctggcgggcgtgcaccacgtgcgcgcctggcgccacgacagcctggccaccaacgccgcgtcgtcgctcatcgcctgggccatcacggcgctcgccttcgggctggcctgcaaggagatccacatcggcggacaccgcggctggcgcctgcgcgtgctggaggccttcgtcatcatcctcgccttcacgcagctcctctacgtgctcatgctccacacgggcctcttcggcggcagcggtggctaccgggaccacgactacggcgtcggcggcgcggccggcgagcccaagggggtcaccagggtctgaggattctgatcgatgcagctcgtacatgtgtcatcatatcaggcgctgctggagtgtgatgacgtaataagtagtacccatatatatatataggtgtgtgttgacgtaccacgtacactacgtacgtgtgtacctagtagctagctagtcagtccatcgtctgctcatctcgtcaggtcatcagatctctcggttctggtttgtacatcagtacgtgcatgcatgtatcccgtgtcaaatgtatttcgtcacccgtcagtttcagccggtcagtgaccaagtttatttcgtcacccctcagttcagtgacattggtgacatgaggtcgtggtgtcaacttttggctcaatgtattatgtacctgatcttttttacaggaataaaaaagtcaccagcaaccatactgctcttggcatgtgaaaaaaaaaaaaaaaaaaaaaaaaaaaaaaaaaaaaaaaaaaaagggcggccgcccttttttttttttttttttggaccaaacgagttgcatttcatggtagtacatcccatcccagggagaagatacagatcacacatgttccaagtttatgcataagaacacagcacggtttggcctagtatctagatcgcgggcggccgctcgcgatctagaactagcccacgagaccgcggacgcgtgg

SEQ ID NO: 110918 - DNA, 310 bp, Zea mays
  Clone ID: MRT4577_32649C.1
gccgacgccgacgccaccgccgcgcggggccaggccccacgcccatagccgagccgcggagcagagagccggggcgccgcgcgatggcgaacaacgacaggagaaaagactggcggaccgggaccgcggcgccagcggaggcgacgcgcgcgcgcccaagaccaagcacggaagcacgccgggggcggccacccgaaccgtgcccaagcacgagagggggcaccgggcagagcagagcgggcaccacgaaaagagagcccacggcacacaggacaaccaccagaagacgcgagacaaccagcgacaggac

SEQ ID NO: 110919 - DNA, 421 bp, Zea mays
  Clone ID: MRT4577_3264C.1
cgtgcttggagcaccatatagcctggctacaaggatcatctgataaattgcaggatacatggcaagagcaacatccaactgaactaggactagaaaatgagaacaatcacatgtctattttaagcattggtgttatcagcatgaaaagctgtgagcgagcattgttgcatgttgtatgcgagctatgctatcgcaaaaactgaagaatgtcattcgaaaatgtccatacaatggcagaccttgtttatgaagttgaactcattggatttgatgatggaaactacgttaaatacctaactgacattacacttgactagagtatcgcaactacagacaacaaaaatattgaggccaatgcatatctgaaagacaagaagcttgatgaggccatgcagcaatatgatatggctatcgcatacat

SEQ ID NO: 110920 - DNA, 1804 bp, Zea mays
  Clone ID: MRT4577_32650C.1
gacgattggaacccacacccaactcccaagttgcttgcttgatttcgccgagaggagatcgggtcgagtcctacgccgacgccggcgacgaacaaggatggtgaagtcggtgctcggcgacgaggagcacctcaaggcctttgaggaaacgctcgcctcgccctcctctcctccatgtcaagcccaggtgggcctcgtcgtcggcaagctcagctcttcctccgaccgtgccctcatctacgcgttgctccccacgccgctcaccgacgccgccgccccagcatgttctctccgcgccgcccccaagtccaagccttccaagggcggcggcaaagctccttcctcctcggacgcctctctcgacttcgatgtcgaatggatctccgagcacgcgcggcaggtcattcgagcgatttgccaagcttgctatggcagtgcatccggtgtgaggctgctcgtccacatttcttacagtcctcgaagatgggcctgccgtatatgcgaggttgcatcaggaagtctgcgcccgtgcgattttaagtacagcaaactattagcttctcttcaaactttcagatgcacatataattttgagataaggttgacatctgttcaagctgagccgtttaagaaaattattttgaaggcaatcagtcatctcacagaggaagtgcagaatgccagagctttggtagatgggcaactgttttcagaagagatgaacataagtacagaggacccacaccaagttgattttcttgtgccattcaagaatgctgtgcctgttgaagaatgcagtttagagggagttgctgggctcattcgctttattggatctgtcagcgccttggcatatttaggccctaaagaatctatttcagaagctatatctgatctaaaggcggacatcgttacaagtctaaaaagccggttggatatcatccttgatgaggcagatgatggccctgccactgctgaagtggagaaatcaccatctcagaaggccactcaagttatatttcatgagttgagagaaccttacagtttttcattcccgagaagggtcctgataccttggctgagcggcacctatgtttgtgattacttgcaacaaccagagacagcagaggatgcagtggatcgcttcaaggaagtgataggtgcactggaaacagccgtggagaggtcttcaatcctggaaccagaaagcgcagcagcagcttgtagcgtactagaatccttttgggatatggtgcctggatctggcagcggaggacaaggtggatccagcaagctgaaggacagtcattctatacagaaggatgattcaagcaaaggacaaggcggtttgaatttcagtatcgtagccgctctgattgtgctactggttgctctgatagctggactgctcttcactggttccgccggatacccaatataatacctacgtaactaactgcgctgtaccccaccagtagatgcgaaaagcaaagatgttagaaactgttgaagtggagagttgaatttatttaatgttagaagctgttgttcacatctctattgtgttgtgcctgcctgtctaggctatttttgatgagctattggggctcccatggacgagagaatccatacgtcattcctcccttgaacttgaaattatttaggtagccgctctgattgtgctactggttgctctgatagctggactgttcttcactggttccgccggatacccagtaacgtaactaactgcgctgtaccccaccagtagatgcgaaaagcaaagatgttagaaactgctgaa

SEQ ID NO: 110921 - DNA, 1103 bp, Zea mays
  Clone ID: MRT4577_32651C.1
ccggccgggatcaaattggtgattgaagaaatggtgaggaagcaggaagcaggaagcagcagcgctggtcatgctcgtgggctcgtggcatgataaaatttctgcccttccttaccttcaggttaacttttcaagccaggcccaagggtaaagctggtgggccgacgattggaacccacaggcccaactcccaagttgcttgcttgatttcgccgagcagaagatcgggtcgagtcctacgccgacgccggcgacgaacaaggatggtgaaggcggtgctcggcgacgaggagcacctcaaggcctttgaggaaacgctcgcctcgccctcctctcctccatgtcaagcccaggtgggcctcgtcgtcggcaagctcagctcttcctccgaccgtgccctcgtctacgcgttgctccccacgccgctcaccgacgccgccgcccccgcatgctctctccgcgccgcccccaagtccaagccttccaagggcggcggcaaagctccttcctcctcggacgcctctctcgacttcgatgtcgaatggatcgccgagcacgcgcggcaggtgtctaggatgctgctcggtggtatgagtgtcatgggtgcttacgtatgggcttccgaggcatcattcaaggccacatcccctgctgtcctgtcgcaggtcattcgagcgatttgccaagcttgctatggcagtgcatccggtgtgaggctgctcgtccacatttcttacagtcctcgaagatgggcctgccgtatatgcgaggttgcatcaggaagtctgcgtccgtgcgattttaagtacagcaaactattagcttctcttcaaactttcagatgcacatataattttgagataaggttgacatctgttcaagctgagccgtttaagaaaattattttgaaggcaatcagtcatctcacagaggaagtgcagaatgccagagctttggtagatgggcaactgttttcagaagagatgaacataagtacagaggacccacaccaagttgattttcttgtgccattcaagaatgctgtgcctgttgaagaatgcagtttagagggagttgctgggctcattcgctttattggatct

SEQ ID NO: 110922 - DNA, 2102 bp, Zea mays
  Clone ID: MRT4577_32652C.1
cattgggtacctcgaggccggccgggaccttccattcccagtcccaccaccacttgtctcaccgccgccatggcgtcctccaccgcggcctcgccgctcacctgccaccacctcggcagcgttggtgcccgccctcgcctcccgtccctctccatctccctccgccgccgctcctcctcttcctctaagcccacctccctttcccactccctcccctccaagcactcgctggccccaccccccgccgcatccgcatcctcccgtcgcggtctcacccccgtacccgcctccgcctccgccgccgcggctccagcgccggatccagtgccggttccagcaccggctccagcgccggctccagcaccggccgccccgccgaagaagcccgcgctgcagggcgcggccatcaagccgctcctggcctccatcgcgactggcgtcctcatctggctcatcccgccccccgccggcgtgccccgcaacgcgtggcagctcctagccatcttcctctccaccatcgtcggcatcatcacccagccgctgcccctcggcgcggtcgccctcctcggcctcggcgccgccgtgctcagccgcacgctcacgttcgccgcggccttctcggccttcggcgacccgatcccctggctcatcgcgctcgccttcttcttcgcgagggggttcatcaagaccggcctcggctcccgcgtcgcctacgccttcgtcgccgccttcgggtcctcctccctcggcctcggctactcgctcgtcttcgccgaggcgctcctcgcccccgccatcccctccgtctcggcgcgcgctggcggcatcttcctaccgctcgtaaagtctctctgtgaggcatgcggctcgcgcgccggcgacggcacggagcgccggctcggagcctggctcatgctcacgtgctttcagacctccgtcgtctcgtcagccatgttcctcactgcgatggcggccaacccgctctcggccaacctcacagctgccactatcggcgaggggatcgggtggacgctctgggccaaggccgccattgtgccggggctgctgtcgctcgtgctcgtgccgctcattctgtatgtgatctacccgccggaggtgaaggcgagccccgatgcgccacgcctggccaaggagcggctcgccaagatgggacccatgagcaaggaggagacgatcatggccggcacgctgctgcttacggttggtctttggatctttggaggcatgctgaatgtggatgcggtttctgcagcaattcttggcctagcagtcctcttaatctcaggggttgtcacatggaaagagtgtttggcagagtctgtggcgtgggatacccttacatggtttgcagcacttatagcaatggctggctacctcaacaaattcgggctgatctcttggttcagtgagactgttgtgaagtttgttggagggcttggcatgtcatggcaactctcattcggtgtgctggtgctgctgtacttctactcgcactatttctttgccagtggtgccgcacacatcggagcaatgttcaccgcgttcctgtcggtggcgagtgccctgggcaccccgtcgcttttcgctgccatggttctttcattcctctcgaacctcatgggcgggaccacccactacggcatcggctctgctcccgtcttctacggcgccgggtatgtcccattggctcagtggtggggctatgggtttgtcatctccgttgtaaacatcatcatctggctcggggtgggcggcttctggtggaagataatcgggctgtggtgagcagagagcagcacattaactgcgacatcccttttgtttttctgttgtttttttgtcgagtggggggaggaaaactatttcctgaatttgcggtgctacagatgccgctgtccacagttttgtcgtcgacatgatcgcaatgcaacccattcttttttagttggtatcgatacatttgttcgaaaccttccggtggctaattgcgaggccagggtgcagtttttaacgcgcaaaatttgttatataaaaaaaaaaaaaaaaaaaaaaaggagacccctaaaaaaaagggcaacaac

SEQ ID NO: 110923 - DNA, 124 bp, Zea mays
  Clone ID: MRT4577_32653C.1
ggacgcgtggtcggacgcgtggagcagccgccgtcactaggggcggttccagccaccgtcgagatggcgtatccttcggccaattcctggcggcatttcgcggcggcagcacggatccggcctg

SEQ ID NO: 110924 - DNA, 528 bp, Zea mays
  unsure (1)..(528): unsure at all n locations
  Clone ID: MRT4577_32654C.1
ctgctttgtgccgggggttcccccagcactcaagcaattcgagaagcaagactatgggcccaactcggttctgctcgtggatcagatcccttcagtaactcggactcggattcctctagggttcggactcagacttgagtgtctagaatcctacattggagaagattgggtgataatgaggtcttatatgaatattttgcattttatcctctccgctcctcggactcggagtcctcgagggtgcgggctctggcttgcgtggcggggatccttcttcggtgtgctggttgcgtgccccggccgtcgtctctgaatgggtggcgtgttgcccccaacgcgccacagacaaggagttgtaggtagccacggacccgctggtcgtgggggagttcctttttcgtgtgcccggtctcgtaccccttccttcgactataaaagggaggggagatgcccctaagggggcacagacaaatataaaaaagaagccacggncgggtattatcttttaggagagcccggactagtata

SEQ ID NO: 110925 - DNA, 1922 bp, Zea mays
  Clone ID: MRT4577_32655C.1
gcagtgcggagacgggagccagtggccagtgacagtgagcggcgacgttccagtgtccactgtccagtaggcgagcgaggaggtggtccattggccggccatggctcgtctccgctgcgtcttcgtcgtcttcgtcctgctctcgtctgccctccgccttccaggcgacgccattgcctcccgggggcaccatggccccgccgcacacgactacagggacgcgctcgtcaagtccatcctcttcttcgagggccagcggtcgggcaagctgccgccgtcgcagcgcgtgtcctggcgcagggactcgggactctccgacggtcactccgccaaggtggacctggtgggcgggtaccacgacgctggtgacaacgtcaagttcgggttcccgatggcgttcagcatgacgatgctggcgtggagcgtggtggagtttggcggcctcatgaagtcggagctgcagcacgccagggacgccgtccgctggggcgccgactacctgctcaaggccacggcgcacccggacaccatctacgtccaggtcggtgacgcgaccaaggaccacgcgtgctgggagcggccggaggacatggacacccccaggacggtgtacaaggtggaccgtggcaccccgggatccgacgtcgccgccgagactgccgcggctctcgccgccgcctccctcgtcttccgcaagtccgacccggcctacgccagcagccttgtcgccagggccaagagggtgttcgagttcgcggacaagcaccgcggctcctacagcaccgggctggcggcggacgtgtgcccgtactactgctcctactccgggtaccaggacgagctgctgtggggcgcggcgtggctccaccgcgccaccaagagcccctcttacctgagctacatccagacgaacgggcaggtgctgggcgcggacgagtcggacaacacgttcgggtgggacaacaagcacgcgggcgcgcgggtgctcatctccaagtcgttcctggtgcagcgcctgggcgcgctccacgagtacaagggccacgccgacggcttcatttgctccatggtgcccggcacggccacggaccagacgcagtacacccggggcgggctgctgttcaggcttagcgacagcaacatgcagtacgtgacgtcgagctctttcctcctgctcacctacgccaagtacctggcgttcgccaagcagacggtgcgctgcggcggcgtggcggtcacgccgcagcggctgcgcgccatcgcgcgcaggcaggtggactacctgctggggagcaacccgatggggatgtcctacatggtgggctacggcgccaagtacccgcgccgcatccaccaccgcgcttcgtcgctgccgtccgtggcggcgcacccggctaggatcggttgctcgcaggggttcaccgcgctgtacgcgggtggggccaatcccaacctgctcgtcggtgccgtcgtcgggggacccgacatgcaggacaggttccccgacgagcggaacgaccacgagcactcggagccggccacctacatcaacgcgccgctcgtcggcgcgctcgcctacctcgcgcactcctacggccagctctaagctccctagcgttaattgttgccgtgttgattgattgttcggaaattagagcatcgcgatttgacgaccccagtgcaagcaaaaccaaggacgcttcgcttgtgggtcttaatatattgccactagtactcgtaggcgtgatttgtttgttacgcgacgccgctgctggcgcacgtatgtaagcgcggagacaaactgtgctccacggctccaccaagtgtactgctactaaggttgcagctcgcaactctatctgatgctatctactgttttgtttaattaaaaaaaaaaaaaaaaaaaaaaaactcgagcccgg

SEQ ID NO: 110926 - DNA, 365 bp, Zea mays
  Clone ID: MRT4577_32656C.1
tttgggctggtttatgtgcttgatctcgtaccgtcctcggtatcactaggcgacccatctcggacgcggtctcgcgtagggctcggtagtcctcgcaaccttaagcggcaccggtcttcgcctcgcgagttatccagtaccgatcacgacatatcgtagatcaccacggtgtacaagccctagtcacccgatacgcgttattagtactcaacggaaagcgtagtagatccatcagacccatagaaactccacaagtaattcgtaggactcatactcgaacggaggcgtatgtccatcaggaatcacggccacgctaccgaccggtcaagtcagtacgacgttatccgactaccatctgacgacac

SEQ ID NO: 110927 - DNA, 317 bp, Zea mays
  unsure (1)..(317): unsure at all n locations
  Clone ID: MRT4577_32657C.1
ctcgggcataaacacaaactattaccacatcttctattactgtccagtaatgacgcagctgacagcggccgcctacaagcagcacgatgctcctatgcacgacgtcggctctggcgacgggtacgagagcaacaataaggcgcgcgcggggctctgtggcctgctccncgagcgcaagtacgttgacctggcgcgtgcctatcagcgtctgatggaagctccttactccgcgacgctggcgcacacggccaactcgcttctggcagaccgcgtctctgccttgggcgtggctgcccatcgggccactgcatcggtgc

SEQ ID NO: 110928 - DNA, 855 bp, Zea mays
  Clone ID: MRT4577_32658C.1
ataaccccctcattttccaagcccaaacccacacctctctctactcccacccctaccaccacctccaggaacagcgagatccagggctcgagatcgagatcccggccaggcagcaatggcagggacggtgactgtgcccggatcgtcggtgccatcgacgccgctgctcaaggacgagctggacatcgtgatcccgaccatccgcaatctcgacttcctcgagatgtggcgccccttcttccagccgtaccacctcatcatcgtccaggacggcgaccccagcaaggtcatcaaggttcccgagggcttcgactacgagctctacaaccgcaacgacatcaaccgcattctcggccccaaggcctcatgcatctccttcaaggactccgcgtgccgctgcttcggctacatggtctcgaagaagaagtacgtcttcaccatcgacgacgactgcttcgtggccaaggacccatctggcaaagacatcaatgctcttgagcagcacatcaagaacctcctcagcccgtccaccccgtttttcttcaacaccttgtatgacccctaccgtgaaggtgcggactttgtccgtggataccccttcagccttagggagggtgcccccaccgcggtctctcatggcctttggctgaacatccctgactatgatgcacccacacagatggtcaagcctcgtgagaggaacagcaggtatgttgatgccgtcctgactattcccaagggaacactgttccccatgtgtggcatgaaccttgcctttgaccgtcagctcattggccctgcaatgtactttggcctcatgggtgatggccagcctattggtcgctacgatgatat

SEQ ID NO: 110929 - DNA, 514 bp, Zea mays
  Clone ID: MRT4577_32659C.1
ctactgctctttcacaccacatgcccccgcagcagtggatgctgtggcggtgtatggtcgtccccacatgggagagcggcggcggcaccgtcgggaggcaaaggcaagatgttggggcgcgcgccgcaataagagcgacaacaccaagcactacgagatcctgggggtgcccaaggcggcgtcccaggacgatctaaagaaggcttaccgcaagggtggtatcaagaaccacccggacaaggtcggggacccccagaagttaatggagctcgcacaagcctatcaggctttgagtgatccacagaaacgtgagatctatgatcagtatggtgatgatgcccttaaggagggaatgggcggaggatgatcccatgttgatccatttgacatcttctcatcattttttggaccctctgttggaggaggtggtggaagcagctagcgaagaaggcataggatgagagaagatgtagttcacccacttaaagtttctgtgggagatctttacaatggc

SEQ ID NO: 110930 - DNA, 376 bp, Zea mays
  Clone ID: MRT4577_3265C.1
agaggatccaatttttagaggaaactcatataacatttaaattggaccgagtaatcatgtacttgtttcatacacacggtcctcaacacaagggcatcctcaaatcctgtgaacagacagaacctaattagggtaacagcctttctagattgaacgaacaactcaaggattgcgaaatacagaccggtcagcgttgatgacaacgctcaaggacgccaaccaaacacggacgagccacgtgggtcaacacttatcctggtcgaagtggtggctacaagaatcctgaccgttacacttatcagcgccctttaccccatttcttttcttttctttggtttcgttctttgcatgtacgatgatttcccccgagatggtc

SEQ ID NO: 110931 - DNA, 281 bp, Zea mays
  Clone ID: MRT4577_32660C.1
acgatccacagaacaagccaatcatcttcaccatggctcatcatcgacgtatgaagaacttgactagactggtggagatgtacagccggaacaagcagctgcaggagctggtaaacctcatagtcgtctacagcgaccataacaacccttccaaggacaaggaggagcaggccgagttcaagaagatgtttgaactcatcgaacagtacaacctgaaagggcacatccactggatctccacccaaatgaaacgcgtccacaacggcgagctgtaccgctac

SEQ ID NO: 110932 - DNA, 873 bp, Zea mays
  Clone ID: MRT4577_32661C.1
atgagtgtggacgcggacatcgcagactctgttacgctagcgcgagcaattctcccgggaagcaaggcactggcctgccggacccgcagggcagtggctcccagtgcaagccgtgagagggatgggaactggcactgggcccgcgtcacagtggcactagttgcaagcacgcgatacacggctgcgacggatgcatctccccatctaaaatgctctatatgtcgtgaagttcaaggaaaacacacaaggaggagactcacctgtgattatggcatagagacctccgcccatgacgaggagcgactccgtcgcgagtatatgactctggcgagaaattctcgcaccgtcaagggtctccctcatcccaagaaacctctacgagcatacttgctccctagtgataaccattggattgctttcgaggatcaagcgatggggtggatcaatgtcaacgatgactcctctttgttggcatgggttggggttgagactgggtctttatatcgagagcgaaaaacaggtggggctggcttaaggaaccgccagtgcaggcttatggatatgcttcctcatttatcccaagatcaaagggcttatagattctataagatgagaggtggaaactatgatacgtcaaaacaacaagtgtcactagaaatccactataaatggccggaatttcaacaaggaaagctggagaacatgatcgaaggtgcattgtatgacataattgaagatttatgcacattcataatgaaagatgtcattcccattaaagggaaatatcatgatgctaccagtacattagctaggccagagtttaaagtactcacagaaattagtagaatatctcttagccgagatagttattag

SEQ ID NO: 110933 - DNA, 177 bp, Zea mays
  Clone ID: MRT4577_32662C.1
accccaccactttaaaagtgattcttctctatcttaggacaccacaatccccccctctaatcaaagtttatttaaattctaataccaaccctatcaagaactcatccaacccactattaccgctcaaacaaacaaagccctaagaaattttcctctaaactctgtgcgtaacccttt

SEQ ID NO: 110934 - DNA, 1170 bp, Zea mays
  Clone ID: MRT4577_32663C.1
ccggggcctcgaagctcccttcccaaattggcacgcaaaaaaaaactgactgttgctcctctctctctctccctctccatttgggtcccccttctctttctcatggcggcggcgtctggcgtcgacgccgcagggagtggcggagcggcggggcatcccggcggcggccttcgttgaggacgttgaggcctacctccgccaggtcgggctcgacgtcaactccgcgctcgcttttctccaggaaaggctgcagcagtacaaaatagtggagatgaagcttctagcacaacaaagggatcttcaggcaaagattcctgatatagagaagtgcttggatattgttgcaacattacaagctaaaaaggatttgggtgaggcactcatagctgatttcgaattgtccgaggggatctactcccgtgcgaaaattgaggatactgactcggtgtgcctgtggttgggtgcaaatgtgatgctggagtactcttgcgatgaggccaatgccctcttgaagaaaaacttggaaaatgccaaggccagcttagaagtccttgttgctgatctccatttcctgcgagaccagcaaaccatcactcaggttacaatttctcgggtattcaactgggacgtgcaccatcggagaagcaaacaggccgtaaaagaaacctgactacttacatcacgaggccgaccaatgcgactgggacatttcttttttgtaccttctgctacctctggcagattagcccgtcatagcaagcagtttgttgttgtatcggtttgttcagagttttacggtgtgggactgggaacattagtagaaatgtcatttcaattcacttcttttccccgctggatcgcatttcccaaaatatctctaccattcttgcagagaagccttgctatcgccaaactacttggaacattttgtcccgcttcggaacttggacttttttttcgtgtttcttgcgtttttgtagtaaaaaaaacgagctggttcatgtatggttcctgcttttctaagggcccgctaaaatagttcagattgtgcccagaaactgttccgatttattaaaattatacaaatttgtgaatacaaacaacggggaatgattccggagggtcgttccgaagcaaccgaacggccctaaaggggctccttttttgttt

SEQ ID NO: 110935 - DNA, 481 bp, Zea mays
  Clone ID: MRT4577_32664C.1
aaaacacaaaccaacagccaagctcctttaagcaaggaaccccatgtccaggggggttttaggggggtttcaagcccacaaaaacccaaaaaagctctaccaaaaaaaactgacaacttaaatattcccccacacactttcgccaaaacccggtaaactggaagctgaatattattcccacaccccaaaggaatcccctgccctgaaaaaacccacaaccaagcctccctcaatagctttacaaaaattcatgacccccctcccccccaatgggcgccaaaaatcaacaaacctaaccccgggacccggaatagtttcactttttgcttttcgcaaaaaaccgactgaaacctcggttttgtttgtcgggcaactgggggttggggaatgaggaaaacaaaaaggatctcgatcgatgcttccgccccttggaggtgtttgaaaaagggaaagggctaacctccgcataaaaagggatcat

SEQ ID NO: 110936 - DNA, 200 bp, Zea mays
  unsure (1)..(200): unsure at all n locations
  Clone ID: MRT4577_32665C.1
cgccccggaagacccggggcgacccacgcatatcaaaacccgcgngaggcagagcccaggaggggggcagaacaccggaaccccccaagaacgaacggagccggacaacacaaacagagcgcccaccgaggccaccaaaacggccacacacagggagggcgacccacccacaaaggaaaaaggccgggagcccgcaccag

SEQ ID NO: 110937 - DNA, 335 bp, Zea mays
  unsure (1)..(335): unsure at all n locations
  Clone ID: MRT4577_32666C.1
gccccccaancatcacccattcgagcgatgttaaatttaaatttncgtgaccttccctttccccttccatctacttgaatatttgaaaaaaaacaatttttttataaaaatccccatttaatcttaatacaatatatagttccttccatatcaaatggttatcgaaagcgttcccatccgtttacgacatacatatattactcgctcaactcctgaactgaactccacttcaccctcttgcatgcattacattcatgcatacatggttcattcatttcaatgtgctttgcttcaagaaagattaaattttgcaggaccttttgcaattctctctt

SEQ ID NO: 110938 - DNA, 207 bp, Zea mays
  Clone ID: MRT4577_32667C.1
tcccactcgtccgcccacgcgtccgccctcatttactcccatgccatcccggacgcggggggggattcttcctccttaacctgtatcgcctcggatcacaagcactggcaaaagtttacgctactgctgctgaaatactctgccgcacctatgtctaactacactggccgtactatacccaagttcttctaatgtgacttgaacaac

SEQ ID NO: 110939 - DNA, 280 bp, Zea mays
  Clone ID: MRT4577_32668C.1
ccccctgcactcgtgcataaaatcagaatttgtcttttgggacaatgcacatgggttatattcttgtttctaggaaacttcaatgggaggaaggaatccccacacctatggtggggagggatgaggaaatccacctgggggtcgggcaagcattaagcactcttgccgaaccaaatcggcgggaaggaaacggctaacaagggttagagggatcccaagggggggccgctattcaggcttttggagttcaaatcctgaacgtttaacctatcttgttttt

SEQ ID NO: 110940 - DNA, 192 bp, Zea mays
  unsure (1)..(192): unsure at all n locations
  Clone ID: MRT4577_32669C.1
aaaacacaaggagaagcttttntngacatnatnnatnnagntacagnnncagataaatngnacaaccntnttaagccaaaattatggtaggaaacgatctgccaatttttaggttttaaaccgaaacaagaaaaaacaccgttcatgtgaagaagaaaatagccaanagaaaccacatgggtatgaagtaat

SEQ ID NO: 110941 - DNA, 224 bp, Zea mays
  Clone ID: MRT4577_3266C.1
cgtaacggtgcgcgcggaggccaggaagagcgtgctgatcgcgaacaccgacggcggagggcacgctcgtatagggttctacttagacaaggagctgctcgccgacgggcacgccgtaaccgtgctcaccgtcggcgacgaggcctacgacaagatgaagaagcccccgttctcccgcttctcggagctgacgagcgccggcgggaggaccgtgtggggagacc

SEQ ID NO: 110942 - DNA, 786 bp, Zea mays
  Clone ID: MRT4577_32670C.1
ctctttcttcacggagattgctgtcgaatctcgctagagtccagtgggcctggagttcatgagaccaccaaggctgatgatgaactacatcgggctgctgtggagcaaccagggcgctctcaacttggtcctgcaggatcaccacttcagcgtcttcgtgtccgaggatgaaggcttcaactcggtggtcagcctcatcatcgacatgatctccagcttggagaaacatctcgtggacgcttcccattccattgcggaacatggattgaggtacatattcttgatgaacaactgtgatttcatcacgcagcaggtcagatccttggaccttccggcctggtttccgtcagacgacagcaagattcagggctacatagatgcatacctgcacgcctcttggacaccggtgctgtcttgtttgtacgtcgacatacctttcggtccgcgaagatacgcgtcgctatccaaatttgagtcacaattcaatactatttgtgactcgcataggctctggaaggttccagatcctgagcttaggaagaggttgcgcaaagccatcatcgagaaagtcattccatggtatgccaggtatttggagcagcgagcagcgacagggaggagaaccacatcccgcagcagtaccccacatcaactgcaggaagtcctagaagaactgtttgaaggataaatagcaacgactgctaggytttktctttctatcyatctttttctttctttcagttggatgatttaagacgccaaaagtccagctctatgtgtctgcgg

SEQ ID NO: 110943 - DNA, 383 bp, Zea mays
  Clone ID: MRT4577_32671C.1
gcgcgtgagttcacttatccaggaaagggtagggtactcatggcgccgccgcagccaaagtaaggcctgttcgttggcatcaactaaggtcatgtcatcaccaagcgcaagctgacttccctcccgtgccaccgcaaggggaaatcaactaaaagggtgagtatggtcatgggcctgatcagagacgtagatgggtttgctccttatgataatcatatgactgagctcctgaaggttgggaaggacaagcctgccctgaaacttacttagagaaagcttgcaactcacaaaagggcagggaagaggatagaggagatgactggcgtcctcatgaggatgaggacgggtgggtacgcacactgactagaagaaataaagagcat

SEQ ID NO: 110944 - DNA, 861 bp, Zea mays
  Clone ID: MRT4577_32672C.1
cctccctccctcctccattggactgcttgctccctgttgaccattgggtattctgaaccatcgagccatggctgccaagctgactcgcctccacagtcttcgcgaacgccttggtgccaccttctcctcccatcccaatgaactgatagcactcttttccaggtatgttcaccagggcaagggaatgcttcagcgccatcagctgcttgcggagtttgatgccctgtttgatagtgacaaggagaagtatgcaccctttgaagacattcttcgtgctgctcaggaagcaattgtgctccccccatgggttgcacttgctatcaggccaaggcctggtgtctgggattacattcgggtgaatgtaagtgagctggctgtggaggagctgagtgtttctgagtacttggcattcaaggaacagctggtggatggacaatccaacagcaactttgtgcttgagcttgattttgagcccttcaatgcctcctttcctcgtccttccatgtcgaagatcctcattgttaccaggctgttgcctgatgctgctgggactacgtgcggtcagcggctggagaaggtcattggtactgagcacacagacatcattcgcgttccgttcagaaatgagaatggcatcctccgcaagtggatctctcgttttgatgtctggccatacctggagacatacactgaggatgtttccagtgaaataatgaaagaaatgcaggccaagcctgaccttatcattggcaactacagcgatggcaacctagtcgccactctgctcgcgcacaagttgggagtcactcagtgtaccatcgctcatgccttggagaaaacaataccccactcggaatctac

SEQ ID NO: 110945 - DNA, 616 bp, Zea mays
  Clone ID: MRT4577_32673C.1
gcacgaggctccattggactgcttgctccctgttgaccattgggtattctgaaccatcgagccatggctgccaagctgactcgcctccacagtcttcgcgaacgccttggtgccaccttctcctcccatcccaatgaactataccaatgatgttcaacgttgttatcctttctcctcatggctacttcgctcagtccaatgtgcttggataccctgacactggcggtcaggttgtgtacattctggatcaagtccgtgctttggagaatgagatgcttctgaggattaagcagcaaggccttgatatcactccgaagatcctcattgttaccaggctgttgcctgatgctgctgggactacgtgcggtcagcggctggagaaggtcattggtactgagcacacagacatcattcgcgttccgttcagaaatgagaatggcatcctccgcaagtggatctctcgttttgatgtctggccatacctggagacatacactgaggatgtttccagtgaaataatgaaagaaatgcaggccaagcctgaccttatcattggcaactacagcgatggcaacctaatcgccactctgctcgcgcacaagttgggagtcactca

SEQ ID NO: 110946 - DNA, 510 bp, Zea mays
  Clone ID: MRT4577_32674C.1
agtacctgtccgacgccagggcaggaagcctatcgacgttcttcgacgtctgtggcagtgcgtgggaggggtactggagggccacatgtccgaccgactgaacgcgcgcgcgatcacgaggcgcgagcttcacttactgcgcgatcccgagctcttactggaccgcatgaccggagcgtgtagatggcgtggaacgtctcgctcatagttcgttacggtgatgatcgagaacggaccctacgcgctgatcacgactgcggcgtacgtcgacctatgcacgcacagatgggtcaacgagcatctaccgagctgtggtcacagggacagcgatcatcgacggaactgggtctgacggagccgacatcagagccgtggtgacggggtacgtatagtgcaggagctggagcagccgtgttcaccatgctagtggctgatgctctcctcgctgggctgatcttgagcaagctcatgtgcgccgagctgcaagggaaaacgcataccagcgtgagc

SEQ ID NO: 110947 - DNA, 128 bp, Zea mays
  Clone ID: MRT4577_32675C.1
tatgatgattctattcatgcaaacaatgaaatcgctggctaccgaggttgcgtggctgcacgctcacgcgccacggggatttcacgctcggcgtctggccacgtgcctacgccaccgtgcgccatggt

SEQ ID NO: 110948 - DNA, 3455 bp, Zea mays
  Clone ID: MRT4577_32676C.1
aattcggcacgagggttttgctataagattcctgtgttcctgttgagatgaatcatatatagtatagctgcatactacaaatctgtttttcaaatttaggttgctttggcatgatctatttttttgtcagacagactttctaagtggtagctcttgatttcttgttcttgtacaactggtgctgctgaatcttgaccgtatagctcgaattgcagtattctgaaccatcgagccatggctgccaagctgactcgcctccacagtcttcgcgaacgccttggtgccaccttctcctcccatcccaatgaactgatagcactcttttccaggtatgttcaccagggcaagggaatgcttcagcgccatcagctgcttgcggagtttgatgccctgtttgatagtgacaaggagaagtatgcaccctttgaagacattcttcgtgctgctcaggaagcaattgtgctccccccatgggttgcacttgctatcaggccaaggcctggtgtctgggattacattcgggtgaatgtaagtgagctggctgtggaggagctgagtgtttctgagtacttggcattcaaggaacagctggtggatggacaatccaacagcaactttgtgcttgagcttgattttgagcccttcaatgcctcctttcctcgtccttccatgtcgaagtccatcggaaatggagtgcaattccttaaccgacacctgtcgtccaagttgttccaggacaaggagagtttgtaccccttgctgaacttcctcaaggctcataactacaagggcacgacgatgatgttgaatgacagaatccaaagccttcgtggtctccaatcatccctgagaaaggcagaggagtatctactgagtgttcctcaagacactccctactcggagttcaaccataggttccaagagcttggtttggagaagggttggggtgacactgcgaagcgtgtactcgacacactccacttgcttcttgaccttcttgaggcccctgatcctgccaacttggagaagttccttggaactataccaatgatgttcaatgttgttatcctttctcctcatggctacttcgctcagtccaatgtgcttggataccctgacactggcggtcaggttgtgtacattctggatcaagtccgtgctttggagaatgagatgcttctgaggattaagcagcaaggccttgatatcactccgaagatcctcattgttaccaggctgttgcctgatgctgctgggactacgtgcggtcagcggctggagaaggtcattggtactgagcacacagacatcattcgcgttccgttcagaaatgagaatggcatcctccgcaagtggatctctcgttttgatgtctggccatacctggagacatacactgaggatgtttccagtgaaataatgaaagaaatgcaggccaagcctgaccttatcattggcaactacagcgatggcaacctagtcgccactctgctcgcgcacaagttgggagtcactcagtgtaccatcgctcatgccttggagaaaaccaaataccccaactcggacatctacttggacaaattcgacagccagtaccacttctcttgccagttcacagctgaccttattgccatgaaccacaccgatttcatcatcaccagcacattccaagaaatcgcgggaagcaaggacaccgtggggcagtacgagtcccacatcgcgttcactcttcctgggctctaccgtgtcgtccatggcatcgatgttttcgatcccaagttcaacattgtctctcctggagcagacatgagtgtttactacccgtatacggaaaccgacaagagactcactgccttccatcctgaaatcgaggagctcatctacagcgacgtcgagaactccgagcacaagttcgtgctgaaggacaagaagaagccgatcatcttctcgatggcgcgtctcgaccgcgtgaagaacatgacaggcctggtggagatgtacggcaagaacgcgcgcctgagggagctggcgaacctcgtgatcgtcgccggtgaccacggcaaggagtccaaggacagggaggagcaggcggagttcaagaagatgtacagcctcatcgacgagtacaagttgaagggccatatccggtggatctcggcgcagatgaaccgtgtccgcaacggggagctgtaccgctacatttgtgataccaagggcgcattcgtgcagcctgcgttctacgaagcgttcggcctgactgtgatcgagtccatgacgtgcggtctgccaacgatcgcgacctgccatggtggccctgctgagatcatcgtggacggggtatctggcctgcacattgacccttaccacagcgacaaggccgcggatatcctggtcaacttctttgacaaatgcaagggagatccgagctactgggacaagatctcacaaggcggcctgcagagaatctatgagaagtacacctggaagctctactccgagaggctgatgaccctgaccggcgtgtacgggttctggaagtacgtgagcaacctggagaggcgcgagacccgccgctacatcgaaatgttctacgccctgaagtaccgtagcctggcaagccaggttccgctgtccttcgattagtacggggaaagaagaagaagaagaagcccaggccggagaaccatcgcctgcatttcgatctgtttcaccgcaattcgcattgttagtcgtgtattggagttatgtgtacttggtttccaagaactttggttccttcttgtttttttttcctttcttgtttgagcgtttttgggcagcgctggcctggttcctagtatggtgggaattggctgcaccttttgcttcgaataaaaatgcctgctcgttcacctgtcttccggagtgcaatgcgatgttctgttgcccaggtcgtggttctgactgatggcgatgttgtgttcttctgttaatcgcctgttttaacgtggtaggctgatgcttgttcttgttgagaaagcttgctgtgccagacatggctgcttgaatacaagtgaagaaaaaaaaagccatgccaagtaaagttgcacaaaatttcaactgctcagtggacaactggaccatgttcttggttattgcagttgcagggcttcacatggcgtttggacagcagtcttggattgatgcataaagaggtggtggttaatgaggacgcaaggccgttccctcagagtcagtcacagcctcacaaggttgcagagctcacggttctcttccctttccgcctcctgtcacatcggaattgttgtttacgccatcagcccatcacccaccaccaagtctatgtttctgtactggatctttcaatggcggaacgcgcttagttctttggcacagttgaatcacatgatctaatccgatgtctggcaaaaacaaaaaaaaaaaaggccccctag

SEQ ID NO: 110949 - DNA, 3319 bp, Zea mays
  Clone ID: MRT4577_32677C.1
ctaccatctgcaccagctcggcacctcacgctcgcagcgctaggagcctaggagcagctgcccgtctatttattggtccctctcccgtcccagagaaaccctccctccctcctccattggactgcttgctccctgttgaccattgggtattctgaaccatcgagccatggctgccaagctgactcgcctccacagtcttcgcgaacgccttggtgccaccttctcctcccatcccaatgaactgatagcactcttttccaggtatgttcaccagggcaagggaatgcttcagcgccatcagctgcttgcggagtttgatgccctgtttgatagtgacaaggagaagtatgcaccctttgaagacattcttcgtgctgctcaggaagcaattgtgctccccccatgggttgcacttgctatcaggccaaggcctggtgtctgggattacattcgggtgaatgtaagtgagctggctgtggaggagctgagtgtttctgagtacttggcattcaaggaacagctggtggatggacaatccaacagcaactttgtgcttgagcttgattttgagcccttcaatgcctcctttcctcgtccttccatgtcgaagtccatcggaaatggagtgcaattccttaaccgacacctgtcgtccaagttgttccaggacaaggagagtttgtaccccttgctgaacttcctcaaggctcataactacaagggcacgacgatgatgttgaatgacagaatccaaagccttcgtggtctccaatcatccctgagaaaggcagaggagtatctactgagtgttcctcaagacactccctactcggagttcaaccataggttccaagagcttggtttggagaagggttggggtgacactgcgaagcgtgtactcgacacactccacttgcttctcgaccttcttgaggcccctgatcctgccaacttggagaagttccttggaactataccaatgatgttcaacgttgttatcctgtctcctcatggctacttcgcccagtccaatgtgcttggataccctgacactggcggtcaggttgtgtacattctggatcaggtccgtgctttggagaatgagatgcttctgaggattaagcagcaaggccttgatatcactccgaagatcctcattgttaccaggctgttgcctgatgctgctgggactacgtgcggtcagcggctggagaaggtcattggtactgagcacacagacatcattcgcgttcccttcagaaatgagaatggcatcctccgcaagtggatctctcgttttgatgtctggccatacctggagacatacactgaggatgtttccagtgaaataatgaaagaaatgcaggccaagcctgaccttatcattggcaactacagcgatggcaacctagtcgccactctgctcgcgcacaagttgggagtcactcagtgtaccatcgctcatgccttggagaaaaccaaataccccaactcggacatatacttggacaaattcgacagccagtaccacttctcttgccagttcacagctgaccttattgccatgaaccacaccgatttcatcatcaccagcacattccaagaaatcgcgggaagcaaggacaccgtggggcagtacgagtcccacatcgcgttcactcttcctgggctctaccgtgtcgtccatggcatcgatgttttcgatcccaagttcaacattgtctctcctggagcagacatgagtgtttactacccgtatacggaaaccgacaagagactcactgccttccatcctgaaatcgaggagctcatctacagcgacgtcgagaactccgagcacaagttcgtgctgaaggacaagaagaagccgatcatcttctcgatggcgcgtctcgaccgcgtgaagaacatgacaggcctggtcgagatgtacggcaagaacgcgcgcctgagggagctggcgaacctcgtgatcgttgccggtgaccacggcaaggagtccaaggacagggaggagcaggcggagttcaagaagatgtacagcctcatcgacgagtacaagttgaagggccatatccggtggatctcggcgcagatgaaccgcgtccgcaacggggagctgtaccgctacatttgcgatacgaagggcgcattcgtgcagcctgcgttctacgaagcgttcggcctgactgtgatcgagtccatgacgtgcggtctgccaacgatcgcgacctgccatggtggccctgctgagatcatcgtggacggggtatctggcctgcacattgacccttaccacagcgacaaggccgcggatatcctggtcaacttctttgacaaatgcaaggcagatccgagctactgggacaagatctcacagggcggcctgcagagaatctatgagaagtacacctggaagctctactccgagaggctgatgaccctgaccggcgtgtacgggttctggaagtacgtgagcaacctggagaggcgcgagacccgccgctacatcgagatgttctacgccctgaagtaccgtagcctggcaagccaggttccgctgtccttcgattagtacggggaaagaaggagaagaagaagaagaagcccaggccggagaaccatcgcctgcatttcgatctgtttcaccgcaattcgcattgttagtcgtgtattggagttatgtgtacttggtttccaagaactttggttccttctcgtttttttctttctttcttgtttgagcgtttttgggcagcgctggcctggttcctagtatggtgggaattggctgcaccttttgcttcgaataaaaatgcctgctcgttcacctgtcttccagagtgcaatgcgatgttctgttgcccaggtcgtgtggttctgactgatggcgatgttgtgttcttctgttaatcgcctgtttaacgtggtaggctgatgcttcttgttgagaaagcttgctgtgccagacatggctgcttgaatacaagtgaaggaaaaaaaaaagccatgccaagtaaagttgcacaaaatttcaactgctcagtggaccactggaccatgttcttggttattgcagttgcagggcttcacatggcgtttggacagcagtcttggattgatgcataaagaggtggtggttaatgaggacgcaaggccgttccctcagagtcagtcacaaggagtgtattcaaagttcaaactcactgttgcgtgtaaaagagcacacctgctgatttagacatcgcagacagactagttgctattatttgtcagagaacactgcagttgaatattcatagagcgacttcattatcac

SEQ ID NO: 110950 - DNA, 351 bp, Zea mays
  unsure (1)..(351): unsure at all n locations
  Clone ID: MRT4577_32678C.1
cccgcgtcctgtcttctgctcggcctccggttcggggtgggggggcgccggttgccgtctcttcctcgtggcgggggggcggggtggtgccctttgcgcctgggtgtgttctctggttttgctgtcgccgcgctggggcgtgggctgctggtttcgcctcgcccgcggggcttgtttccttttttgctgccgccggggttctgctcccccggcntcgctgggtgccttttggcttctgcttgtgggctttgctcgcgtgctggtttctctgcttttttgtgcgtttttttttgggcggccgctctggcggttccttgctctcgttcgcgtgcntgcggcgtcgtggctctt

SEQ ID NO: 110951 - DNA, 474 bp, Zea mays
  Clone ID: MRT4577_32679C.1
cgtagtccgacccaagcctctacataaagtcgcttgaccaccgcttcacttccctccattccttcgccctatcactcaagctgtagccaattcaaacacctccaccccactctcattcctctctgtcatacccgcacgcactttcgcaaggaccttgacttctccttctgtacatattcttatttcctgtaaagcgtttaatcgcccgccatgtcgaccccctctcgccgccgtctgatgaaggacttcaagcgcctgcagagtgaccctccaggtggcatctctggtgctccttgctctgataatatcatgctgtggaatgcagtcatctttggtccaggtgatacgccctttgaagacggcacattcaagttgctgctccagtttgacgagacgtaccctaacaaaccaccgacggtcaagtttgtgtccaagatgtttcatccgaacgtgtatgccaacggcgagctgtgt

SEQ ID NO: 110952 - DNA, 628 bp, Zea mays
  unsure (1)..(628): unsure at all n locations
  Clone ID: MRT4577_3267C.1
tttttggacgttttccattaggccttccaatgtcttcataatcccctaaatagacttgtgaacaatggacaagcatgtctaaattttcatgtctgaacctatgtgctgcttgttctgttcatactactaggcctatgagtattaatttttatttgattggattagatcaagactctcactcccctgttcagattaatactaaattttatttgatttgattagatcggattggttgggtgtgcatttgttgcagctcgagctgtgtgtgtaattgatgcagctggttcgcttaatttactaatgacctcgctcgttacacttgatgctctgcagtagattaaaggagccctagctttcggaggacaacccagatgccttcaaagttcaaaatgacggtgatgaaggtggacaagaaacaaaattttggatggttcaaaattttgctataggtcctagcaacgcttatgtgttgctataggggggttattttgtagtgaactcccaggccatatgctagcttactttgaggagtgcccactatttgtgcatgctacaggcgctatcattacatttccatgacctgtaaagtggtgacatctntaaatacagaatgaccacattagcgaac

SEQ ID NO: 110953 - DNA, 228 bp, Zea mays
  Clone ID: MRT4577_32680C.1
aaaaggcccgggcagggaaatggatactaatataggagtatagaacaacatacacaatactttggcaatttatcagtcccagcaaaacaaaatttcctgggggggggaaaaattatatcaccaatagctaaattcaggcaattgaagcaacaaggaaaagggggagccggatgcctccgtaaccaaaaaaacaaggtaaaccttgtacggaaagaatcaaaccttaag

SEQ ID NO: 110954 - DNA, 373 bp, Zea mays
  Clone ID: MRT4577_32681C.1
accagcagggggcccaccgggcaaaacgggaaccgcacccgggggcgggcaagctttccaaataggggattaatgagggaaatgggagtacgggggaaaaacgggaaaaccggggaacagggggaaaagggtacaaagccccaaaaccacaaagcaggaggccagaaacgaaaaagggggggggctcaggggccgaactaaagaccaaaaacccggttggccaccaggacccatgacccggcaaaaaaacgggaaaaccggcttcccaaatggataaacaaaccggccaatggggggggaagggggattggcaccaagggagggcctttgttttactggttaagcggaaaaaagggaaagcgcttaaaacctc

SEQ ID NO: 110955 - DNA, 1243 bp, Zea mays
  Clone ID: MRT4577_32682C.1
cactagcaaaataacattaaaataaaagcacaacattcattcagctccatcgtctaagttcatttacaaaagaactgaagatgactagggctcgcctaatgcttcatggatttggaggccgggtcagaatgaacttcgtgtcaataaggctcgcgatcgaccaggcatgagggcgtacttgttcttcaatgtcatccaactcctcatcgctacggccagcagcaaagccctccacgatcacagtggcatcaatctcatcgaagttggagaccatctgcccaatggccatgctgctccagtggaacgcaccttcgacgacgacgcgctccacgtggcagggcatcgcatgcagccaattgatcagacgaaccatgatcggtgtcagaggagagaggtgggcacacaccgtgcccatagctagccgaagcgcctaacgctccgtgcttcactctaagagcgagttctctccctggacctgtgtggcgacaacatcatcatcggcaagcgcgggcttgcacatctcgtcctccgtcgccttcttcagctcctccaccactttcccggtgtcttgggcattagagaacattttctggagctctgtggaaggaaaggcttgagcaacctagagtgtcagttgacagaaacacacaaccaaaagaaggacttaccttcgaccgccttgcgctctcttgagagctccaagtttgcctcctctaggcaagcattttccaccctcagggtccactcggcctccttggcccaatgattcaactcatgcatgtccccctgaagatggcccctctcctctcgaaggaggttcgcgctgctccgcgctcgctacgttgcgtgcgcaagcacatcacctctccacaaagcctttcagcctcagcacgaagtgaggcgagctcgtgctttctctcctccgaatgggagacctccgcatgcagctgctccaccttctgtcatgcagttagcaacacctccctctgtgccatcgatcgataaaataggcgctggccgatggggagcaggtcccacatcatcatagtgcaggctatcaacatcgcctcctcgaaattgtcgaggcagcgctcaatagtctctagacctttgtcagctctagcagatgctccctcgatgagctgccattgctccacatccatatcctctccttccaggccttcgagaatgatggggtgacccctcggaaccttacccgagaatgggcagcgcagggagcacc

SEQ ID NO: 110956 - DNA, 310 bp, Zea mays
  Clone ID: MRT4577_32683C.1
tcggtatctatccccttgccttacctaacaatctcgcgaatccaaagagtgtgagaggcggttcgctaaaccatcgacgggaaagaagacgattctaaaccccgaagcccaagaatcatgggcgtcaacgcttaaccctacttgttcaccaccggcaaaccgtccaccccctgcggccaccggtcggcgttcggcccgttccccttcattttcgttcgcgccggcgtcgtattcccccgggcccggtacttaatctattggcttttcggcggcgggaacgcgttcttcaacaccgttcggcttcctgcgc

SEQ ID NO: 110957 - DNA, 310 bp, Zea mays
  Clone ID: MRT4577_32684C.1
atccggctcgagttctgactgatccgcagttttttatggcgtctcctgagcgaccaaggggggtgcggggttctagacgggcaataacatataacgggacgcgctcttggcctgtgcctagacgcacattgatgaagacggcactacacatgtgtacgctcagtgctactgcttgcagccccgacaggcatgtaaaaagacctttcctttactgacagatgctgagtggaaatcggtactggcactaccctgtcgcttgggggtatcatgtgcgccgtactatatgcggtaaatgagaccattcgtccta

SEQ ID NO: 110958 - DNA, 649 bp, Zea mays
  unsure (1)..(649): unsure at all n locations
  Clone ID: MRT4577_32685C.1
gcagccaatggagcatgggtccagcccttcaggctctatgatcctcgtgtgcctgagttactgaagttgctgcaccaagatactttctttccttcagaaaagttcatgatgactgaagtaattgaattgttgggtagttttggattgaaaagaaatttcgggtttagtactttgcttgacatggcaaggtcagtttcactggtgcagaattcaggacaaggtgatgcgtttgattatgggcaaaagctacttgcctatctaaacattcttgagtccaaaacttcaaagatggagggcggagaaacttatcttgaggatgggaatctggaagcatctgaaattagtgaaactttggaacctaacaatcacggggatgtgtgtgatccatgcgaccaaactagtgtatctttgttctcaaatttcaattatgatatgccagaagatttattttggtcagagctgaaaaatatttcttggtgtccggtgcatgttgcaccattgctcaaaggacttccatggttcatatccgaagatatcatagcacctccagtcatcacaaggccgaaatcacagatgtggcttgtttcatcaaaaatgcgaattcttagtgcagattcctgttccatgtatctgcanagaaaactaggct

SEQ ID NO: 110959 - DNA, 523 bp, Zea mays
  Clone ID: MRT4577_32686C.1
tttttttttttttttttatttaaatttcttgtcacatagaacataaactaaacgtaaaaagaagatacataaactaaacgtaaaaagatactgtattctttaaacatagacccataacttttacacgagaacttccactgtacttctagctggagacacacgtaccaagaagatagcgaaaagacaagaatacgcctgaatcttctctcctgcgttcatcgagcgtggtgttcggtgccgtcgctgcggtggcctcgccccacaaccgtcctcgccgaaccgcaggctgagcaccgcgccagccccgcgaccggatctcggtcgcgctagcccactgacggtggaatccgcggccagatctcatccgccccaactccacctacgctgcgtacctgtgcaggaggagagagacggtgctgggggagaagtggagggacgctgcggccactggaggagggccggaggggagagacggagcgacagtagggtggtggggccgtcgtaggacctcgtgccgaattct

SEQ ID NO: 110960 - DNA, 359 bp, Zea mays
  Clone ID: MRT4577_32687C.1
attcggctcgagccgaggtgactccgtgcgttcgaagccagagccagcggaaccgaacgggggcgagacccccagcagctggcgagatggacggtggccccggcgaggaggggaagcacgagcggcacctggtgctggcccacaagctcttccttgtatcccacccctccgttgatgacctatccaaggtcgcccttcgatccgaagtcctacacaccgtgaaatccactgatatggcgacgctgtttgagtcgactggacgccgggccctgtgcttgagggggacgccgcgctgctggccgagatgcacgggcggagtgacaaggagatccgcaagcttcatgagacaattgctgatg

SEQ ID NO: 110961 - DNA, 955 bp, Zea mays
  Clone ID: MRT4577_32688C.1
catcgagtacctcggggccggcaggcctaggcttttttgaggagcgcggactagggagtagggaggacgggacgggagagagagagagaggcgcgtgcgttcgtggtcggtgccggtgcgtgcgtggcgtggtggccgctgccgtacgtgatccgtccaccccctctcctcttccgacgccggcgacagcgggaggtactcccggggaggaatggccgtggcaagggctccgctcggcgcggttgctgcgatggcggtggccgctctcgtcttcgccatactcatgaccgccgccgctgcggcgcaggcaccggcgcccgcgcccaccagcgacggcacatcaatcgacctggggattgcgtacatccttatgctggttgccctagtgctcacctacctgatccacccgcttgacgcgtcctccccctacaagctcttctgatccctgcgcctttccgtttggtcatgcggttaagggcgcgataggattttgagttaggcaacgtgcttaggtgaggctgggaggtttaggatgatgattgcggtcatctggtcttgcttggtatgatgtattggaggctcgaagctgttggtgttctgattggttttgtatcggacggactccatgatctttgtgctcagtccctcagttctgctctgttttggctggtgccgctcggtgtatgagctctgctctgcttgccgttgcaagttgcggcagcaggcacgtgaagagtggatgtgcctggcacagctgcctgacacgcatgcgtgtccactccttcctgtcacgcatgcaacttttgatattcaatggacttctaaacatttagattgtaaaaaaaaaaaaaaaaaagcggcctgttagggtatacccacccccatttaatatatggcctcttgagaggtatttaaagggtccatgaaaaaaaaaacataagggagtctatttgtc

SEQ ID NO: 110962 - DNA, 286 bp, Zea mays
  Clone ID: MRT4577_32689C.1
tcccgggtccacacacgcgtccgataaagcgtacgcacgcactcgcctccgacagcgaacgcgcaacgtccttctcccgcgccgcccggccggccggtccctgttccctctcctcccctcggagcagcaggaccaggagcaatcgcgttcgtcctctgcgctgcgcggcccgccggcctgaccaagcatagcttatcggccggagctggatgaccgaacgatgcatcatgacctcagaaactcagatagaataaacccggaacaagcccatccagtgatgtccgcg

SEQ ID NO: 110963 - DNA, 362 bp, Zea mays
  Clone ID: MRT4577_3268C.1
cggacgcgtggggccggaaaggtcagggcctgctcgcgctcttcctcctcggcgcgctcggcgtccagcgcccacgcgccggcgccgacgctgccccatggcttggacatggctgccgccggtgcgagatctagggtttggtggtgctcggaggcggacggaggtgggtgggtggaatcgaggcgatgcgaatgcgaggaagagagtaagagacgagccaggggatcttgttggctgggatcgggtggtgcacgctaaatcgcgctgtacccaggggcggaaccgaaaaacggcgtgcccgccgcaccgcgtttcgtatgatcgtggtggtggtagagtaaatttcccatcgattttagaca

SEQ ID NO: 110964 - DNA, 1968 bp, Zea mays
  Clone ID: MRT4577_32690C.1
ccgcgtgcgcgccccccccgtcccctgctggcccgggccgctcgcagttttcaactcgctcgtgcgcctccggccgccgctgtaccttcgggcacccccgtgttcgctccctagccgctacgctactcgcgtcgccaccgggacgctaccccatggcccatacggcgggagcccgtcgcgactcgcgccgcctctcggctcgctagccgctacgctatctacgccgccccggcacctcccatgagatgagagccgcagccgcagccacagccacagccgccgcgctcctcgcccccggtctaaagctctgcgcgggccgcgcgcgcgtctcctctccctccggcctcccactccgtcgcgtcactgccatggcctccgcccccaactcctccttccgcccagaggaggcgcgctcccctcccgccctcgagctcccgatcccgccgctctccaagttcaaggtggcgctgtgccagctctcggtgacggcggacaagagtcgcaacatcgcgcacgcgcgagcggccatcgagaaggcagcctccgacggcgccaagctcgtggttctccccgagatatggaatggcccttactcaaatgacagctttccagagtacgccgaggacattgaagctggcggagatgcagccccttcattttcaatgctgtcagaggttgctcgcagtttacaaatcactcttgttggtgggtccatagctgaacgttctggcaacaacttatacaatacatgctgtgtctttggttcagatggccagctgaagggtaaacatagaaagatccatcttttcgacattgacattccaggaaagatcactttcaaggaatcaaagactcttactgctgggcagagccctactgttgtagacacagatgttgggcgcattggtattggtatatgctatgacatccgtttccaggaactagcaatgttgtatgctgcaagaggtgctcatttgttatgctatcctggtgcattcaacatgactactggaccactgcattgggagttgctgcaaagggcaagggctacagacaatcagctgtttgttgcaacatgcgctccagctcgagataccagtgcaggttatgttgcttggggacactccactcttgttggacctttcggagaggtgattgctacaactgagcatgaggaggcaactataatagcagatattgactactcactgattgagcagaggaggcaatttcttcctctgcaacaccaacgccgtgtgcgatctctatcagctggttgatgtccagaggctgggttctcattagcaagcgcggaagcaggatgccagtgccctctgcaagcttgctcgtactacttcgttcatgagatgcatgcccatgccctcgagagatcgatcaacttgatgtgtgaaggtggagaggacggaataaggcgactatagtttgtaccttcagtggcaactctattttacaaagattcttatttttccaaagaaaaattaattaatttttcttaggaaaatggaaatcccttgggaaaatatgattgccaaactagccctcagtgtaaatgtctccataaattgattactttaacctatgaagaaaacctttctccatggaacaaatataaagcggaggactccgattattattttaacccaagaagaataaaatttaaactatcttagggagatgcctaggacttgttttggtataatactgtagtattcccgaagtctaaggtattatagtcaaagagttgtttggctatttaaataaaagatatgtttttaaatctgtgatattgcaaaaacctagggcctgtttgggaatgcggttttgaaatactgtagttttaagataccatagtttacaattgtacatgacataaatactacggtattgtttatcacagtaaaactacagtattgctcaaaaaaaaaaaaaaaaaaaaaaaaaaaaaaa

SEQ ID NO: 110965 - DNA, 852 bp, Zea mays
  Clone ID: MRT4577_32691C.1
aaggcctttcgccctttcccgtgtcccgtcaacaggcaccaaaattgctgtgccagtgccaccaccaaacattgcgggcacaacggactgacaaaccggtcccactagctgctgatgcgcatccatccgccaactactcacgctcaggtcgccgtcgcgactcacgccgcctcctcggctcgctagccgctacgctatctacgcggccccggcacctcccatgagatgagagccgcagccgcagccacagccacagccgccgcgctcctcgcccccggtctaaagctctgcgcgagcggcgcccgcgcgcgcgtctcctgtccctcccgctcccgcctcccactccaccgcgtcgccgccatggcctccgcccccaacccctccttccgcccggaggaggcacgctcccctcccgccctcgagctcccgaccccgccgctctccaagttcaaggtggcgctgtgccagctctcggtgacggcggacaagaatcgcaacatcgcgcacgcgcgcgcggccatcgagaaggcggcctccgagggcgccaagctcgtccttctcccagagatatggaatggtccgtattcaaatgacagcttcccagagtacgcggaggacattgaagctggcggagatgcggccccttcattttcaatgatgtcggaggttgctcgcagcttacaagtcactcttgttggtgggtccatagctgaacgttcgggaaacaacttatacaatacatgctgcatctttggttcagatggcaaacttaagggtaaacatagaaagatccatctttttgacattgacattccaggaaagatcactttcaaggaatcgaagactcttact

SEQ ID NO: 110966 - DNA, 1637 bp, Zea mays
  Clone ID: MRT4577_32692C.1
acacatttgagttcttcaaaaaaaaaaaaaaaaaaaaaagaaataagatggtagccacagccgcagccgcagccacagccacagccgccgcgctcctcgcccccggtctaaagctctgcgcgggccgcgcgcgcgtctcctctccctccggcctcccaccccgccgcgtcactgccatggcctccgcccccaactcctccttccgcccagaggaggcgcgctaccctcccgccctcgagctcccgatcccgcggctctccaagttcaaggtggcgctgtgccagctctcggtgacggcggacaagagtcgcaacatcgcgcacgcgcgagcggccatcgagaaggcagcctccgacggcgccaagctcgtggttctccccgagatatggaatggcccttactcaaatgacagctttccagagtacgccgaggacattgaagctggcggagatgcagccccttcattttcaatgctgtcagaggttgctcgcagtttacaaatcactcttgttggtgggtccatagctgaacgttctggcaacaacttatacaatacatgctgtgtctttggttcagatggccagctgaagggtaaacatagaaagatccatcttttcgacattgacattccaggaaagatcactttcaaggaatcaaagactcttactgctgggcagagccctactgttgtagacacagatgttgggcgcattggtattggtatatgctatgacatccgtttccaggaactagcaatgttatatgctgcaagaggtgctcatttgttgtgctatcctggtgcattcaacatgactactggaccactgcattgggagttgctgcaaagggcgagggctgcagacaatcagctgtttgttgcaacatgcgctccagctcgagataccagtgcaggctatgttgcttggggacactccactcttgttggacctttcggagaggtgattgctacaacggagcatgaggaggcgaccataatagcagatattgactactcactgattgagcagaggaggcaatttcttcctctgcaacaccagcggcgtggcgatctctatcagctggtagatgtccagagactgggttctcagtagcgagcctggatgcggctgtgtgcccgctctgcaggcttgctcgtactacttcgttcatgagatgcatgtctatgggttctagagatcgatcaacatgatgagtgaaggcggagaggacgcaataaggcgactgtagttgtaccttcagtggtgtctccagttgccaaataaattggttactttaacgtctgaagaaaacctccctccatgggacgaagataaaacggaggactgcgacttccctttgggcccgactagtttgaagtttgtactagcttcgggggtgtctaggcacagttttggtagaatactgtagtattctcgaatactacggtattatatacaaaatgttgtttggcaatctagataaaatctatgtttttaaaactgaagtattgcaaatacctagggcctgtttggaaatgcggttttgaaatactgtagttttaagataccatagtttacaattgtacatgacataaatactacggtattgtttatcacagtaaaactacagtattgcgc

SEQ ID NO: 110967 - DNA, 2165 bp, Zea mays
  unsure (1)..(2165): unsure at all n locations
  Clone ID: MRT4577_32693C.1
ggacccccgggtcggccggggaccacgacgtgctgatacccatccatccaccaacaactcccgctccggtgtcgagtcgccgtcgcgactcacgcaacctcctcggctcgctagccgctacgctactgtctacgccgccacggcgccacgacatctcccataagatggtagccgcagccgcagctgcagccacagccacagccgccgcgctcctcgcccccggtctaaagctctgcgcgggccgcgcgcgcgtctcctctccctccggcctcccactccgtcgcgtcactgccatggcctccgcccccaactcctccttccgcccagaggaggcgcgctcccctcccgccctcgagctcccgatcccgccgctctccaagttcaaggtggcgctgtgccaactctcggtgacggcggacaagagtcgcaacatcgcgcacgcgcgagcggccatcgagaaggcagcctccgacggcgccaagctcgtggttctccccgagatatggaatggcccttactcaaatgacagctttccagagtacgccgaggacattgaagctggcggagatgcagccccttcattttcaatgctgtcagaggttgctcgcagtttacaaatcactcttgttggtgggtccatagctgaacgttctggcaacaacttatacaatacatgctgtgtctttggttcagatggccagctgaagggtaaacatagaaagatccatcttttcgacattgacattccaggaaagatcactttcaaggaatcaaagactcttactgctgggcagagccctactgttgtagacacagatgttgggcgcattggtattggtatatgctatgacatccgtttccaggaactagcaatgttatatgctgcaagaggtgctcatttgttatgctatcctggtgcattcaatatgactactggaccactgcattgggagttgctgcaaagggcaaggtaatagatggctttgcagctcaagttatggcaattatgctagggaaatatagggagctaaattctcgctacttttatacacgctaattagcatatctattttttaaactagtcaaaacctcgatcagaactcataatctcttacgggtaatttcatatctgaattatccccattacttttttttgccctgtactgatgacatcatttctccaatgtcagggctacagacaaccaggtgtgctgtgcttctttgcgtgctggtgttccattttcctttacttaactttcatttggtatcgttttgccagttttatgctttaaaatgttaatcgactgtttggtgccagctgtttgttgcaacatgcggcccagctcgagataccagtgcaggatatgttgcttggggacactccactcttgttggnaccttttggagaggtgattgcaacaactgagcatggggaaacttaccaggcgactataatagcagatattgactactcactgattgagcagaggaggcaatttcttcctgtgcaacaccagcggcgtggcgatctctatcagctggtagatgtccagagactgggttctcagtagcgagcctggatgcggctgtgtgcccgctctgcaggcttgctcgtactacttcggctctgcaggcttgctcgtactacttcgttcatgagatgcatgtctatgggttctagagatcgaccaacatgatgagtgaaggcggagaggacgcaataaggcgactgtagttgtaccttcagtggtgtctccagttgccaaataaattggttactttaacgtctgaagaaaacctccctccatgggacgaagataaaacggaggactgcgacttccctttgggcccgactagtttgaagtttgtactagcttcgggggtgtctgggagtcaagttttttttcacagttttggtagaatactgtagtattctcgaatactacggtattatatacaaaatgttgtttggcaatctagataaaatctatgtttttaaaactgaagtattgcaaataccttagggcatgtttggaaatgcggttttgaaatactgtagttttgagataccatagtttataattgtacatgacataaatactacggtattgctttaccacagtaaaactacagtattgcctaaaaaaaaaaaaaaaaaagcggcc

SEQ ID NO: 110968 - DNA, 279 bp, Zea mays
  Clone ID: MRT4577_32694C.1
gggtctttcttctttgtcgtatgactacacgattttggctttaggcaagctgattgcggaggacacaagatacggtgtattctggatgtgaataaacgtgtgtgagtaataacgcttacgtgtttaataaaaagctggctgctcgcacacaatgtgtgttcacacataaaaattttgccctggtttgtctgtagtcgaaatgtgacgattgattgatggtacaagagtgttgttcatttcatatattactatttgatgctcgacgctatcgaaaacatg

SEQ ID NO: 110969 - DNA, 1963 bp, Zea mays
  Clone ID: MRT4577_32695C.1
gagaggcgagtggttgaataatcttcggtttggggtgtttggcctcggaaatgacagtatgagcactttaacaaggttggaaaggtggttgatcaactcctcgcagaacaaggtgccaaacgtatcgttcctgttggtcttggagatgatgatcaatgcattgaggatgactttaacgcatggaaggaacttctatggccagaattggataaattgctccgccaggaagatgattcttcaactgcaccaactccttacacagctgctatcccagaatatagagttgtgtttgtcaaaccagaggatgacatgtacattaacaagtcttttgctctcagtaatggccatactgtttatgacattcaacatccttgcagagcaaatgtggctgttcggcgagagcttcatacaccagcttctgaccgatcctgcattcatttagagtttgatattgctggaactggcctaaaatatgaaactggagatcatgttggtgtctatgctgaaaattgcatcgaaactgttgaagaggcagaaaaactgctaggttattcaccagatactttattctctatttatgctgaccaagaggatggtaccccgctctgtgggggttctttgccacctcctttcccgtccccttgcacagtgaggactgcgcttacgagatatgcagatcttttgaattcgcctaagaagagtgctttactggcgctggctgctcatgcatctgattctaaagaggctgagcggcttagacatctcgcgtctcctgctggaaagaaggagtattcacaatggatagtcacaagccaaagaagtctcttggaagttatgtcagagttcccatcagcaaagcctccacttggtgttttctttgcagctatttgtcctcgcctgcagccaagatactactcaatatcttcctcaccgagaatagcaccaacaaggattcatgtgacatgtgcactagtatatgggccaacccctaccggaagaattcacaaaggagtctgttctacttggatgaagcattcgactcccttggaagatagcaaagactgcagctgggctccaatttttgttaggcaatcaaacttcaaactgcctgctgatcctactgtgcccattataatgattggccctgggactggtctggcacctttcaggggcttcttacaggaacgactagctttaaaacaggcagaggtggaactgggccatgctgtcctcttctttgggtgcagaaatcggaagatggacttcatatatgaggatgagctcaataattttgttgatgccgggtgccctctctgagttgatcgtagccttttctcgtgagggtcctacaaaagagtatgttcagcacaaaatggcgcaaaaggctgccgagctttggagcatcatttctcagggcggctacatttatgtttgcggtgacgcaaaaggcatggctagagatgtccatcgcacgctacataccatcgtccaggagcaggggtctatggacaacaactccaaggcagaaagctacgtgaagagcctgcagatggaagggagatacttgagagatgtttggtgacgtatgccaaagaaacgtggaccctgtccgtcgtagttgccggcgaatacaaacctaaatcaacgtcgtggaggaaaattagatgcaccggctggggtatgattagtaggaatttttacatgatctgttcgatgggaaacatatatactagtgatatggttctatttttttaaaaaaataaagaagaaaagaaacagaggtttccccgctttatatagttatatttatttaaaagtgacatagccagtcacctagtgatggtagagtatcaggcgccagcaggcagcagcggtgcaggtgcttatgtatgttcgttctggaaatcatcgttgtgatttctggcgctaaggctatagtgaataaaacagccattggctcatc

SEQ ID NO: 110970 - DNA, 173 bp, Zea mays
  Clone ID: MRT4577_32696C.1
actcttttcatcaacctcttacatcctacatttgaaatcatctataatactaaatacgttaggattcattgccaactttcataagtcaacattaatacatatttaaacctaacacttaaaaactacattatattaagactttctttaatcctatcatatccatattctcaaca

SEQ ID NO: 110971 - DNA, 445 bp, Zea mays
  Clone ID: MRT4577_32697C.1
ggccgaaccacgcgttcgaaagaccattgagatcgatgacgagcgcaagacttttatcttttacgagaagcgcatggcccaaggggttggggccgactctctcggagacgagttcaagggctacgtcttgaggatcactggtggtaacgacaagcaaggtttccctcttaagcaaggtgtccttgttccccaccgtgtcaagctcctcctttccaagggtcactcttgctaccgccccctccgtaccggtgagcgcaagcgcaagtcggtccgtggttgcatcgtctgtcccgacgttcgcgccctccacctcgtcgttgtcaagcaaggtgagaacgacatccccggtttgaccgatgaggtccttcccaagcgtctcggtcccaagcgtgctaccaagattccgtccttctttaacctcgacaagtctgatgaccttcgcaag

SEQ ID NO: 110972 - DNA, 335 bp, Zea mays
  Clone ID: MRT4577_32698C.1
aatatctccgctatttgtggttaataatttgtgacaccggtgacggggattatgggaaaaagccccacccggggctcaaagtttctcctgccgactacaattacagaaccacttggtgaggacaccacaagggggactttttgtgtccccacccaaataaactaataattgcatgggttttggcctttccccttgggggacacccaggcacaccaactagggaccaagggggccttacccgtggtgtgccaccgttacaaaaagataaaaagtgccacgggttggtccaacacttctttttacaccctacaacataaggaccgccaggactgggt

SEQ ID NO: 110973 - DNA, 2107 bp, Zea mays
  Clone ID: MRT4577_326C.1
gagaaacaggaaagctctgtacatcttatttcttctatactccaattgctttgaactggatgggtcataaacctatacatcgcgccgcctaggagcattcacgttggtggcgggcggtggctcggttcctctcctccaccgcacctccaagaatccacctccacgactgagctgacggctcggcggcgccatggcggttcaccggctccaaccttccctctctggcctacagtgctccaccgcccggtcgccagtgctcctccatgggccacggctgacgggtgcacgcaccggcaggagaggtggatttggtggacctagattcgatgtgcagagagcgacttggaggtggctgacatcttcaagcactgcaacatgcagttacaactactgttggccatacagggaaatgctgggcctattataccaattgttcaaagcatggaccttgtatagctacatgtttttatcatagatatattaatttctgaaatgcccatatattggtatatttgtggaaatttattggccaactgtaagcccgtcgtgatgcacagaacatttgtggtataagatttttctgttgatgtttgcaggttatttttccagcacttgacattcgagtgaaaaatgtcgcagggacatattctcttgaacataaaggagaaaatgatctcttcgcacatcagacaaggcttctactctttcagaagaaagtcattttcaagagaatcttgaacaaaatgaccagatgtttaggcctagttggaaggacatttttcgaatgaatcagagtgagctcgaggctgagattcgaaaaggtctctcgagattctactcttgatccaaggaggaaggcctatctgatccaaaatctcatgaccagccgttggatagctgctcagcagaaatcaccacaaccaagcgtcgaaggacataatggatgtacacgacgacctggatgtgttccttcgtaccgagacccagggaaacaaatatttggctgtgagcattacaaaagaaactgcaagcttgttgctgcatgctgcaataagctattcacttgcatattctgtcacgataaagttagtgaccatacaatggacaggtaactcaagaggtccacttattgactcttatgaccatgtaattggtgttaatacaactacattaacacgtaaaggttggtagatctggaaggtcttgatggtctaatacctgtctatgagtacgaaagaaaaggcgagagaagtcggtctctgcagcatcgcgcgtgaaaaaaaatcagccaattccatgagcattgatgttgtcatgacttcaaggagagaccatgctaagaataatgcattatgacatttgtcaggcttacatatcgattgtttgatatggatagatgtataggtttatgaccaatccagttcaaagcaatttgagtacaaaagaaataaggagcaggaaagctctgtacatcttgcattttgctgttttttgtcgaagtttcaatgtctgtcgcgtgacaaaatatagttgtaatttatattttggcatgcacgaaacaggtgtatttattcatttttgaacgaaattttatgtcaaatcctcattgcgttaactcaagaggtccacttattgactcttatgaccatgtaattggtgttaatacaactacattaacatgtaaaggttggtagatctggaaggtcttgatggtctaatacctatctatgagtacggaagaaaaggcgggagaagtcggtctctgcagcatcgcgcgtgaaaaaaaatcagccaattccacgagcattgatgttgtcatgacttcaaaagaggagagaccatgctaagaataatgcattatgacatttgtcaggcttacatatcgactgtttgatatggatagatgtataggtttatgaccaatccagttcaaagcaattggagtatagaagaaataaggagaaacaggaaagctctgtacatcttgcattttgctgttgtttgtcgaagtttcaatgtctgtcgcgtgacaaaatatagttgtaatttatattttggcatgcacgaaacaggtgtatttattcatttttgaacgaaattttatgtc

SEQ ID NO: 110974 - DNA, 389 bp, Zea mays
  Clone ID: MRT4577_32700C.1
ggggcatcaacacacaatggtcaaaggaaaaaggggaaaggggcttttattacaataaggaggccaaaacatccacaggggctaatacatagcataggcattaatatcatcaaaggggggaaaaaccaaacatattaggccttcacaggcagctgactggggggttgcccctaaaataaactaaaactcatcataggcttgaaactcctaaaaggcctccatggtgccagcatttccttctgaacactggggacaggggggacaacctggggggggggggggtagtaaagcaggggggagtacacattaacgtactcaagaaatatcccgtttggctaaaaaggactagttgaatatggggggtaaggggaaacccatgtttttagggg

SEQ ID NO: 110975 - DNA, 464 bp, Zea mays
  Clone ID: MRT4577_32701C.1
ctactcggacagggtgaggataggcgaggagagcagagcaagcagccgacaacttccatacgcggaggcgtggctaccatgtcgatcagcgcctggcattcatgccttctcctcacccagcagtacccggtcggcctaggatagatctcgacggccgcctacaatcggttgtccactgtgaccgagccgaggggtacttatctatatgcccgcatatgtgcgcctgcgcccaggggaatctgcgaacctagctatccgtctgtcggatagatcgatcttgcgtgcatggttaccgttcgccacacacgaacactttcaaggaactggaacttccagccggaacagagacttaagcttatgttctatcagcaactccactgctcgctgagggtctgcagcaaaccgttacgatcggagcagaacggaaccatgatgagcgggcatgcgtggctggcgctagctgg

SEQ ID NO: 110976 - DNA, 595 bp, Zea mays
  Clone ID: MRT4577_32702C.1
cccagcgtccggaacatattgctagagattgagttactactagtttgaacttgcaaaaggatgaaattgtattgttatttttttattaatgtagagctttagatctcggataccttcatagcatccattagcaaggtattaatcatcaatttggatcactgagacttctggtgttgtgtgggcatctcaaattttatgggtcatgtgtaacctaattgtagttcgcatttggatcttttcggaagctgtgcgccatgttctactgtattttgtttcaagtttctttttttttaacaattgaaattgctatgtttcagtcgctatggatcttgcttgggtcatctggagaagctaaagcctaacctgctcctggatatccatttgcacgaacatgtagagagtctgtatatggatattcgccacaaagcgaattttgatctgtcatgcgattaactgggtttatctttttagcgacacctttgttatcgtggcaaaacacacacacacacacacttgactagacaatttgttttataatgaaaacagaaaggtcatcactatgtatgtatattacatctctgatatagtatttcac

SEQ ID NO: 110977 - DNA, 1987 bp, Zea mays
  Clone ID: MRT4577_32703C.1
aattcggcacgaggcgtgtttctcgcctccacgccgagaccaatccagccaccgccaactctttgcctcgcctctccgattcgagggaacgatggagtgcgtcaccgatatgcccctcgcgacgctggacagccgaccgcgcaagcggcagcggctcgggtgggacgtccttcccgccgagatgtatcaggttacgcggccgcggcttggttgggacgtcggccccgccgagatgaatcagtttgcactttgtggacaagaagttgtgaatgccttcagtgctgcagtgttgggcctatcttcaggttgtgtttcttctcaagtcaaccaagagcagcctcatgatggttcccctcctctgagagaagatgacaagaatgggcattatgtttttgctgttggagataatctcacatctcgctataagatcaatgcaaaaatgggagaaggtacctttggtcaggtgttggagtgttgggataaggaaacaaaagaaatggtggccataaagatcatcaggggcattaagaagtacagggatgctgcaatgatcgaaattggcatgcttgagaagcttggtaaatatggtgaaagcagatccaggtgagtttgctggttcagttagcacctatatgcgtgcttacgttcataagattgcttgtatataagctggtctattttgcagttgtgttcaaattcggaactggtttgactatcgtaaccatatctgtattgtaagtacattgttagattatgacaattatgcactgacccaaaaatataaccatatggtgcttaaacgttggtgaatttggattaatggtgagcaggtctttgagaggcttggaccaagcttatatgattttctgaggaaaaacaattaccgctcattcccaattgccctagttcgggagtttgccaaacaactgttggaatgtatagcatgtgtgtgcacagttctttctattacccctcctgcactataatgcatatacattagttttgtgcattatctgtgctgcattgcagcctgtcattaatccattactcatgcttgtactccagggagtatctaacatcatgtgatgtttttgtatttaccctctctctgtaatgtgttgcagttatgcatgaattgcgcctcatacacactgatttaaagcctgagaacattctccttgtttctccggagtacattaaagtgcctgattacaaagtctcatcccaatccccaaaggaggggtcctattacaagcagttgcccaagtctagtgctatcaaggtgattgatttcggtagcactacttatgatcaacatgatcagagttatgtggtatcgacgaggcactatcgggctccagaagttatattgggacatggatggagttacccatgtgatatctggagtgttggttgtattcttgttgagctttgcacgggtgaggcgttattccagactcacgaaaacttggaacatctggctatgatggagagagttcttggacctttgccgtaccatatgcttaagagggcagatcggcactctgacaaatacatcagaaaaggacgcctgaattggcctgagggttgcacctcgcgggagagcatgaaagctgtgatgaaattgtccaggcttcagaatctggtgatgcaaaatgtggaccaggctgcgggagatttcattggtcttttgcaagggctcctgaagtatgacccagcaagccgtttaacagcacgagaagcactgaggcatcctttcttcaccgaagggtttgggcgaagaagatgatacgtccttgaagcagaccttgtttgtcctctgtctctgaccaaactgtatataaagctgaaatggagctgtttcaatcttgtttgaaacgtcgtgtaactatagctgtatcacaagggaagtcagacggatactttttactaatcctgacttgtttgagttttgcaagccaattcaatgaaagtttgggttgaacag

SEQ ID NO: 110978 - DNA, 1317 bp, Zea mays
  Clone ID: MRT4577_32704C.1
cctcctctgagagaagatgacagggatgggcattatgtttttgctgttggagataacctcacatctcgctataagatcaatgcaaaaatgggagaaggtacctttggtcaggtgttggagtgttgggacaaggaaaggaaagaaatggtggctatcaaaatcattaggggcattaaaaagtacagggatgctgcaatgatcgaaattggcatgctcgagcagcttggtaaatatgatgaaagtagatctagttgtgttcaaattcggaactggtttgactatcgtaaccatatctgtattgtctttgagaggcttggaccaagcttatatgattttctgcgggaaaacagttaccgctcattcccaattgccctagttcgggagattgccaaacaactgttggaatgtatagcatttatgcacgaattgtgtctcatacacactgatttaaagcctgagaacattctccttgtttctccggagtacattaaagtgcctgattacaaagtttcatcccgatccccaaaggagggatcctattacaagcgggtgcccaagtctagtgctatcaaggtgattgattttggtagcactacctatgatcaacaggatcagagttatattgtgtcgacgaggcattatcgggctccagaagttatactgggacttggatggagttacccatgtgatatctggagtgttggttgtattcttgttgagctttgcacgggtgaggcgatattccagactcacgaaaacttggaacatctggctatgatggagagggttcttggacctttgccataccatatgttcaagagggcagatcggcactctgacaaatacatcagaaaaggacgcctgaattggcctgagggttgcacttcgcgtgaaagcatgaaagctgtgatgaaattgtccaggcttcagaatctggtgatgcaaaatgtggatcaggctgcaggagatttcattgaccttttgcaagggctgctgaagtatgatccatcaagccgtttaacagcacgagaggccctgaggcatcccttcttcacccaagggttttggcgaagatgatgatactccttgcattctacctttgtctgacttgatgtcttgcatttgacagtttgtacttttcagtggtgtatgtaggcggtagatcaatctgtataaatccgtagtagagttgtttcagtcttgtttggaacgtcgtgcagctatagctgtagcataatggaagtcaaatcgatgcttttgactttaaatcctgacttgtttgaatttggaatgtcaatggaaatctggtttgaggag

SEQ ID NO: 110979 - DNA, 1667 bp, Zea mays
  Clone ID: MRT4577_32705C.1
attttgcagttgtgttcaaattcggaactggtttgactatcgtaaccatatctgtattgtaagtacattgttagattgtggcaattatgaactgacccaaaaagataaccatgtggtgcttaaacattggtgaatttggatcaatggtgagcaggtctttgagaggcttggaccaagcttatatgattttctgcgggaaaacagttaccgctcattcccaattgccctagttcgggagattgccaaacaactgttggaatgtatagcatgtgtgtgcacagttcttcctattatcgctcctgcactataatgcatatacattagttttttttgcaatatatgtgcagcattgtagtctatcattaatccatattactactcatgcttaaggaatatctaacatcatgggatgtttatgtatttaccctctctctgtaatgtgttgcagttatgcacgaattgtgtctcatacacactgatttaaagcctgagaacattctccttgtttctccggagtacattaaagtgcctgattacaaagtatattttgttcttttatttacatcacctacccaagatttaccttgccctgtgcttgttgatttctgttgtaataggttagtgaatattgaatatggtactgatcctctttttttcatttgctaggtttcatcccgatccccaaaggagggatcctattacaagcgggtgcccaagtctagtgctatcaaggtgattgattttggtagcactacctatgatcaacaggatcagagttatgttgtgtcgacgaggcattatcgggctccagaagttatactgggtatctattgtgttcagtgaaaagcttttcctagttcagcctgatttggtgacattttatgactgcgtggatcatgtgttcaggacttggatggagttacccatgtgatatctggagtgttggttgtattcttgttgagctttgcacgggtgaggcgatattccagactcacgaaaacttggaacatctggctatgatggagagggttcttggacctttgccgtaccatatgttcaagagggcagagtacgtttcatgccattgtctcatatcatatgcttaagagggcagggttctctgaacatcagtgctgtgagatctggtcgatgtcttgtgcttattaatccttgtttgtagtcggcactctgacaaatacatcagaaaaggacgcctgaattggcctgagggttgcacttcgcgtgaaagcatgaaagctgtgatgaaattgtccaggcttcagaatctggtgatgcaaaatgtggatcaggctgcaggagatttcattgaccttttgcaagggctgctgaagtatgatccatcaagccgtttaacagcacgagaggccctgaggcatcccttcttcacccaagggttttggcgaagatgatgatactccttgcattctacctttgtctgacttgatgtcttgcatttggcagtctgtacttttcagtggtgtatgtaggcggtagatcaatctgtataaagccctagtagagttgtttcagtcttgtttggaacgtcgtgcagctaaagttgtagcataatggaagtcaaatcgatgcgtttgactttaaatcctgacttgtagatcaatctatataggtcctgtttgtttctgatt

SEQ ID NO: 110980 - DNA, 514 bp, Zea mays
  Clone ID: MRT4577_32706C.1
cccacgcgtccggccgaggccattgacgatggcaagattggaccaagggatgaccccaagattcgctccaagatcttgtcagaagagtttggttgggacaaggatctcgccaagaaaatctggtgctttggccctgagacccttggacccaacatggtggttgatatgtgtaagggagtccagtatttgaatgaaatcaaggattctgtggttgctggattccagtgggcatcaaaagaaggtgctttggccgaagaaaacatgagagccatttgctttgaagtatgtgatgttgttctgcacgctgatgctatccacagaggaggtggtcaaatcatccctactgccaggagagtcttctatgcttcccagattactgccaaacccaggcttcttgagcctgtctacctggttgaaatccaggctcctgagcaagctcttggtggaatctacagtgttcttaaccagaaacgtggacatgtgttcgaggaaatgcagaggcctggtaccccac

SEQ ID NO: 110981 - DNA, 202 bp, Zea mays
  Clone ID: MRT4577_32707C.1
tatgaagccccagcacgaccagcaagaacggggggaccatcagaacaccggccccaggacccaaaacgaagggcacagagacgaggacgaaaccagcccggacccaagagcccaagcacggacggccagccagacaacggagacaaaacaaagcggccaccagaaaggggcgagagaccgacgaccaccacgaagagaggaa

SEQ ID NO: 110982 - DNA, 328 bp, Zea mays
  Clone ID: MRT4577_32708C.1
ccttcttattttttttttttcttggtctttttgtgtttttgttttttttctttgggggacccacccgtcaccaaatgagtccaaagccttttttttttgggacaggttatttcacgaacccctgaaacctggaggaaaattcacagcctgaaaccttggagcgcgaacgttaaacaaaaaaaaaatgcaacgtttatttttattacaccggggggcgggttgatttttttttttaaaaccccgtccgggggatcattcctaccttttattaaaatggggggcccaacttatttgctttcttttattgggaggtgggggttggttccaa

SEQ ID NO: 110983 - DNA, 1255 bp, Zea mays
  Clone ID: MRT4577_32709C.1
ttgggtacctcgaggccggccgaaaaaaaaaaaatcacagtgtccaacaactacttcacccaccacaacgaggtgatgctcctgggccacagtgactcctatgtgaaggacaaggcaatgcaggtgacgatagccttcaaccatttcggtgaaggtctcatccagagagtgccaggtgccggcatggctacttccatgttgtgaacaacgactacacccactgggaaatgtacgccattggcgggagcgctgagccaaccatcaacagccagggcaaccgctaccttgctcccacaaacccgttcgccaaggaggtgaccaagagggtcgaaactgctcacactgtctggaagaggtggaactggagatcagagggtgacctcctgctgaacggcgcctacttcaccccctccggcgcgggcgcctcagccagctactcgcgcgcgtccagccttggcgccaagtcatcatctatggtcggcaccatcaccctggatgccggtgccctgtcgtgccacaagggcgcggcctgctagcgcagccgccgcagaaggaaacaaacccacccccacgccacctctccaacaacagaaaagaaacaagacaacagaaaactaagctacctcaacaccatggttacagtttccccccgtctctctctctctctctctctctctctctctctctctctctctctctctctctctgttttttggttgcttttgacaagggttatatatgatggtccttcctgattcaccatttgctcaacctccccctgctcctgacatggaaagctacctggagcaggcgtgaagcgttgctgattgatatttcgtccgccgctcggtctctctattagtcatctgatctgagtgtggtacgttgctacctgccccccgcccacagcaagtgtacgttgaggtcaggggtgcatactgtgtgtgagtgagtgcgtgtgcgttgttgtgtgtgtgtgatgcttacttggttttggagaacatgctggattgttagtagtgggtagtactgcaatgttatgcctgaacatggctggatttgccacgtagacgagacatgggaggattgccatgttcttattcttcttctccagtgaaaagcgtaaacattacaggctagctggatattttgacctggaagtacagcatgcgctgcttttgaaatgtgtacctgatcagtttgcttgaatacttcaatgtcgataccctaaaaaaaaaaaaaaaaaggggcggcc

SEQ ID NO: 110984 - DNA, 152 bp, Zea mays
  Clone ID: MRT4577_3270C.1
gaagatgttgtcctgtgatggggctgacaggctccagacaggtatgcgtggtgcctttgggaagccccagggcacagtagccagggttcacattggccaagtcatcatgtctatgcgaaccaagctgcagaataaggaacatgtgattgagg

SEQ ID NO: 110985 - DNA, 429 bp, Zea mays
  Clone ID: MRT4577_32710C.1
atggccttgctagaccctcccgagcgcctccagcccgaggtggcactcaacttggtgcgcaacccgctcggatggggtgtgctggcgtttgccagaaggatccgtgtcggtgtttctcctcacgacgacctcgctaccgaagagtttgtgttcttcgtctccaaactccccagcgggttggcgttgccaaacccgtctttcctcgtgctgctgttggaggggcttggcctccagcctctacatgttacgccctgcttcatccttcaggcagccatcatcgcctacctccgcgggatgtccgtggaggcgacggttttagtctgggaagccaagttgtgtgcccggaccccctggacggtggctccatatactagggcacccgtcgcagagtggtggagcgtgcaggctcacggtacaggaccaggctga

SEQ ID NO: 110986 - DNA, 491 bp, Zea mays
  Clone ID: MRT4577_32711C.1
tcgagtttttttttttttttttttttttttttttttttttttttttttttttttttttttttttttttttttttttttttggcaaccaaaacaacagcacgaggcagtttttgccataaaacccccagccccaaaaaaaaatttatgggaaacacccgggtttatatgcccggaaaggggcacgggggacccgcacttttaatttttaaggggctcgttaggccggcccggaataataggggccacccagttaaagccagaaaaccaaatatttttttcacctagcacccaatacagaaaaaaaaaaaaacggggggttttttttttacaaaaaaaacaatttttggatactggggcaggggggggttaatggacaaaagtatgtttcttttgggttttagggcaaaaaaaaacgggggttttttcacccctgaccgaaggacgggatttgcccaaaaacttgctcaatcggctccaacgggggtcttccc

SEQ ID NO: 110987 - DNA, 291 bp, Zea mays
  Clone ID: MRT4577_32712C.1
gaacaagactgcttagtaagaccctatcttaaaaatcaacaaaatgtctgtttcagcatgagttctaaaattgtaattagattttatttagcctgatttatgtaaataagtcttttaaattgccttttcttgtatagattggagttaacttgcacagttgtattgtatataagatattgcatgaccattaatgaacttgttgctgttttcccacaatgttaacagttttgtgaatttttcactatgcatttacagtgttctataacaatgacttaaaactattttatacat

SEQ ID NO: 110988 - DNA, 125 bp, Zea mays
  unsure (1)..(125): unsure at all n locations
  Clone ID: MRT4577_32713C.1
actcccaagttattaacactaactactactacgtgggaggctgaattatgttaacataaagttggcctagattatccaagacgtaatcaaagacgtntctgtaggacttccaggagaatatacaa

SEQ ID NO: 110989 - DNA, 447 bp, Zea mays
  Clone ID: MRT4577_32714C.1
gaccgtgtaacaaagaatcagcggttacaatgagacttgtgctgcttcacaggtcagctaagcatatccactgatgaggatccgttaccttatgagacatgcctctatagacgccaagatccacctcctgcccactggggcgggctcctagagggtcggaggactgtctcttctgggcgcaagcatggggccccaactctccaactgctggcaaggtgctattacaggacagatgctcttgatatacgaatcggtatgctgggatgcatagcatggggaagactgacgagtgagctaactgacattaacctggctgggctcacggtcgaattgtctaacattaaacccggcgcgccagctgcattatttaatgagctcaacacgcggcgagacgcgtgcatagtatatgggcgctcttcggcgtgacatagtcactgactcactggg

SEQ ID NO: 110990 - DNA, 415 bp, Zea mays
  unsure (1)..(415): unsure at all n locations
  Clone ID: MRT4577_32715C.1
ttncagcaagatattntcctttaaaaaaaacacaaagcactgaaaaacacatagaaacaggtgggacccggcaccctcggtatctgggtttaagctggacaggtttttttgggacaagactaccaaacatgttcccgtggtaaggcacagaaaatctaggggtatattggccccacattaaaggtggccccccacatcattacgaattggaaaggggggactatgaaattggcgcagcctgccggtggcaatgaacagggcatggcctaatgggggaccaggttttgggccccccctaaaggtagtggcggggcctcacttggcccatggctcaaaaacgagtttcgggccccctttttttccaagccccgggcgctgtcacccccgtcccccgggttttgcggtgggtttgcct

SEQ ID NO: 110991 - DNA, 306 bp, Zea mays
  Clone ID: MRT4577_32716C.1
attaatttttttttttttttttatcagcaccaaagcatcatgcactttgaaatgaatcatttggctttttcagctgaaacaatctcatcagcattttgtgatctaccaaaagtttctacaccaaaattacaaggaccaactcgagtggaaaacgagaccaggtttgaaccttcggccatttcacgttgaacacgatgccaggctgcacgggagaagacttccccaaatgcaagttcaaaaattccttcaactgaaacagtagcgggtttttctcagtgcctttaagcaaggttacgccccattcaa

SEQ ID NO: 110992 - DNA, 392 bp, Zea mays
  Clone ID: MRT4577_32717C.1
tcggcccacacgtgcgaccaacgagcgcggtccgaacgagcagcgagcctaagtcacactcgggagctaactggctagctaggttaagaaagagaaagctgaccacaaggatgcggaggaagctgcagccggcgccggccccagagctgatactagacctggccaccatgggcactcgtcgaggaggtgcaagcggagtcccatgtgccgcgctacttcgtgaccggcgactacctcgtggacaacggccactacatcgacatcgagttgatggcgcacaccaactacccgccctaccgcatcaactttgacggcggccccaccggccgatttagcaatggccttaccaccgaagactctatatatcggtttttgagcttctacgataacat

SEQ ID NO: 110993 - DNA, 328 bp, Zea mays
  unsure (1)..(328): unsure at all n locations
  Clone ID: MRT4577_32718C.1
caatgggacccctcgagccggccgggaactacacgacaccccccttcccttcctccgatccccccgcctcccccaaatccgacgcgtaatcgccgccatggccgncgccggaaagntcctcctcctggacgacgacgaaatggacgattcactcgangncgacgcgcgaccgagcggccacgagcagacgctaccacacaacaacaccacccacctcaggccgaacccgaaacccaccaacacgaaaacaaacatcaccacaaacccccaccgtcctccgcgaccgcacccctccgctcaaagaaaagccgccaaccccgaagagaat

SEQ ID NO: 110994 - DNA, 1966 bp, Zea mays
  Clone ID: MRT4577_32719C.1
cctcgaggccggccggggtccccttccatccgtcccggtcccaccgccaccgtcgcaccgcatcccttctcctcagctcgccgccgtcgcgcccacgatcgacatggcgaagctggggcgttaaagcagttgaaaacatttccgatacagctggcaagctttacttccgataacatttgtgcttatcaggatgagcaccgccaaggtcatgataacatacaagaggaagcgtgctgccacacatgcccatacagaagacgacacagttcttgactcatctcctgctgcctcaagcaatgtggctgtcagcagtctacaacttaagcctgagggccctgctgagactgccgtgataaatgaatataatcatattactcctaaaatgcagcagtctttctccacgtttcaacaaaacatcaaagaagaacgtgaaccagagaaaggacatgatcagctatatgaatcatcaccgtggaaagaacaacctgagatttgttctgccactattgcctcaaccgcagaggcacatagcaataaatcacaatgcattgatggcacaaatagtcaaacccctgtttcaagttctctgtgtggcaacatgcttgctgataggatgattaaccagacaaaagattcaaatatctctgcccctgtggaaataaattctcctacggggatggaaaatgctgtcgcccctggccaatgtaagagcaggtttagtcctctgctcacctttcgcaggcgagttaagaggaaaacaaatttggatgaaccagcagaagaaatttgttcacttgacaacgacaaacagtgttcaacactgacatgcagcccaccacgctcatcacaggatgctacatcattactaaaacatactgctccaaaccctttggatattgaggataaggtaggtagattgaaaaatactggaccttctacagaagctgaacactcacctgaacaagaaagttcccacgtcgtaaaatcctcagttcaacatgtggttccacagattgctctagatgtaaaccaaaacataattctggaagatgatgttacaccaatgtcgaaccaaaagatgtccttggaagatgatgttacaccaatgtcgaagttcactggtgtgcaagaggtcagtgggcaagatacgccagtggaggacttcaacagaacatcaccaaatactattgaagtgccaaaagttattgatttgcaggggaagggacattgtactgaggaaactacttctctgcagtctccaagacaaaaagttgatgccagttggttgaaacggaccaataaatctgtggcagaagatgttccagaatctcaaggttcaacaaaaatattccaataattctcttggatgatgataatgatgataggggcaaggagctcgaaaattcagaggccctcgatcaagggctccatagtcaaaacaaaagaacttttgggaagattgacctgaactgtactgaattaagacaacagggacttctctgtttagatgactcaacaattcaaaggctgccagatctggatctagctgtcaatgctcgaaagcaaatgtctcgaccgattgaaaggctgtttttcacagaggagaaagataccatccgtggcaaacaagagcatcatgaagaaagctcaaccatgcacgccccatactcaaatttctttgatctgggtccaccgtggaacaccgggagtttgaagggaccaaaaggcttgccttcagaagtaaagtttggaataatggacagggctcctgagttcagtctagacctcaggctggatagtttcacagacaacaacagtgtggctgccctgaggagcgacaagttgtttctcggaagcacctccagcacatctcgtaagttaacagaaaagcttggcatgtactcctacaagaggcagtcggctccgtggtcagaagaagagctggactttctttggatcggggtta

SEQ ID NO: 110995 - DNA, 128 bp, Zea mays
  Clone ID: MRT4577_3271C.1
ttagtttcgagctctagcctttcgagctcaaagtctaagggatcggatttctcatgtaattgatgcggagtgcataacattaaagtatggtgctatgcgtaacctcaacgtttgtctcaaactggttt

SEQ ID NO: 110996 - DNA, 267 bp, Zea mays
  Clone ID: MRT4577_32720C.1
acgcgtcaacggcagcgtgggcaaatccttttgattttgggtccaggcagggtttgcccactgctgcatctattaaggcaatggcacatcaaattccaagggatcctgcattcagccggctggccgcgcacctaccgacatgtgcttaaagcacaagagaacacggcacacctccattaatgcctcaacaatacactgaatcagtgcctcaggtcatggaattcccccactttaggaccaccgcagatcctcaggggaattctcgca

SEQ ID NO: 110997 - DNA, 432 bp, Zea mays
  Clone ID: MRT4577_32721C.1
tggcttggaacgtttgggctgatttatgtgcttggttatgggtactgcgtcagggatccatacggcgtctgttatggtgtctcctccgcattcggtgtatgatattgatggtcctattaatgttcctggtgcgtggcttactaaggagaatgataaggagtcgacggtggtatcgcattcgtaagcgagtacaacgagttaggtgtctactcctgggatttggctttggagtcggcatcctgcggactggattggtgtgtcgtcggcgactgatccttcggtggactagtcggaggtcatgtgtactgatgtgcatgttaatcgttagcctcgtaagacgtagggtactggtcgcggtcggggcggtattactcgggtgcgtattgccgctattcatcctttgtcggatgcgtctaagcccgctacttgtca

SEQ ID NO: 110998 - DNA, 429 bp, Zea mays
  unsure (1)..(429): unsure at all n locations
  Clone ID: MRT4577_32722C.1
gaaccggtgggttggattgaatgaatntggttaatttaaactgggattattattaattctatgtctattcgaacagnactacttgtttactattttttttttttttttgttnaactntcattctggggttttgtttggggnaatnnntnataattataattttcttaattttctatccaaattattttttatccattctaacttttttttttatccattcacactttcccttttttcttaactaataaatttttttttttncttttttttaatntttacaaattctttttttttatattattattaatactcctacatacttttttatatttttatttttatccttattcttatctaaaaatttatttatacttaaaaataaatcttcaataattcaattttttatttttattttttaattttttatat

SEQ ID NO: 110999 - DNA, 945 bp, Zea mays
  unsure (1)..(945): unsure at all n locations
  Clone ID: MRT4577_32723C.1
tctgtgcgtgggcgcaaaaaaaaccgggagagtgggggtgttctcatactcatcaatgataaatagattttgtaagggatggaagaacacatgatgcaaatgaggtatataagaatatgatgaaggatggttgcaaaccgaattctcatgtttacattgcactaataaatggtttctggggagcatgcatttaccctcgatgccnggnaaaatttacattgaaatgaccggcaatggttgttgcccaaccaccctcacatataacactctgatagatggtttgtgtaaggctgaaaaataccaagaagcttcaagcttaacaaaggaaatgttagagagaggttttaaaccagatatcagaacttatggttctttgattcgtggcctttgtcgagtcaagaagattgatgctgccctttgtatttggaatgaaattcttgatgcgggtattcaggttgatgtaattgtgcacaacatcttaattcatggtctttgttctgctgggaaagtaaatgatgccttttgtatatatttggagatgaaagaaaagaattgttccccaaatctagtgacctataacacattgatggatggattttatgagattggttctattgatacagcagcatctctttggactgccattttagataatggtttgaaaccagatattgttacttacaatacaagaattaagggcctgtgctcttgtaataggacacctgaaggagtcctgttattgaatgaggtgcttgcaacaggtattatgccatctgtcattacctggagcatattagtaagagctgtaatcagatccggtccaattcagatatgacaccttgtaattcttcatggtatgagaacttatggatctaactactaggattgacattatcatactgaaaacttcttatggatctaacttaccaattttctttatgctct

SEQ ID NO: 111000 - DNA, 355 bp, Zea mays
  unsure (1)..(355): unsure at all n locations
  Clone ID: MRT4577_32724C.1
actgcgcaagaagaagggnaacaagaggacggcggcgatggcgaagaggctgttcccatttttgaaccgtgtgcttgtttgagaatctggngcagcccaagaagaccgccggcggcancccccccccggaaacaaccaagcagcngaangcngcnaaagnggnggcngnnggcccnggngagcgcgacaaggcaggcaancngancccagnngcncngaaggaaggngacacngnnncnccngccagagnanggnggaaccgaagnnaagcnngcagcnganaaagagnaccnccncnncagagagcacgacannnngggcacaccccgnggacnganncagagcancagcaagc

SEQ ID NO: 111001 - DNA, 387 bp, Zea mays
  Clone ID: MRT4577_32725C.1
gggaattccggggcggaccacaggcgtccgccacacgcgtccggggccgcgggggggccgttttggttccagggcagcttaccaagggttccggccttccggttaaaccgcgcttggttaacataaggatttttttggtggtcgggcaggggaaaaggttcgttgggtggtttggttgcccccgtgggattgtgggggtttggggctcctccggggattgtccccgggtttttatttggggggtaaagggggttttgccttgggggcggccccaaggttggccttttttcttgtggacaacgcatattgtttgtcggttggtagggtggtagggttatggtagcggggtagctgacctttttccttccgtccttgtcctgaccaggg

SEQ ID NO: 111002 - DNA, 876 bp, Zea mays
  Clone ID: MRT4577_32726C.1
ctagctagctaggcgacgttcagtgaagctccgagccgagctctcatggaactccagctctaccactccaccacaaccctcctcctgccgctgctgctgcttcttcttctcctgctaccctcttcttcttcctcctcctctcacggcctgcgctctgccgacggtagtagagcgccgcattaccggctcaaggatccgcgtccaccaaagcagatcggcgacggcgagggggcggcgacggcggagtcgctgatcgggtcgaggccgccgcggtgcgacggcaagtgcgcgccgtgcgggcggtgcgaggcggtgcaggtgccggtggcgccgcgggccgacagccgcgggggcgagccccggcgccgcggagggctgttcggcagcgccgaggagagctacaccgactacaagcctctcaactggaggtgccgctgcgcggaccggcgagcactggacccgtgatcgatccggatgctgcgattgcgatcccctcgtcaggtctccagctgctgctgctgatgagcccattggtgtactgtacttacgtgttttttcttttctttggaggaactgttgctggtgaatggtcgatcgatccatggccaggaggattgtttggcaaacgttctcgtctctattctgtagctaggcttttggatttttggtagtggtaggcagctaggcataggcttcggcaatttgtctggtgatcgataatcacttgaaaaacctgctgcttagactgcttgctttgacattaatctgggtgtggctataggttctacagtatttcaggtcaaccgaatatgttactctctgtctcactcactattttaaaatacactttataaataatatacggtgcaaaacagt

SEQ ID NO: 111003 - DNA, 396 bp, Zea mays
  Clone ID: MRT4577_32727C.1
caaaagaagccttgtacactcgattacatgaataggactccaaacatgaattgttcatcatgcccccatccggcgatcctgtgtgcacactttggtgacacaaaccctggacaagtatacttttgactacaacagtgagagggatgctggtgggacaaaagctgcctgtgtgtcacgccggaaatgtgagagagttccctgctacgcttagggtactttctcacacgtgtggagtacctcttcatatgactctttttacagaggggcttgctaaggaggcgctccttattggacttaaccatatgtatgcatgcaacctgacctctatggagcgaaaccctgctaactggcggggctactcccatgattatgggaatgtccttacccggtgtgttc

SEQ ID NO: 111004 - DNA, 837 bp, Zea mays
  unsure (1)..(837): unsure at all n locations
  Clone ID: MRT4577_32728C.1
acctcatttcagacagtggctagctagctaggcgacgttcagtgaagctccgagccgagctctcatggaactccagctctaccactccaccacaaccctcctcctgccgctgctgctgcttcttcttctcctgctaccctcttcttcttcctcctcctctcacggcctgcgctctgccgacggtaaaaaaaaacatctttcgttcgcctgcctaaaaacctctagtagtcccactcctatcccctcacctctatgccttcgattcgtagacgttgtttacgcaagtgcgccgctttcttcttgattattgcaggtagtagagcgccgcattaccggctcaaggatccgcgtccaccaaagatcggcgacggcgagggggcggcgacggcggagtcgctgatcgggtcgaggccgccgcggtgcgacggcaagtgcgcgccgtgcgggcggtgcgaggcggtgcaggtgccggtggcgccgcgggccgacagccgcgggggcgagccccggcgccgcggagggctgttcggcagcgccgaggagagctacaccgactacaagcctctcaactggaggtgccgctgcgcggaccggcgagcactggacccgtgatcgatccggatgtgcgatcccctcgtcaggtctccagctgctgctgctgctgctgatgagcccattggtgtactgtacttacgtgttttttcttttctttggaggaactgttgctggtgaatggtcgatcgatccatggccagnagggatggtntggcaacgttctcgtctctgttctgtagctaggtttttggattttttggtagtggtaggcagctaggcata

SEQ ID NO: 111005 - DNA, 601 bp, Zea mays
  unsure (1)..(601): unsure at all n locations
  Clone ID: MRT4577_32729C.1
gtatcaaataaaatatattaacataaacctcacgggttattatcttggcataagctgcccaattcacctttagaaacgttacaaaggcttcctctgcccctattccttctccggcaacatacaggctaccataactctccatggcatggagaaaccacaaaaaggttataataaatactaggtgtgatcttcccgcccacattagcatcaccatcatatgtaagcttaatcgaaaagatacagtaaacatggcaaggtggtattggccttgcgccaaggagtagctctgacctcctgtttgttcagtcttccatccatggccgtcctccagtgaggagggcggtgctacaggcctacagcggcctaggtctttttgaattgcagcagctcgggcacttgtactgctttatgctctccgccttcgcgggagtgatcttcacgcacttgccatggtaccacttctcgcacacatcacacccgatccagaactcgtctgcgctgtatattccaccacatgtcccgcacaaggttgcaagacattgacttgggtgccattgngcgaggcgcccttggtagcttcaggagtgtagctgttaggtcc

SEQ ID NO: 111006 - DNA, 235 bp, Zea mays
  unsure (1)..(235): unsure at all n locations
  Clone ID: MRT4577_3272C.1
ggcacgaggatcaacatgagctgtcagaactaaaatgactgtcacatggggtccttgattatcatgagcagctagcagtactgactagcatgtgaaaaactgttcgcaaaaccacaagtgaaacattatgcttcggaagctgagaacgacgacgctgacgccaggaaaaaggaagagcaagacgttgctttaaaacaactaaggaagtnattgctgatnacagcgaaacccatgc

SEQ ID NO: 111007 - DNA, 435 bp, Zea mays
  Clone ID: MRT4577_32730C.1
ctaactgcgcagtattggcacagaattcgttgcaccatgctactatgaaagggcgttacaacatgcatacgcactagcctacaagctacaaattgcggttgctgtgagcgcctcacaacaaccaattgcacaatcggaacaacaattgttggcacatgtaaccctacagaccattggatcgcaacaactacatcaacagagagctggcataactggtccacctaaccgtggtgaaccgtgtcacctactattgacaacagctagtggcatacaacaaacttgctctggcgaacggagctgcataccatcgacaacaacagttagcacaggctatgccagtgctcactgaactagccatggtgaaccatgacgtctacctacaactacttttatgtagcccgctcgcgctgggcaatgcacctacctacctacaac

SEQ ID NO: 111008 - DNA, 658 bp, Zea mays
  Clone ID: MRT4577_32731C.1
gttctctttctttttgtatggtttctattcgatgtcaggtgaaatctcttagcctcttttgaatgaaaatgtgtattgcttaaattttattactaagccataagacatgtttaggtactcttaggttaaagttgcatagtggccaggttcatatctgacaagcttaatcctctcttatacatatgaacttaattttgactaaacatgcatgtagtgtaattttatgaaacatatttaattatatattgttcttcagttcttgattgttgaaaatttatttctgaaatagtattacaaatggggggtaaggcttgtctcggttattcctttcactcacgtggagctgttagcactgggtctttctttcttctattacaaatggtaccagatccagcacttctgattctcgtttagctagccatgaagtaagcttgctgaactgtagcagatttcaagaaattgagttaatgcatatacacacatgaaggtggaccacctatatggttagtggtagtaagtcctatacgaccccactttattgagtcttgtagtcatatatgttaaactaggtaagcatggtggatggatcatctcttatttgtatgtagatgagatgcaattactgggggggtattttaaattcttctgactgcattat

SEQ ID NO: 111009 - DNA, 388 bp, Zea mays
  Clone ID: MRT4577_32732C.1
ggctggagtcgtagcgtcaactacgtcaggtaggccccctgcacacccttcacggttggagatcaggtagtgtttaacttcgtcaccgggaaccacgacgtggcggaggtggacaatatcggatacgaccgctgctccaccaccaaccccggccacacattccaaatcgggcgtgccaacgtaaacctcacctgtggcacccactactacatgtgcggtatgagcgtccactgcagcggcgttatgaagctaggtgtcaccgtaagctacggctacggttccggctccgggtcccccacccccggcggtggctcgcccagcacacccacaccaaccaccccgagcgcccccgtccccgacacttcggccggcgcgttcgtgcgcctta

SEQ ID NO: 111010 - DNA, 286 bp, Zea mays
  unsure (1)..(286): unsure at all n locations
  Clone ID: MRT4577_32733C.1
ccggccgggccagcccgcccgtcaggccttccgccagcagaccttccgacagaacttctaccagggcagcggccgtcgatggcagagcaccgatggcgctcaacagcagcagcagcagggctggttcaagcgcatgtatgagagcgaggttggcttcaagactgtgcacttctgggctcctgtcatgaagtgggctcttgtccttgccggtatctccgatttcgctcgtccncgccgagnnaagctctcccttttcaacccccccaagaaaaaaaaaacccccccc

SEQ ID NO: 111011 - DNA, 570 bp, Zea mays
  Clone ID: MRT4577_32734C.1
cattgggaccctcgaggccggccggggagcttattatcgccagctaaaatacggcctgatctcccggaggctgctgtcgagtactcgtggacgtaatcatctcccgatttactttgcactgcctgatgagctagctaggctcccgcatcttgatggacagtctctcaactcccctgcgaagaaacgatggttacacgttctatgcctcttgctatatggacaagaacggatccatccgtgagcgcatctcacaaacattctgcggccggcgggcacctattatgtcggagacaacatcgaggcggtgatggccagcgccccgagtgaaacggacaaccctgcatcgatgaaagtgaactatgaggaggggatccccaaggtcaatgcctcatcaatgcgagtagcagatcagatctgctcgcagctgtgccagagctgctgagatatcgcgacgtgccaggggacttgcccacacgtggccacacgcccgggagtatagcagtgagttccacttctacggtctaccggccacaactggagatgcctgctgtaatcgatacattgtgattc

SEQ ID NO: 111012 - DNA, 258 bp, Zea mays
  Clone ID: MRT4577_32735C.1
atggcgaacgacgcgacctccttctccaccaccaccgccacaaaatggctctccaatggaccctcctccactttgcttggtggcctcaaaattgagtactcgatgctcttccagatcaagaaccccagcacggagcgcgacacgcgttgcagtgtgctcgagtttgtcgccaacgaagggttcatccacatgccgagctggctgatggcgcacctgggtgacctggagaatgagattgtgctgttgcggagcacgtag

SEQ ID NO: 111013 - DNA, 362 bp, Zea mays
  Clone ID: MRT4577_32736C.1
agaaaccaaccaaatctttttttgccagccaacaaggtggttggccggaaaataaaaccaataaacctccttctaaaaaagcctggaaccaaattcaccagtaagggggttggatctttcggggtcaaaataccctctggaataagtaaagtagtcctaaataactacgccctcctgttagctccaaaaaaaagcaaggcatttggacaaaatgaatggggggggttagcttaggctataaagctgcttaattgttgggtttttctcttctccgttatgttggtggggggcattttttttttttttagcttaaccttgcaccggacgcacgctcgctttaaatgctgaccaccggggcccac

SEQ ID NO: 111014 - DNA, 285 bp, Zea mays
  Clone ID: MRT4577_32737C.1
tactcggttgaagcagccaagacagcgtttgatgaactggagcagactgactcggaccgctgggcgcagaaaaaagacgttgaaagaattcttcagccgctcaccaaactcagcaccgataaatccgctcagcaccctgaaagactttgccacgctcatctgcaccaaacggcgctgccatacagtgcgaatgaatctaacacacgctgttttgtcagaacaaaacaagatctaccgtgtgggcagcaaacaaacagaggagccacagatgtggaggaatgaggc

SEQ ID NO: 111015 - DNA, 294 bp, Zea mays
  unsure (1)..(294): unsure at all n locations
  Clone ID: MRT4577_32738C.1
gccactttcagcctntttacaatacccccttatcccttatcaactaccccataccatctacaagcatgtttctatatttacactgcttcacactaccttntccatacaacgtatcaaactcttctcccattctctagaccaatcctcacatataccaaactcccatctactttcctcacttcaccttcatcccaaaccctatccttacatcataaacatcatctactactccttcttcttcacactcacccttcttaacaccttctacatatactccccactcaccaaccacat

SEQ ID NO: 111016 - DNA, 496 bp, Zea mays
  Clone ID: MRT4577_32739C.1
gggaaaaagcagaccccttgccaatttttgtttgggtcccaaaaaaataccatttaccctttccccgggccggaaaaaaaattttttttggtaccatggttttttcggccccgggcaaacccttgttggagaccccaagggctggccccgggggggggggcccccaaaacccaaattttaagttttgggccccccgggcctcccccggtttcgttttttttcccccggggttttttttcccggaaaaagaaattcggcaatggttggggaaacctgggtgggccccaaaggaaactttccagttttggaaaccccttggggggggggaaaaacaaaggcccccccggcggcgggtttgaatcgatttctttcccccccccgggggggtttttggcaagggcccctaaccaaagggccccctttttttttttttttttatgtggttcccccggggctggggggggccaaccccaatgccccccaccccccggtaccc

SEQ ID NO: 111017 - DNA, 1279 bp, Zea mays
  unsure (1)..(1279): unsure at all n locations
  Clone ID: MRT4577_3273C.1
ctcgaggccggccgggccgggacagtggtcaaccgacgccgccggtgggtgcccgggtgatccttgtccgccctcctgctcactccactcgcctgccagccgcacaccaatcacctctgcggccggcggcgtctgcaacgccagtctctgatccgaccccgatcggcacacacgttctccatggcggagcagctcgcatcccaagatgctcccaatccccctgctccggcacagagggtactggtgacgaacacgcatggggagaaactcgtcggcctgctgcaccacatggggtctgacaaggttgtagttctctgccatggctttacgggctccaaggactatagcctcatcactgatcttgcggccgcactaacaaagcaagggattagtgtgtttcgctttgattttagtggaaatggagaaagtgaaggtgaattccagtacggcaactacaagaaggaggctgctgacttgcactctgttgtcttgtatcttcgccaggagaagtacgacgtagcagcaattgttggtcacagcaaaggtggagatgtggtcgttctatatgcctctatctacaaggatgtccccatggtggttaacctctctggccggtttcatttggagaaaggcattgaggagcgcctaggcaaagagtttatggatagaataaacaaggaaggctacatcgatgccaaagacaaatcaggaaatgttttgtacagagtaaccaaggagagcttgatggaacggctgagccatgatttgcacgcaacgagcctttccatcagcaaagagtgcaggttctttacaattcacggttcagctgacgagatcatacccgtggaagatgcgtatgagtttgcaaggcttataccaaaccacaagctgcgtgtcatcgagggagcaaatcactgctacactgctcaccgtagagaactttctgatgccgtagtagaagccatcacaaccagtgaggcaggggagaccacaccctagatctgatgcagaacggcagcctgcctttccaatcctgcaatgccgctcttccatctcagtcacattgccttgtcacaatttttaaaagaaaacgagttctttgaaaatatcgtttgaatctagacgttgttaactcgttgtatcatgacatccttaatgctacgtttggacatcgatattggagagtatgaaattgaattgggttgaataccgaatcagacgtgataatgaaataagatgtaatttcaattctaaaaaaaaaaaancgcgtgtaattccg

SEQ ID NO: 111018 - DNA, 1152 bp, Zea mays
  unsure (1)..(1152): unsure at all n locations
  Clone ID: MRT4577_32740C.1
cgggacgttcttcttttaattagtgcctcagggctcgagagtgcggtgctccaattcgatcccaggggctccatacagatacagtgcccctgttagggatataactcgcgtctagttttcatccttacgaccttacctcactttagttgttgatggcccgggcggcgcaggaccctcggagatgttctggccatcgattccccgttcttgcttatgtctggatggtgcagaaggtttcgccccgggtctctggcttatctggagattgtttcacgcttttgtttatatattaacagtgttcattgcatgaactttcttcattgtacaaggatagatgttgacttgtttctaaatcatatattgtgttgtaccaattgaatcatactgttcagatttcattggacagagttatgagtgcagtggaggaagatggatgtagtttacggtgtgatctatgcgacactgagattgtacacagcatggcagaactcctgcttcgtggattggccacagcttcagtggacagcaccacgggcgatatattcaagagcgcatcttctgtagctgctgctgtgaagactgagctagaaaattatatgcttgtgagaactgaatcgcttatccgtgagtttgtcgatggagcccaggatcattcagatcaattgatgaaagcctccacaaggccaaccgagttcctatcagacttgattggcgacttcgtggcatccaaaaggaacttgctgagccatgtgtctgggtttttgtccagtgaaagccgcttgaacagaattaaagattttatgcagaagatggagatggagaatgtgtggacactggacgtaaggcaggctacctcagagactattcttgaaagcatagacatgaagtgcattttccactgccccgaaaaatttgttgagcaagacaagctggtagaccatagaagtcggtgcaaatttagagtcgtgggctgcgaaaatgatggatgctcagtttcactttctgccattcatagtgaggagcatgactccatctgtccatttaaggncctgccatgtgagcagctgtgcgagcaacatgttatgcgcagcgagatggataaacatttgtgcacagtttgtgctatgaagcttattaaactgtccttctacc

SEQ ID NO: 111019 - DNA, 995 bp, Zea mays
  unsure (1)..(995): unsure at all n locations
  Clone ID: MRT4577_32741C.1
cactttattatatggagyatggtatggctctaattatttattatatatgggtstyagaaatgaaataagaataggatataatggagaagaattttkaaggttttcttaagagggattttgaaaaatggntaggagttctctggatctaaataaaaaaaagarttggtttctcttaagckngcagaaaactgggatactttgtgntaaggaagaggctctgcacaaagaggagnggatttttctgyactttagtgtttttatgaytwatgagcyttatgacttggtkcytgggcttgaggtctgcdaaaaagatttggccagatggatggtactggaggaactgtgagaggttgtagyagggkaaggcaagagsggtggtgttacttgatgtgtaaatgattgtkatgagaacttgtagaatytggaaataattctctttaaaattgttaatgttcttahaacagaaacttggatctttgtgnattggagarnagttaagatgakyaagaagaacttgctgtttgtacttattaaaggaacttaacttyttgaggttttytttgagtkytamctctagttgatttaaagnatctaaaagattcttattagtknatgcttgagcttttaagttttgtactatttgtgggaatttaagattgattatctggggagcaaatggaacctttggkagcaaattaaagaaagaraaaaaaggaactctgavcaccttctctttagtagattgcttgagaaccttaacaagtcttgggataactcttgtggtggacaaataattaactgcaggattataaaatgataaaagcragatggagagggaagttttataaaggagctgaattgactgttgtgtgggagctggggaamttaatggaatgagsatcttgatgggataagcttgaaaaaataatgttctaaaatatggcttcttttagcgaagtggagagggaatggatggragtaggaatagaggagct

SEQ ID NO: 111020 - DNA, 349 bp, Zea mays
  Clone ID: MRT4577_32742C.1
attcggctcgagcacaaaataacaaactttttgttttaacccaccccccgcaccctcaagaaagggagactctttaatatcgtgcggggggttccaacacggcaaccaaatggtcttagggctttgctaggatatcttggcccactattacaattccacccggtatactaactgagaccatactttaaatacccgggaatggttaacatgggggataacttaactaaattgatgtgggctctctaacccatttccagtcagtatacgagcccaaccatcaaaaccaatgaataccccatcagacggtaaaaccccctgtgtttatagatcccaaccgaaaggttttttt

SEQ ID NO: 111021 - DNA, 291 bp, Zea mays
  Clone ID: MRT4577_32743C.1
cttcctcctccggcggcaattcgacggccaaccgcgtctccctcgccgcggcggccatggtgcatctcaacctcgtcccgcactatggcaagacttcctataagccaaggcggccgtatgagaaggagcgcctagatgccgagctgcagccggctggtgcgtacggcctgcggcgcaagcgcgcgctgcgccgcgcgcagtatgccctgagccgtctccggaatgtagccagggcacctgctccccctcggatgcgaggcacccccgccgcaatccttggaggggcgaggc

SEQ ID NO: 111022 - DNA, 351 bp, Zea mays
  Clone ID: MRT4577_32744C.1
gggtcccagcacgcgtccgaaaagtatcacatgatcatcatttcttcctcaaagaatgtctgccttttctggcctcggcacaatttcacaagcatcaatagtaatgcaaatccataataccatgttgacaactcaagcagtcatgcttacaagacaagggaacttgggaagttcctgggaattttaaccttatatacaaagatgaagacaagaatgatgggcaaatttccaaagtttaataatgatttaaccttgaaggacattcctttacaaggtccgagtttcacttgggcaaatctgcaagctgattcggtgttggtaaagcttgacagtttagtgggaacaactgtt

SEQ ID NO: 111023 - DNA, 493 bp, Zea mays
  unsure (1)..(493): unsure at all n locations
  Clone ID: MRT4577_32745C.1
tttaaaaaaaaaaatttttttaaggnnnnnnnnngggggggggcgggggacaaaaaaaacaannggnnttttttttttaccaaaaataacatccacgtaaaacagcaaaaaaatttttcagtctcaggggacctttctaaaggcccccaattttggacattcatcaatgtcaaatctcccgaaaaacccccattggtgggagggggcatactaattttttttactgnataattatatccccactgctactggaacaaatgccaggggttcccgccgaaaaaatgccccttgagcttctcaagcctcttgaggatctccaaaaaagatggtctcaaactgatttccccaaaccaacataactcaaccaaaaccttcaactcgagggagtgatttttacggaaaaccggacgatacccatctaacacaaacttaacggcctcatacggccccccccccccaaaaggaacaatgcccttgcggggtgtcgtatgga

SEQ ID NO: 111024 - DNA, 1178 bp, Zea mays
  Clone ID: MRT4577_32746C.1
accaaaccaaacccagtagcgctgctcccagcagcagcaggcacgaacaaccgcccttgccacctcacctccagaaccagtgagtcactgtacgttaccggagcaagcaaagaatggcgtcgtcgctcaagttcacggtgcggagggggccggcggtgctggtagctccggcgtccgcgacgccacgggagcttaagcgactctcggacatcgacgaccaggacgggctgcggctccacgtccccatcatccagttctaccgccagaacgcgctcatgggagggcgggaacctgcgccggtgatccgggacgccatagccagggcgctcgtgccctactaccctttcgccgggcggctcagggagctagaaggtcgcaagctcgccgtggattgtaccggcgagggtgtgctgttcatcgaggctgaggctgacgtccggctcgatcacttcggggacgagctgcaaccgccgttcccatgcctcgaggagctcatctttgacgtccccggctcgtccgaggtcctgggctcgccgctcctcctcttccaggtgacgcgcctggcgtgcgggggcttcatcctgggggtgcggctgcaccacacgatggccgacgcgcaaggactcgtgcagttcctgggcgccgtggcggagctggcgcggggcgcggcggggccgacagtccggccggtgtgggggagggagctgctggaggcgcgcgacccgccgcggccggcctttgcgcaccgcgagtacgacgaggtgccggacaccaagggcagcatcatcccgctcgacgacatggtgcaccgctccttcttcttcgggcgccacgaggtggcggccatccgcgccaacctcccgccggacctccggtcccgcgcctctaagttcgacctcctcacggggctcctatggaagtgccgcaccgcagcgctcgccctggacgccgacgaggtgatgcggatgatctgcgtcgtgaccgcccacggcggcaaatccggcgtcgccatccccaagggctactatggcaacgcctttgcgttgccagccgccgtcgcgacggcaggtgatctcgtcgccaagccgctcgggtacgccgtagagctggtgaagcgggccaagggcgaggtgaacgtggagtacatgcggtcggtggccgacctgatggtgctgcgc

SEQ ID NO: 111025 - DNA, 327 bp, Zea mays
  Clone ID: MRT4577_32747C.1
gggaatatcacagcgccacaaaaacatttgaaggcccataggggggttctgaaaattgcaacatacctggcggggtgctgccaccttaaagttaagccgtttaaccgaggaccaaaaaagtgctttgattatgctgaaacgcgcgtcggacatactaatggccgaagaggaaaaaaaatccacccaggcgcatgcctaaagtaagggataagttgtgactttctttcacaaataaggccaaatcactttttgagttagaaaattctagaacaaagaacaaaaaacttgagaaattctgaacttaaataattattttgggccttttgg

SEQ ID NO: 111026 - DNA, 2125 bp, Zea mays
  Clone ID: MRT4577_32748C.1
ctaatccacagctcatcgattggatccatcactgttcgtcaacaatttctatctgattccatctgcacacagatttgtttatatattttaattaaaaacagtttaaattagatttttgttcgttggccaatcattttacacttgtattttttaaacatggcttcttctggtatgaatgtagtcaaatatgtttttggcttgttcaacttggctttcatgattggagccggtgttttgatctatttcggtgttcaagtgttcatcggagaaatcacagttgaacacgaaatcattagtcgtcatgctcaagctcaaacggtggccattgttctgatcacttctggagcaatcgtctttgttatctcatttttaggctgttggggtgcttttcgggaaaacacttgcatgctgctcacatttggctccattttgggtgcaatcgttttcactcaaattctcttatgtactcttatttttgtattccgagaagaggtacatgaaaaagcgactggtgaactgctgcccgaaatcattcgcagctacaatttcacagactcagctgatcgtttgaccaaagtggtagatgatatgcaatctcgattccactgctgtggagtgaatggttcggatgattggaaaactggcattccattctcatgctgttcagattacactccttctcttctggacggaactgtccaaacagtgcgctattgcccgaatgatctgcgacagccagcttattctcaaggctgtttcagcaaagttgtgaatgcagtcaacgctcactactggtatctggcctccaccgtcgtctcttttgctctcattcaaattatggcggtagttcttgcttgttgcgttgcttattcagttaaaaagcattatcaaacgatttagattcaatttcttcttcagcacaatttgtttattcttttttacgattttttttctctttcatttgtcgaccatttacattttgtttgcttatacaaataaacgcactttaattttcatcgttttactgtttgtttgcccaccgactcggtttcgaatctttcaccgcagacgattcggcgttcgactcgcaattcaagcctcaatctcaatgtaatttggctttcagttggattgaggcggctcaagtccaatcattttgtgttcactcaccagtacaagtacaatatttatgccaatttgcgcctgtttcttcgcatttaaacgcattgttttatcctgctttcaaccagtttaaacctattaacggtttgattgtgcaatcgtctttcggttgcaagtcctgtagctagagcagcaaccttttgcttgctttttgattaactctctaatcaatgtcttgctcagcaagctcaaactgattgattttcatttcggtgctgttcggtttgtttccgaagtgcttcgaattcacggttttgcatccaccattactacacctttaatgttttctctacacaaatggtcttttcattaaaaccaaaacaattcagagttccggctccaagctgtatcttatttgtactcattcaactcatttgtcatgtttcacttcttaagcagcctggctcgctttgcacttgacattgtttttcgtattcacaattatgtcacatacacacaaacaagtacacgcacacatgatcatctttaatttgctttttgtttttacatttacattacttcaaaagccaattgtttaccggccaaatccatttcgattatgattttcaaacatttaacttattaatcaaattttgtactaaattataagcaatcgaatatcgtttttataattacattttaaataatttaaaccggattcactctaatttttgctcattttacgctttaactcttaataaaaatgtcaattaaattaaaattaatcttttttaaatatttttaattgtaaatcgagcaattagattaaaataatataaatcatttttcgcaccctttttcaaatttaaatgtaatttaattaaaattctaaacaaaattgtattttcatgtctccaaaatcatagttgatgttacaattatttttccaaacgtacttataaattcagcgttttgctaattaataaaataaaactttttaact

SEQ ID NO: 111027 - DNA, 580 bp, Zea mays
  Clone ID: MRT4577_32749C.1
gccggccgggctgccaagcctgtggatgccagtgagtgaacaccagacgtattgcgccgactcctgacccctaccgatcctcgcctgctgcaggcatggcgacctccggggcgctctccaccgccgccaatgccacccagctctaccggtaccgtgcttcgctggggaagccggtgaaggggcttgggctgagcatgggccgcgagagcgcccagcgtaacattgtgtgccaggcgacgagcagcatctccgccgaccgcatcccctacatggagaagagcaagctgatgaacctcctcctcctcggcggcatctcgatgcccatcgtcggaatggtcgacccctacggcgacttcttcggccctggcggctccggaaacgccggcggcgggacctactcgaaggacaagctgggcaacgacatcacggtggaggcgtggctcaacacgcacggttcctacgaccgcacgctcacgcacgcgctcaagggagaccccacgtacctgtcggtggagcaggacaagacgctgggcacctacggtatcaacgccgtgtgcactcacctcagctgcatcgtgcc

SEQ ID NO: 111028 - DNA, 1915 bp, Zea mays
  Clone ID: MRT4577_3274C.1
atttgaccagctgaagtcaacaggcatgccgaacggtggcggcaagaggtggcggccgggccccggccggcagtatagggaccggagtggcatttgaccagctggagtcaacaggcatgccgaacggtggcggcaagaggtggctgctgctgctgccgctgtcgcggtgggttctcctcctcggcagcctccagctcccggcggccggcggcagcggccacgtcgtcacgcgcatgcgcgggttcgacgggccacttccgttctacctcgaaaccgggtacgtggaggtggacgagcagcaaggtgtgcagctcttctactacttcgtgcgctcggagcgcgacccctacgaggacccgctgctgctgtggctgtccggcggcccaggctgctccggcatctccggccttgcctacgagataggacccttaaaatttgatgcccgagggcaaggtgaatttcccactcttctctaccgaccggagacatggaccaaggtgagcaacatcatatttgtggactcgccggtggggactgggttctcgtacgccaagtccgaggaagggctcgagaccggcgacaccaagcaagtgaagcagctagtcatttttctcaggaagtggctccaagaccatccccggttcgtgatgaatcctctttatattgctggagattcatacagtggtctcatcattcctactcttgcattagaaattgacagaagcatagaactcggtgaaaagatattttccggtctcaaggggtacattgctggcaacccgctgactggcggacagtttgatacggacagccaaattccatactttcatgccatgggacttgtatccgatgaactttacaagaatgctagggagaactgtggtggaaagtatagtgctccactgaatgctgtatgtgcagaggctgtccaagctatcaacaattgcacacgggatatcaataagcaatacatcttggatcctgcttgcccggatgatgatctgttgagccccaagactgtagcagagacagatggaacgagcaggttgatgctagagtctgcagattttctacttggttccaaatgtgcagaagctttatacattctatcctacgcttgggggaatgatgatacagttcaggagagcctcggtatccgcaaggggacaattggagcatggaaacgatacagccatgcattgccttacaattatgatatccagagtgtagtggattaccattcaaggctagccacaaaaggatacagggcgctgatatacagagcggcgaccacgatgctgttgtaccccatgttggcacacaagcatggattagatacctcaacttgacaatcgttgatgattggcgaccatggtacgttggaggccaagttgctggattcacaaggagttatgcgagcggcctaacatttgccaccgtgaagggtgctggacatgttgcgccgttgtataagaccttggaatgccaaaaaatgtttataacatggatttcagggaatcctctttgatgcaagtctgatagaatgacccatcggttatctgagtgggcgtcagccgtcaggaatcctctttgaagggtcagttgcttgggtttctttggtgtcaactggttcaaatccttgatcgatatggttgatcgtaatatttttggaacttatttcaagatttattaacggtattgttctcttaagacctgcctgttgattctgttcatataggtgaacgtgcatatgttgttgctatatgcatacatggggacatggggtgtaggggtgcttgtgcgttcgtacaaaaaataaagtgccaatttggattaattgtttggtccccatgcaggtgtatatgcagttgcgtgtaaaaattctttgcataaaacaattataacttgcttccta

SEQ ID NO: 111029 - DNA, 350 bp, Zea mays
  Clone ID: MRT4577_32750C.1
aaggccatacaaataaaatgttcccgcaatgtgtagacttgcgcacacaaggcgaagtagaaaaagctctaacagagtccatggaggctcactcaggcatagaccgttgatccacaaggccccttccagcagctgccacccgatcctatatatggatgggcgttgacagcctgggccagacctccatgggtcaagccccagaagaagcccatcatccatgcaaggagccttttccaagaattggacgcagagcgacaaatcagccaccgtgggtgccacgagtgggtggccctcctccgctccatgggcggccccccagggaggaagcgagcaacctcgagcgttcaccc

SEQ ID NO: 111030 - DNA, 286 bp, Zea mays
  Clone ID: MRT4577_32751C.1
accaaactgtagggtctgatgctccgctccggctctgcacagggctccagcagcagctgatccggggagtctcctgcaggcgcccccacgggcttgggcctcaccagccgcagctggtccagggctctcttcttcagattactgcgggggcctcggtgccggctggagggcaggcatttctcctgaacttctaggagctgctgggctctctgataattgggcacggtgccccggtccaggtcccgcatagtgacggggtcaaccgggtgcagaaccatcctgcctc

SEQ ID NO: 111031 - DNA, 358 bp, Zea mays
  Clone ID: MRT4577_32752C.1
attgggaaaaattcattcatgggcccaaaaaagaatatacaacaccctgttcaagtttccagggggcccttccagacaaaaaaacttggggccctttttagggcagccccagccaaatggtggcctaaagaacaccacttttaattccttcccgggtttttatttacttacaagccagttttgttggaatataaaatttttccttatgctacgaccatgccctggtgaaaattcaccttggtgggatcgatagcacctgtggcaaacaaccgggttatttggggacataaaaaatagcttggggcccgggggagctcgacgggggtcgcaaattcttttatgggttaggtgaacatgc

SEQ ID NO: 111032 - DNA, 269 bp, Zea mays
  unsure (1)..(269): unsure at all n locations
  Clone ID: MRT4577_32753C.1
ctccactcatcttttctcgtttagaacctctaaaatttcccccactcgccagtcgcagcagcacctgtagcagccatggacgccagcggancggtagcaaggggaagaagggggcggccgggcgcaagcagcggcccaggaagaagtcgtgagcggtccgtcaagccgggctgcattcccgtcgccggatggggtactcaaaaggcgtaggagcgtggcatgcgcccgttactgcgctttgatactgcgcgagtctgattgcagaccgc

SEQ ID NO: 111033 - DNA, 399 bp, Zea mays
  Clone ID: MRT4577_32754C.1
ggaaaccccattggttttttttttaacaaagcccaaaaaaacttgggctggggggattcgttccagggggggggcggataagttaaacacaaaaagacaacggggccaaaaccagggtgggtccagggtccaggggccccgttcaaatttttttttagcataaacaagcagaaaaaatgggttgggaccaaagggctttggggaccacccacgatggggggggaaaaatatttttttttaccggggcttgaaaaaggggggggtcagggcaacaacccggttgctgtagcccccacttgttgtggtaccaaaaaacaaacttaataaaaggggcgttcagggaaaacccggccttggggtaaaaaaacttaacccggtgtcaccggggaaaagggggga

SEQ ID NO: 111034 - DNA, 406 bp, Zea mays
  Clone ID: MRT4577_32755C.1
tagtcggcggccgcccttcttttttttttttttttttttttcaatccttttttttttttttttttttttcaaaaagtcccttttccattaaatacgggcgaaaaccccaaaacaaatttcgaaaaaccaaaaaaaaatgaaatctctttcatccctagtaccacactactagcggttagtgacagtaaaatccaggggcagtgaggggacaactaacaagtgtgttttaccctaactgaacatacaacggggggggtttggaaacaaaaaaatacctaggtccctaaaaaccaaacgtgctttatacagggcgcactttactcaattttgctccccgtttccagggccaccaacaacccccccgtttaaggacaatttttattctaccggaaaaatcatgccccct

SEQ ID NO: 111035 - DNA, 743 bp, Zea mays
  Clone ID: MRT4577_32756C.1
aagacagccgggatggcaaaagttacagtaccaatctggcatttactcctcccgaatacatgagaactggacgtataacacctgaaagtgtcatatatagctttggcaccttgctactggacgttcttagtgggaagcatattcctccgagccatgcccttgacctgattcgagatcggaactttagcatgcttacagactcgtgtttagagggccaattttcaaatgaggaaggaacagaactggtacgattagcttcaagatgcctgcactatgaaccccgagaacggccgaatgtaagatctatggttcaagcattggctcctcttcagaaagatgttgagactccatcttacgaattgatggatatgccccaagccggtgcatcatctgtccaatcattgcctctttctcctcttgctgacgcttgttccagaaaggatctgacagcaatacatgaaattctagaaaagacagggtacaaggatgatgagggaacagcaaatgagctctcatttcagatgtggaccaatcaaatgcaagatacattaacctcaaagaagaagggtgacagtgcatttcggcaaaaggattttactactgctattgactgttactcccagttcattgaagtcggtacgatggtgtcccccaccatttatgctcggcgttgcctatcatatctgatgaatgacatggcagaacaggctctcagtgatgcaatgcaagcgctagtaatatct

SEQ ID NO: 111036 - DNA, 434 bp, Zea mays
  Clone ID: MRT4577_32757C.1
gcgtgatgatgtgcgtctttttggtctcacgtcgcatctatggtgtgcgcacttgtgatttgtgatctaatagctgttgagctgtgccttttggctcctgattttgttttttgctctagctgtaaagcaagatcatgctgctagccgcctgttggaaacaagccaaagaatttgatgttgcttgcaattatttgtactgccaacccacatggaaaggtcttcagcgtggggagtgtaaactgtcaaagcacggatggaggcaaagtatggctgagagaaagagaagggtgcggaatgcggacgctagaaagagccctaaagagagtcatttggactagtttgaaaacttaaatgacattgaggtcctgtttgagagagctccaactcctctagaaatggtttctaaaaaaaaaaaaaaaaaggcccctagggcc

SEQ ID NO: 111037 - DNA, 249 bp, Zea mays
  Clone ID: MRT4577_32758C.1
gctgcacgccaccgtcgagcgcgcacccacggcatgggcgcagccgatatctgcagcacgatggctctactggaagcaccgctagttggatgcagaagttgccgcaaggaaagctggagcatctgcgaagcgagctgattatatcgctttagcagcgggtcacatgaacggtcgcgagctgttccaaacatgaccctgagtgttcgacaacagcttttactgagatcgtgtactgctactgaatctgca

SEQ ID NO: 111038 - DNA, 194 bp, Zea mays
  Clone ID: MRT4577_32759C.1
aagcgctatataggtaactagctcgcatagcatgacgctagctgctgacaagaaaggctatctgcagagcaagaccacgtgcaaggacgatggctactacagagaccagtcctgacagctaagctcgctgatcttgatgacggaagcaatgatttcaaacgtagtgctatcgctggaggacctaactcacagcc

SEQ ID NO: 111039 - DNA, 987 bp, Zea mays
  Clone ID: MRT4577_3275C.1
cggacgcgtgggttttagtggaaatggagaaagtgaaggtgaattccagtacggcaactacaagaaggaggctgctgacttgcactctgttgtcttgtatcttcgccaggagaagtacgacgtagcagcaattgttggtcacagcaaaggtggagatgtggtcgttctatatgcctctatctacaaggatgtccccatggtggttaacctctctggccggtttcatttggagaaaggcattgaggagcgcctaggcaaagagtttatggatagaataaacaaggaaggctacatcgatgccaaagacaaatcaggaaatgttttgtacagagtaaccaaggagagcttgatggaacggctgagccatgatttgcacgcaacgagcctttccatcagcaaagagtgcaggttatcagcttatttaggcataattttcccttcacgctaattaacaacaatcgagcgcccaattatagcagcacaccgtactcatgctaattattattggactctttgcccaggttctttacaattcacggttcagctgacgagatcatacccgtggaagatgcgtatgagtttgcaaggcttataccaaaccacaagctgcgtgtcatcgagggagcaaagcactggtaacaacgcagagtacgcggggccgtagtagaagccatcacatccagtgaggcagtggagaccacaccctagatctgatgcagaagtgcagaacggcagcctgcctttccaatcctgcaatgccgctcttccatctcagtcacattgccttatcacactttttaaaagaaaacgagttctttgaaaatatcgtttgaatctagacgttgttaactcgttgtatcacgacatccttagacgtcgatattagagaggatgtaattgaattggtttgaatactaaatcagacatggtattgaaatgagatgtaattctaattttattgtttggatgttattgaattgaagtttg

SEQ ID NO: 111040 - DNA, 1191 bp, Zea mays
  unsure (1)..(1191): unsure at all n locations
  Clone ID: MRT4577_32760C.1
ctggggtacctcttctccggccggcgcagccgccgccgccgcctctctctcccttccctcttctctctgccctcacctctctcccccttccatcacctcgctagtaacaggtcaccgtgtgtgtgcgcgccatggggattcatctgccgccgcctgccctcgccttctgcctctcggcgcccactcggttctagtggccgcttcgaggaggcgctcgcgcgcatcgaggagctccaggagcgcgacactggcgccgacgatagcagcacagcctcgtcgttcttgagcgacggagaggcggcgtcgcggccagcaggcgagcagcagtcgcactccgcagatttcttgagcgacggagaggcggcgtccggtggcattcagagacgtgcgtgacggtcggaggtcgtcgagcgcgtctagatagcatccaagacaaatagcgttgttcgcgatctgaggcagctggtaggcagtctgggcttgggcgcacgcgagccagagagggagggctgggagcacgtcatctccaagagcagcgacgacgtctcctacaaggcctggtgcgacaagcccacggtagttgccaattgcgtacatgcattgcaacagatctgggctctagaagctgctaacttggtagcagaaagattgaggcattgcatagcaaaccactggatcaaagagtttagtgaatggccacagtgcatgttcttgagttgcaatcaaagatccttccatataataataacaaaatatttgacataatgaatctgttggaggatagacttcaacatgcaaatgaagctcttggtttaggacaacaattaatggttatagtgcatcttctgactttaggatatcatctcatacaaatgttacgcatagagatatggtaaatgatgcatctgtagcaagaggaatttctacttaaaagcgtttctgttgtgtttgcgaatatgaaagttattctctgttcacattcttgtgatgcataaaaacaaagtcttatttaaatacaagtcagacaacggactagcacatgagatcacaacaacaacacacttggtccatagataatgttttatttggaggttaatttacttgaattttttttaattccatggactctntactctggtgggtactggcagtcctaaatagtcattggcccttttatgtgtaaaataacag

SEQ ID NO: 111041 - DNA, 585 bp, Zea mays
  Clone ID: MRT4577_32761C.1
gtacccgggcccccccctcgagtttttttttttttttttttttttttttttttttttttttttttttttttttttttttttttttttttttttttttttttttttaacaaaccaaagggggtttttttccaaaaaggggacctgaattcaaaaaaaaaccaccgggggaaacaaatccccaatttcccaacaattaaagggggaaggggattcggggcccaaaattttaaacccccaaggggaagggccaaaaagggccccaaattttccccccccccaaaataatttttcgaagggaaaaaaaagggggggggctcccccattcgggaaaattaactttgcagcggccttgcccttggttttttgaatttaaagaacctttttaaaaatttttggccccccaacaaaaaaaccacaaaggattcttcccctaacagaaattccaaaaagcccccccccaaaaggggggttaaaagcccgggggttccaaagaacccggaactttttgtcccaagaagccccaaaggggggaaccccctgtttttttttcccgggaaggggacattggccccccccccccctttt

SEQ ID NO: 111042 - DNA, 757 bp, Zea mays
  Clone ID: MRT4577_32762C.1
cctcgaggccggccgggccggaagccgcagccgccgccgccgcctctctctcccttccctcttctctctgccctcacctctctcccccttccatcacctcgctagtaacaggtcaccgtgtgtgtgcgcgccatggggattcatctgccgccgcctgccctcgccttctgcctctcggcgcccactcggttccagtggccgcttcgaggaggcgctcgcgcgcatcgaggagctccaggagcgcgacactggcgccgacgacagcagcacagcctcgtcgttcttgagcgacggagaggcggcgtcgcggccagcaggcgagcagcagtcgcactccgcagatttcttgagcgacggagaggcggcgtccggtggcattcagagacgtgcgtgacggtcggaggtcgtcgagcgcgtctagatagcatccaagacaaatagcgttgttcgcgatctgaggcagctggtaggcagtctgggcttgggcgcacgcgagccagagagggagggctgggagcacgtcatctccaagagcagcgacgacgtctcctacaaggcctggtgcgacaagcccacgaacatcaaacctgagttgcttaaatgagcttatgtttgtcacgtggcttctaccaaaaggttgttttgtagttgccaattgcgtacatgcattgcaacagatctgggctctagaagctgctaacttggtagcagaaagattgaggcattgcatagcaaaccactggatcaaagagtttag

SEQ ID NO: 111043 - DNA, 578 bp, Zea mays
  Clone ID: MRT4577_32763C.1
ccggccggggcgcaaaatgtgaaatgactgcagaaatcatgttctttattcgccacactcaaaacacgagttctccatactctgccaccatgccactctatgagaaaaacacatatccgggacgggagcacacatcgaaggatctcttgcaagcgagcttcatccatctgaagattgaactcggcgaagcagaaacgcacggggctgatgatcgtgccgtgccgaggtgctgcccggcaagcgcttgcgaggcgctaggaactgggggtgtctgcacatgaccatccagaccgccgatctcatagagacccttaccgcgcttgtcgctgagggccgcctgggctcttgcaacagtttctgcacgcatgatcacgccgacgccatcattgaacgcgattcagaacgccgcgttccgctggaagggggagaccctcgaggagcacagggggagcaccgagcgctgcctctactggagcaaggtgggcggcatcaacctcatgataaacgaccagaaggaccccacggtgatgatccaccacggtggtaaggtcgacgaggacttctagaagaccggcaag

SEQ ID NO: 111044 - DNA, 968 bp, Zea mays
  unsure (1)..(968): unsure at all n locations
  Clone ID: MRT4577_32764C.1
catgcaggaattttttatttttcttggtcttgtctggtcacttcagttctgcagtgtgcgcagcctttttgttcttgtaaccagtcgttgtcacccgcgcagcaagganaatattttttntgtctcttccgtgcagaagtgtgagggatgcagggcgcgcagcgcagttctttttcttttgccgtccggtctcatctgcgcagacactcggtcgcaaccttttcagctttatttttgcaagatttttactgtttcatttggtatgtgaccaataatagttcctttcaagtgacattctttcaattggtaataatctattttatgaagaaaaaaatgtcaatatgaaggttaaattccttttggcttaaatttgtaaattagtgcatattgtgaattctctgctccatgtgcattaatttaaaaggaatttaatttatgcctttacgcctcataaatgatgatttgtttgccattcatatatagatatcatcattcattaaatacttccttgtactactaatacctcttttaaaagtattttatcgactagttttaaaaggaaaagagataacaaagaaggaagtctccacaaatgatgaaaagaagaatactaaggtgacaccaccacagatagtaagatcgatcaaattggtataacaaatggtacgttctatatggtggtaagtattcttaggcataagttaattcattgcaaatttgtcatgccttgaccatgatatgtaatgtacttctcatgagactcttaactgaattgaaagtgcatgtggtaagtcattcaaatacttgatgcacatatctagtgggagaacattatatatcttgtgtcatagagaataagtttcccttgagtaagctatactaagataatccaaaatggtaaatttgtatctcattcatatggattgtaatctttattttctaaatagctactcttgatgcagtttaaa

SEQ ID NO: 111045 - DNA, 301 bp, Zea mays
  Clone ID: MRT4577_32765C.1
aaaaaaaaaaagatatataataacgggctcaatttgcattcatgagggcggctgcttggagcaagagaatcctcatgcggggagcacaatttgcctaacgaggttgtagatggcccaaaggcatcccttgggctggtgctcctccgggagccttaacatgctcgccaccttggcaaactgcgcctgccccagggcagcgtccgccggcgacggcttcttcgaggatcgcgcctcgggtgtcctgagaaccctgtggagcttgggtggcgacagccccccctggatcgcccaaatgccgagc

SEQ ID NO: 111046 - DNA, 774 bp, Zea mays
  Clone ID: MRT4577_32766C.1
gtgtgtgcatgcagagtccggtcacttctcctctgttgggcgctgcccagttttttttggacacctctgctctgttcggtcacttctcacagccgagcaaacgtgtcagggcgccatgcatatttttttttcttgcctccctcaactgcagtgtgcgcagcctttttgttcttgtgaccagtcgttgtcacccgcgcagcaaggaaaatattttttttgtctcttccgtgcagaagtgtgagggatgcagggcgcgcagcgcagttctttttcttttgccgtccggtctcatctgctcagacactcggtcgcaaccttttcagctttatttttgcaagatttttactgtttcatttggtatgtgaccaataatagttcctttcaagtgacattctttttataaaaaatgtcaatatgaaagttaaattctttttggcttaaatatgtaaattggtgcatattattaattcactcatccatgtgcattaatttaaaaggaatgtaatttatgcctttacgtctcataaatgatgatttgtttgccattcatatatagatatcatcattcattaaatacttccttgtactactaatacctcttttcaaagtgcttttcgactagttctaaaaggaaaagggataacaagctaaagaaggaagtctccacaaatgaagaaaagaagaatacttagatgacaccttctcataaagtaagacctttcaattgatacaacaaatggtacgttctatatggtggtaagtattcttaggccc

SEQ ID NO: 111047 - DNA, 764 bp, Zea mays
  Clone ID: MRT4577_32767C.1
agcagcagttgctggtgggggcggacgacgacacctcctcctgctgcctctagtccaccaccgagtcctcgtggccgtcgccgaccacgtcgtcgtcctcctccgccgggacgacggcgccgaagatgcagcaggtgtacttcaaggagccgccgggcgacgacgccggcttcttcctcgtcacctactacccgtacgagaagatctggtgctactccctcctcagctattagtcgacgcctgctgtttggtggctgggttgctttcttaccacccctactgacgtcgtgctgctggaggaggaataaagaatgatgacggtcgtcgcgatgatgttatatacaacatgcggggccactactaggatgattattactaatcctcgcccgcccgctgattctgtccgtactgcggagaagatcgtcggactactctgttgcttgttactgctggaccaaccgtagaacaccccgcattaagagaggtggtactacggaggaggagtgaaccaccagcgacgttgtactgcgcgctcttgtgctactccgactacgacgactgccagttcgactaccggagtgctgcgagggaccccattgccaaggctaatccggtggtgaatgcagacaagctcgacaagatctaaggggggttccctacggttgggtatcaggaagattgtagaccgcggtaactcgacatgcggaactgctggcttgccccccgcgcctttctgctccatgtttgctgctacaatcttgttg

SEQ ID NO: 111048 - DNA, 415 bp, Zea mays
  Clone ID: MRT4577_32768C.1
atggcggggagggataacgatgcgcgacaagcggcgccgctcaaaggcgacaagcagcagttgcggcggaggctgaaggaagcggcgctcctcatccgcacgatcaaagggcatgtgcgctggatcttcgaagaggttgccgccggccgcaccacgtctagagtgcaccaccggtaccggaactattgctcctccgccgactctgcgtccacgtccccatgtgcatgcagctactacatcctcgtccacacggacgtcctcactctgctctacaacgacgaccacacttccagcctcaatgtgctcatgaggatgctgttcgtggagcagcatctcctgcagcaaagcaagcactgctccaatagggacatctatcacatgtacgcctccagcgtcgtagaagtagcagttgttg

SEQ ID NO: 111049 - DNA, 1560 bp, Zea mays
  Clone ID: MRT4577_32769C.1
catattcctaagctatcatggtgcaccggacttccatagccgatgtgcatgtgatgtgcatggatctaagcccaaagaaacccaacaaggccagcgccagcgacggcggagcctactacgactggtcccccgccgatctgcccatgctcggcgttgcctccattggtgccgccaagctctgcctcaccgccggaggtcttgccctacccagctactccgactctgccaagatcgcctacgtcctccaaggcaaaggtatcttcggcgtggttctcccggaggcgaccaaggagaaggtcatctccgtcaaggaaggcgacgcgatggcgctccccttcggcgtcgtcacctggtggcacaacaacgccgacgccgctatctccgacctcgtggtgctcttcctcggcgacacctccacgggccacaagccgggccagtttacaaacttccagctcaccggctccacgggcatcttcacgggcttctccacagagttcgttgcccgcgcatgggacctcacccaggacgacgccgccaagctcgtctccacccagcccggatccggcattgtcagggtcaaggacgggcacaagatgcccgaggcgcgcgacgaggacaggcagggcctggtcctcaactgcctagaggcgccgcttgacgtcgacatcaagaacggagggcgcgtcgtggtcctcaacacccagaacctgccgctcgtcaaggaggtcgggctcggtgctgaccttgtcaggatcgacgcccactccatgtgctcgcccggcttctcctgcgactccgcctaccaggtcacctacatcgtgcgcggcagtggccgcgtccaggttgttgggatcgacggcacgcgagtgctcgagacccgcgccgagggaggctgcctcttcatcgtgccaaggttcttcgttgtctccaagatcgccgacgaaaccggcatggagtggttctccatcatcaccacccccaacccaatctttagccacttggcgggccggacatcggtgtggaaggcaatatctccggcggtcttgcagtcgtcgttcaacaccacgccggagatggagaagctgttccgtagcaagaggcttgactcggagatcttctttgcgccttcaaactgattcattcgccggtggaaaatggtccatccatctcgagtaaacttggtgtcctgggtgtgttctttagcagcttcagtttagaataatcaggttatgtcttcatcatcagttttttagatcggttcatgtaataataaacttgagatggtacacatgtttcttaattagttctcttggtatttaaaagaaaataggccggaagccccacggcggagtcctctcgttaggtcggcgtgcttagattaggttagctagcttgcctttaataaaaagagagtggtggtcgtcggcgtcggcttcggcggtctgcttcttcttcattcagtgcgtcggtcggtttagagtctgtcacgtgtcccgtcattgaactgcagtttttgttaataaagtattgttattattaggtattattattctcgccctc

SEQ ID NO: 111050 - DNA, 845 bp, Zea mays
  Clone ID: MRT4577_3276C.1
actctctccctcccaaggccggccgggccggtgcatcccctcgcccgtcgtctcgccagtcgctacaccccaaaaacctcacgcgcgcgctcgcgacccctcgcgctcgcctcgtcggcacgccggcgagaggggcgcccatccccgtgcctatataaggacgccggattggaggtgcccgtcccttatccgcgcggccagatctacctctgttccacgcctccgtcaccgccgcgtcggggcgatcccaccgaggccacaggtataagctggtaccatggcatccaacacaggagcatcaggatggctcaggggtaaggtgaaggctgtgacatctggagattgtctactaatcatggggagctcaaaagctgagatcccacctgagaagtccatcaccctgtcctaccttatggccccaaggctggctcgccgtggtggagttgacgagccctttgcatgggaaagcagagagtttctaaggaagctttgtatagggaaggaggtcacattcagagtggattatacggctcctaatattggacgagaattcggaactgtttatctaggtgacaagaatgttgcgtactcagtaatttctgctggatgggcaagggtaaaggagcaaggcccaaaggggggcgaacaaaattcgtaccttgccgagctgttgaggttggaggaagttgccaaacaacagggtgttggtcgttggagcaaggaacctggtgctgctgaagagtcaataagagatcttccaccatctgcattggtgaagcaagtggttttgatgcgaagggttttgcgggtgaaaataaaggcaagagtttggagggcattggttg

SEQ ID NO: 111051 - DNA, 318 bp, Zea mays
  Clone ID: MRT4577_32770C.1
cgccgatctgcccatgctcggcgttgcctccattggtgccgccaagctctgcctcaccgccggaggtcttgccctacccagctactccgactctgccaagatcgcctacgtcctccaaggcaagaattcgtttttttaatcctataaaaaaaagcatctccgtgtcacatgcatgcgtgcgtcttgatgtatgcacaggcaaaggtatcttcggcgtggttctcccggaggcgaccaaggagaaggtcatctccgtcaaagaaggcgacgcgatggcgctccccttcggcgtcgtcacctggtggcacaacaacgccg

SEQ ID NO: 111052 - DNA, 226 bp, Zea mays
  Clone ID: MRT4577_32771C.1
accgacgcgtccgtggacacttgggctgcgcctctacatttctttttttactgctcatccgcctccgcctgatccatgcaaaacagggatcgccatgggggactcggaggagcaccactttgaatcgaaggccgacgctggggcgtccaagacctacccgtagcatgctgtcaccgtccgtaagaacggctttatcggcataaataaccatccctggctggttgtg

SEQ ID NO: 111053 - DNA, 460 bp, Zea mays
  Clone ID: MRT4577_32772C.1
acattaataccccaattatattcgatactgaaaccatattacaaactcattttaataaattgcacacaactgaagatggtaacacactaacacatgcaataaatttattacatagaaattattgtcattagatgaaacgccttttgagagagatctaacataattgtcaaaccctattggcataaagttactgacgtgtcatttcaagataacagcgcttcgaacaaatctttaaacctatctttcatgaagtcggaaattggcgaagcgatgatattgctggcaaccccgaccgctatgtccctctcccaattggggccaccagctctgtcatttctagggggacgctgcacttgaccctgaccttgattcacaactctgtacgtttctttcttagactgagtgtcaatcattttaccagtcattacacacacaaactcagagaaactgatggttccgt

SEQ ID NO: 111054 - DNA, 337 bp, Zea mays
  unsure (1)..(337): unsure at all n locations
  Clone ID: MRT4577_32773C.1
aattcccggttcgacgagctgtcttgtcggcggccgcccttccttccttggtgggcctgtatggaaagnagaaggggatattgctattactcccacatacgctgatacaattgcacccatattaataattcactatctactacatgcacgagatggccaagacacaccgcccagcttagatcggatgcagtataggccaaacagagtgcacgatatgatgaaggaaatgtaagcgcatgtacatgcatacccgagggcgagagcctcatggttgcaccacatcctgattaagacctcgactgcctcgtacgattcgaggaccaatgaagcaattgat

SEQ ID NO: 111055 - DNA, 120 bp, Zea mays
  Clone ID: MRT4577_32774C.1
ccggttgcgccgcggatgcaaagcctccctcaacatttgagtgtgtgtcttgtagttctcaggctaaaactgagccatggcaggtcagtttgccctggacccacgcgagctgctgtggtc

SEQ ID NO: 111056 - DNA, 565 bp, Zea mays
  Clone ID: MRT4577_32775C.1
ctgatgttggtgacatctttgaaccctaaaatggctatgacaatgctgcagctgttgctaagaaagcccacaaagaaggaaccacgttgaagaaagctgcattagaccttggagtattaacggagcaagaattccatgaacttgttgtcccagagaaaatgatcggtccttctgattgataaccccatgttcattatgtttctttaaagcattcaggttgccacatccggagttctggtggtttcctgtgatgccaacttaatgattctagtgcacccgtaaataaaccaaataatttttcatatggtcattaggtcctctccacactggagaaatgatttttgcatggcggatggtacctgagaaaacaattgtacgcttgttccaataggacaatagggcactttgatggatgaggcaccttccattctcctggcatcggtcaagcttttgttgccaggtagctaatgctatgtaataagtgacatggcaaccatgtctagaaactatttgcattggtctttgacaagtggaagtagaaatatacccgagttctagttctttt

SEQ ID NO: 111057 - DNA, 201 bp, Zea mays
  Clone ID: MRT4577_32776C.1
cggcgctctactccactccgcttcacgccagatccaacctcaccagctcgccccatggccgtccactctccttgcgtgccgcgtctctcctctgccgggtggtcggcacgctacgcggtagttgcaaaggatgctcactcagcggagggcttaggctcagcacacacgcgagagaagccgcggtgcggctctcgttaagta

SEQ ID NO: 111058 - DNA, 514 bp, Zea mays
  Clone ID: MRT4577_32777C.1
gtgcgggtaggggtggtgcttggagccgacgaggacggcgcgcggatttttggcgtcggggttgcctgagctctgttgtcaacgtcgtagcggtagacgctgacgcgctactgttacgggccctgctggtcgccccccctcatgatgctgacctcgtcatggcggataatgcttcaaccgccccggcatctggatgctgaggtacctgtcttatggagaagaaaacgcggatgaatctgcacttgtactgaaggtacacccatgagttggcgacaagagaaattgcgccgatatcgaagacctggtcgatggtgatggacttgaataaaaactactatgcttaggagtacttaacgatgatggcacactgaacgccgtgcttgttcacctcctatgcgatagtgacgcggaactggtactattcggccatcatcccctgtgggtgcactatacactgctccaggctcgactcatgacctaccttcaagcagttcttgttacatgacatcaacaa

SEQ ID NO: 111059 - DNA, 555 bp, Zea mays
  Clone ID: MRT4577_32778C.1
aaacaaaaaagcttcacaagcctttcacaacactggaactgaaatctccgacctcaaaggggaaaactgcacatcacacaccctcaaacctcacatcctggaactcacagctttagcagggtatctcaaggatctcttatccacacaaagctcggaaaaaaaaaagggggggaaagtaaggacgaggggaaaggaaaagctttagctttacaagcttccctcaagggggcaaacggggggaaaaaagggggcaaaaagaacgggaaaaactaggtccttaacgccatgaacaaactttgcctttttgagggctttgggacaaggggaacgatgacttttgggggaaccccttttaactcttgaaaaccgaaattgaaaaaaggcggcaaaggcccaccacttgggaaacaagggtttgggtctcctagctcatcgaaaaaagggggcatacaggcctccaaagcagggcaccgtaaatttggggaggatttggaaaaacctgctaaaaggggccactgctttagggggagaccttttttgaaaaaccttgggccc

SEQ ID NO: 111060 - DNA, 349 bp, Zea mays
  Clone ID: MRT4577_32779C.1
aaaaaacagcccccaagaaaaaggggggtaaaaaacaggggggggggggaaaaaaaaagaaaaaggatagcctttttggccaacaaaaaactctaaggggttaaagtctttaaaacagccccacttcggtttggttgacattttgggccaaaaacctaagtccccccccctaaaacttttaaaggaaacggggcatgaccaataaattttggtaatacacccttgaaactggggggccctttgaaagaccgataaaaaaggggtccccccacaatttttttaatttttcaccatggcctttaaggaagggtttttaaccaaacccttggagaacgcgtgggcgaacccc

SEQ ID NO: 111061 - DNA, 1131 bp, Zea mays
  Clone ID: MRT4577_3277C.1
gccggggacacgctggagtaacaggcatgccgaacggtggcggcaagaggtggctgctgctgctgccgctgtcgcggtgggttctcctcctcggcagcctccagctcccggcggccggcggccacgtcgtcacgcgcatgcgcgggttcgacgggccacttccgttctacctcgaaaccgggtagtaaactgcttccgtgcttgactgcaaaccgcccaagttttaattttcttctcaccggcaccgccggtgcggtggcttcgtattgcgatgcaggtacgtggaggtggacgagcagcaaggtgtgcagctcttctactacttcgtgcgctcggagcgcgacccctacgaggacccgctgctgctgtggctgtccggcggcccaggctgctccggcatctccggccttgcctacgagataggacccttaaaatttgatgcccgagggcaaggtgaatttcccactcttctctaccgaccggagacatggaccaaggtgagcaacatcatatttgtggactcgccggtggggactgggttctcgtacgccaagtccgaggaagggctcgagaccggcgacaccaagcaagtgaagcagctagtcatttttctcaggaagtggctccaagaccatccccggttcgtgatgaatcctctttatattgctggagattcatacagtggtctcatcattcctactcttgcattagaaattgacagaagcatagaactcggtgaaaagatattttctggtctcaaggggtacattgctggcaacccgttgactggcggacagtttgatacagacagccaaattccatactttcatgccatgggacttgtatccgatgaactttacaagaatgctagggagaactgtggtggaaagtatagtgctccactgaatgctgtatgtgcagaggctgtccaagctatcaacaatgtaaataatccttagatatctgatacaatgtgtgtaacatagagctcattacatggaaatcatattgatcatgtgtgacatcattggatataactcaaaagcagtcttgttatatacaattttagttatgctttctgcaaacgtagtatttacaaatagttatgttcaaaattacatgttagagagg

SEQ ID NO: 111062 - DNA, 1049 bp, Zea mays
  Clone ID: MRT4577_32780C.1
gcgttcgcggccggccatcttcttcttcttccccgaccttctcccttaaggcctcaaccaagcaaaggtttgattttacataccagagtaacggacccagcgccagctggaacaacgaccagagactccggcatccagtcgaccaacgtacaatgggtttcatccaaggaaggacctccaagcagacgagcagggttaagacccttctatggcttgccttgtcccgccttgccgctgcccgccgtccccgcctcgctcgcaagtcgatttcccgcagcgatgttggacagctactagcactcggacacattgatcgtgctctccaccgtgcagagcagctcatagaggaggacaacatgctggaggcgttcaacataatagagctacactgcaatcgcctcattgagtgcgcaaagcagctagacaagccccatgaatgtggtgatgacattcgggaggcagccgccgggatcatgtttgcagctaggaggtgcggcgacctgccggagctgacgtttgcacgaaccatactgacaaacaagtttggaggcgagttcgcagagatgccattactgagtcctggcgtcgtcgaccccatgttggtatggaagctaactggcaacaaaggagacatggagctcaagaaaaaggtggtgaaagaggttgctgctgagaacaatgtgctagtggacttctttgagctccaagaggttgagcatggcggcagcggcaacgttccgcaccatcacaaggtcagccatgaaggcatataccaaactgacatggatggaagttcagagccatcgcacgacgaggatccatgtgatacttccaactctgatggagcaagcaatgggcatccgaaacaagagaacacgagaacttcggtgcgcacaagaagatgaactttcagagcatcccagctcagatgcaacaatccagaatgaggaagtgctatgtttagcttccaaacttaccaagttatgggtgtgcacatgctaaatctgtaactgtaaagcaactaacaatgtccaattaattgagttagc

SEQ ID NO: 111063 - DNA, 383 bp, Zea mays
  Clone ID: MRT4577_32781C.1
cggatgaccccttgcagttccacttcaccaaggacgactgatggaggagtacagcatcgcacccaggtgtggaagctcagctcctgtgatatgtgtgagctggcccgaaacagtgtgctcatgagcggcttctctcacaaggtgaagagccactggctgggacccaactataccaaggagggccctgagggtaacgacatccgccgcaccaatgtgccggacatccgagtaggctaccgctacgagaccctgtgccaggagctggcgctgatcacacaggccgtccaaagtgagatgctggagaccatcccagaggaagtgggcattgtcatgagccctgggccgtagggaacctggcctgagcagtgcgtgccccatctcag

SEQ ID NO: 111064 - DNA, 289 bp, Zea mays
  Clone ID: MRT4577_32782C.1
caaaaaaaaaaaaaaaaatctaaaaaacaataaacataaacaaaaaatttaaaaaagggaaaggaacaatacctacgcaggcaaaaaattgtccttccctattccggaccccatcttcggatgcctggaactctacaccctaggtcttaacatcagccacctcctctgaatcctgtcgccctccctttacaacctatccacgcttaaaagcttgacctaaccaacatcaacctactgggcatcgttcttcctttcaacgcctccacttttaccttaaacggcaacgact

SEQ ID NO: 111065 - DNA, 360 bp, Zea mays
  Clone ID: MRT4577_32783C.1
gtgttacattctatatttatttttttattattgcttactaattgtttaaaaaaaattattgataatgcttcaaaattatagatcatttcagttgccagcttttttaaaaaaaaaaaaatggaagtcgataaaaaaacaaagttttaaggagaaaataaaaattttaacattaaaaagaatatgtaagcagcataaataatacatagttttacacccaaattggttggcttgataacctaatactggacgcaactttcccgcgttaaaatatgcgcaaaagtattgaaactattacttttaaatgaaaatcctaaaaaaaattactctcggtattaaaaaagaatgttctataaaaatatt

SEQ ID NO: 111066 - DNA, 168 bp, Zea mays
  Clone ID: MRT4577_32784C.1
atgggcgtgcgagttcggttgcctgtggcacagttggccggttctattcaggataatatactggcccagattctagagattgttgtagaaagaacaatcttaacacgaggtccttacaatatgtcgattcttagaggtggtggctatggagatctttgcaagtcatag

SEQ ID NO: 111067 - DNA, 845 bp, Zea mays
  unsure (1)..(845): unsure at all n locations
  Clone ID: MRT4577_32785C.1
accacgcacagactagctaaacatcacagtattacacactgacagatcaacgccaataagctttgtcagcaatggaggtagtctcgtcggagctagcttggttcgcgctcgcgttcaccgtggtggccgccgccgctgccggccgtgtcgtctcggcccagaacacggcgcaggacttcgtgaacctgcacaactccccgcgcgcggacgtgggcgtcgggaacatggcctggaacaccacggtggcggcgtacgcgcagagctacgcgaaccagcgcgcgggcgactgccggctggtgcactccggcgggccctacggggagaacctgttctggggctcggcgggctatgcctggacggcgtcgaacgccgtgggatcctgggcgtcggagaagcagtactacgaccacgccaccaacacctgctccgctccgtccggccagtcgtgcggccactacacgcagctggtgtggcgcgcctccactgccatcggctgcgcccgcgtcgtctgcagcaacaacaccggcgtcttcatcatctgcaactattacccgccgggcaacgtgattggacagagcccttactagcaacctctctctatatatatacgtacttgcaataatccgcgctatatccacaagtgtgtgtaacctactgacctacatacatttgcgagcagcagcatcaatcatacgcgcgtgtgatgccatgcgtgccagcatgagttgttacatatgttcgccccgcatatgcatttcaagatttatttcttcaaaaaaaaaaaaaaaaaaannnnnnnnnnnnnnnnnnnnnnnnnnnnnnnnnnnnnnnnnnnnnnnnaaaaa

SEQ ID NO: 111068 - DNA, 622 bp, Zea mays
  Clone ID: MRT4577_32786C.1
aattcggcacgaggcgacgagctttagcggcaaagaacaaagggcattgggagactgggagtggttagattggctcgtcttggagggatgcgatcgtagccgggcctgcacttttcgtggtaagtggggattgtttccgttggccgtgtcaatgcgcgcgggatcgcggtgatctgcgcatcgcgctcgagctgtgcggagctgtagtctagctcgggagcacgaatgtcgggttatctggattcctcggttttggtgtttctttgagcaagcatccagcgattccctcgaaatcgcctgatattagcccaataacacagatgcatggccgcgtgggctccatgtgaccctagcttagcattaggtgcatcttgttcgctatttcggcgtatctaggtgacgcgctcgatttctcgttaataatgcgggcatcagtgactattcaaacaacaggcgtggtgttacagtcatcactcatcagcagtggcggagcacgacccaaaattaagggcagcaggctttccaagcagccgaatttgaaagcagcaaaagaaaagcaggcggagcagtggagcacgggctgcacatccgaagcaggcggagcaaagcaaagcaggcaagc

SEQ ID NO: 111069 - DNA, 573 bp, Zea mays
  unsure (1)..(573): unsure at all n locations
  Clone ID: MRT4577_32787C.1
ctcgaggccggcccgggaacataatttctggatccgcgacactaccgaccgcattggcaatggctcagtcgtcgttttcattagcttcgcggacaaagctttccaatggattgtccatgcccaccatccaactgggagtgtatttgacgtccggcaaggaaacgtatcaagccgtgcggtgggcgctagaggcgggatatcgaggggtcgactcggcgcagatgtaccacaacgagcgcgagacgggcaaggccattagtgattttcttgagagcgaggcaaatgtgcactcgctcaagcgcgaggatatccacttcacgtccaagctcgcgtccaattctgcgtatgaaacggctcgcaaagccatcaagagatcggtcaaggaagcggggctgggctacattgaccttttcctgctgcactccccgtatggcggcaagcaggcacggctggacagctggcgagccgtcgaggacgcaatcgacgatggcgagngcaggattggaggcgcgtccacctatggcgtatagcatttgccagagctgctcgactctaatccgaggattgctcccc

SEQ ID NO: 111070 - DNA, 293 bp, Zea mays
  Clone ID: MRT4577_32788C.1
cggacgcgtgggaaaaaaaaaaaaaattaaaacattaaaaaaaaaataaaatataaatgaaactagaaaaaaaaaaaaaaccaaattaacaaatacaagcaacacataagcctgcttcctactatttcatcatattttacttctgcctcaaatcctattaattcttcgaactgtataaaccattgatcttcactaatcctctttatataaccatcttaatcccctctatataccccctttactaacttaatatgcctattttcccatcattcccttaactacatctgtttcta

SEQ ID NO: 111071 - DNA, 311 bp, Zea mays
  Clone ID: MRT4577_32789C.1
cggaaatccagccgccggcgtgcgcgcgcgtctgtgccgcgggacagcgaccgagcaactgcctgcccaaccgccccgcccagcggacgccgagcagtgcgccgcgttctacgcccgtccacctgtcaactgcgctgcattccattgcacgccgttagtcccggctatgccgcggcgtccgctattttcactggcccaagtggttgtcgggggtccggttgcccaataaccgcacgcggctgttgctcggctccttcgacaccggcgcggacgcgtttctcgcttacttcttggcggccttgcttctccgc

SEQ ID NO: 111072 - DNA, 556 bp, Zea mays
  Clone ID: MRT4577_3278C.1
cctcctaaaaaggagaaccactttataacagcctgctgaaaaaaagggggtcgtcaccactactgctgattgtggccgacaaacaacaatgactactactactcttctagccgcctacctacttgttgtggggggggggcggccctcctttttttttttttttttttttttttttcaccacagattatctgcagcttcttctcataaacatcatcacaacaataacaacaccacctgttgctgctcaaccagctaacaacaacatgacccccctgcggggtgaaagaatttatcaacaaaaacttttgttggagcaacctgccaaacatccgccgccgccagggagctacttgttgagaagacgacgatgatgactcctgctccccttcttcatcaccataagagtggtcatgatcttcctaccaaggccgcctcgtgggaccccccaataattccccgccgcctcctggaggcccaccatttcctcttatgaggagtcttatagcaggtcggaataatgatgataatagctgcctgctggaaaaaattgtcctcc

SEQ ID NO: 111073 - DNA, 351 bp, Zea mays
  Clone ID: MRT4577_32790C.1
agggaaagcagggacgcctgcagttacctgtcctcctttccagcgtccaccttttcatctttcttcggaccctctaatatatggaaggtttctttcgcatgcatgcgaggtcatatctcttttataatgtcacctaaactcaattcactgtccatcattttacaactttcaaaactaataaaaccctcacttcacccaacttaatcaccttgcatcacattcccctttctccagctatcctaatacttaatattccctcacctatctcccttcccatcattttctcattcttaatatctaatcccacactccctttatcatttcattaagcacgcttttttcttttttatt

SEQ ID NO: 111074 - DNA, 616 bp, Zea mays
  Clone ID: MRT4577_32791C.1
gataatagtgctttatatatttgtcaccattgcttttgttgttctaaagaaacacaaacagaaattacaaaaactacagtttgctgtcatcactcaacgatcgtaataagcgtcaaatataaattaaaaaaaaagaaactacaatttgcagcctttgctcaacgaccgtaataatcgttagaagagatgagacatttcgttgaagaacatctgcatcactttcaccgacgacccgttgcggtcgttctcccctgctgcgcgaatcaacttctccgcctcggccgccgcattccgtctcagcgctgcaagctccaaggtatcgccaagcaccattgccaccacctcggtgatcctctcccttctcacgccgtcgctcccgcgagccacttccacgcacacccccatctcctccaccagcatcttggcattgtagaactgctccgccgagagcggccaccctatcagtggcacgccatgggcgagactctcctgcaccgagttccatccgcagtgcgtcaggaaggctccattagctgcatgcgcaaggatttccacttgcggcgcccagcacggtaccacaaggccctgccctgtgaccactaggctctcactgaac

SEQ ID NO: 111075 - DNA, 250 bp, Zea mays
  unsure (1)..(250): unsure at all n locations
  Clone ID: MRT4577_32792C.1
gggcaaatgcattcagaactttcctattgaagttacttaaccccgaccagccaactgggttgcaacttactgttacaacttaagcaagtttgacatactttgacggatcatcttgtaaattacatattcaccagtaagttttatagaaatggcttacttcactgcatttcttttcttagttttgtaagatctgtttagttcanatttacaagatcacttttccagaaatcatctcactgttancaggana

SEQ ID NO: 111076 - DNA, 281 bp, Zea mays
  Clone ID: MRT4577_32793C.1
cttctctccgtagtagctaacagtatagtgtggtcgtgtgtccccgcatggagacttatcctcctagctggccccgcatctggtctggattaaccgccttcggctcccttcccagattgccccacccaccgtcagcctcgtcaggcccttaacccgaaggtaattgagattgcgaagaagatgaaagaggagagggtcaagttgtttacttcagaatattttgcttacagatgatacgactagatcaaatcagttgcattgtgagatgtgacatgttggca

SEQ ID NO: 111077 - DNA, 183 bp, Zea mays
  Clone ID: MRT4577_32794C.1
ctgcgtgcacaggaagcatgctattgcgtactccccaaagaccccacgtttgcaaaatacatcaccaaccataacaccgcccaaacctttacctcgtacggtatatccatcctcaaatgctaagcaagctctcaacgacatcgcttcgcttgatattgctcttgtgagtaacatattcagctt

SEQ ID NO: 111078 - DNA, 388 bp, Zea mays
  Clone ID: MRT4577_32795C.1
ctcacttcacttcataacctgagttgggaaggcggaccgggaccagatcacatatgggatacgtatcatataagaatagacttgccatgccctgtcaatttaagttcactataagagtacataccttacgcactgcaccatgacttgattagagcatagcatacacctcccctagtagagtcttgtactataccaacatattcttttgatttaaaacacaagcctatacactctactcttttctttactccacgcaccgagctgatctaataaacaagagcagcgctgggttggctatgccttgcctgggcggcgatttgaactgcaagcgcatcgtctcgaatctatagtatgggagggagcttaccttcgagcttggcttggatag

SEQ ID NO: 111079 - DNA, 193 bp, Zea mays
  unsure (1)..(193): unsure at all n locations
  Clone ID: MRT4577_32796C.1
ggagagaagagaatacactacagtactacatggcgnnnggcagcagcagggcatggcggcagtggcgtggtagtgctggtggtgctggcgacggcngcggnnnagacgcnnnncgnnttcgtgcaacgccgggcagctgngcttgcnnnnnatcacgnnnnggccctccncntngtgctgctccaacctcaag

SEQ ID NO: 111080 - DNA, 204 bp, Zea mays
  Clone ID: MRT4577_32797C.1
gctctagccactctccacgctcccttctcccctgcaaacacactcacgcccgccgaggccacgttctatcacgttgtagagtcgtgcaccaccacctcctgactccattcatgagttccagtccattcttggcctggtcgttctgttgttcggttgggttcattattactttttttatactttttatttattcaattttctttt

SEQ ID NO: 111081 - DNA, 530 bp, Zea mays
  Clone ID: MRT4577_32798C.1
tcgtagactgtaataattaaacaaagcttgctcatggttaaactgcgtgttgaaaaaaaaaaaaaaaaaaaaaaaaaaaaaaaaaaaaaaaaaaaaaaaaaaaaaaaaaaaaaaaaaaaaaaaaaaaaaaaaaaaaaaaaaaaaaaaaaaatttttaaaaaaaaaaaaaaaaaaaaaaaaaaaaaaaaaaaaaaaaaaaaagtttgtccctccccgggggggcctttaaaaagggaaaattttgaaaaaaccaaaaaaattgggggcctttaaacatcctattaaaaggccaaaattcccctaaaggggaggggattaaaaataaatgggccgggttttaaaaacggggaaactggaaaaaccttgggttccccaaattaaatcgctttgaaaaaaacccccttttcccaagtgggggaaaaaaaaaaaagcccccaaccaaccccctttccaaaaatttcccaccctaaatggaaaaatgccccccccttaaaacggccaataaaccgcggggggggggggggttaccc

SEQ ID NO: 111082 - DNA, 812 bp, Zea mays
  Clone ID: MRT4577_32799C.1
tgtgagtgaataacaatttgattctatgatcaaatatcgtatagaaactaatatgctaaataacaatcagattgatatttgatgtgaaaactgcagtttatataatcgatgttcatagtaacgtggtgttttggattcttttaccagttttttttctgttctgcaacacttttctgtttatatctcaggtaaatatccttcctttgattacattagtgtaacaccaccatatctggaggtcaactatagcacgctactcggccaacttgcaaggtcaccattggttggaaaagactgcttcatcgtgagtcccccatgctacgtaaaccaaactgctttcccctatgcgcatttctgactccatcatctatcttattagctagtcgagtacccgctgaaaacagacatggctgaatcctgcggaaaccttgtaaaggtagctgacaggaggtttggtaggaccaacttgctgatatatgggccaacttggtcagagaaaaagaagaaaagatgatttctgaagggggggttcaggtgtaatgataatcacggttgggaacggttaaggtttcaagatttgcacaggggatacttggcctagtgtaaggcataagaaggtggttgatcttggttcactgggcctatccctgattaacttgcacagcacagagagctcgcatttcgctttcctttgtggtcagagatccacatccgagaagaggggggaaacaaaaggtcctctaccttccaagaatcaatatcgaatccacagttcatggcttcatgcacaccttgggaaaaaaaagaaaaga

SEQ ID NO: 111083 - DNA, 764 bp, Zea mays
  unsure (1)..(764): unsure at all n locations
  Clone ID: MRT4577_3279C.1
ttttctacttggttccaaatgtgcagaagctttatacattctatcctacgctggggggaatgatgatacagttcaggagagcctcggtatccgcaaggggacaattggagcatggaaacgatgcagccatgcattgccttacaattatgatatccagagtgtagtggattaccattcaaggctagccacaaaaggatacagggcgctgatatacagcggcgaccacgatgctgttgtaccccatgttggcacacaagcatggattagatacctcaacttgacaatcgttgatgattggcgaccatggtacgttggaggccaagttgctggattcacaaggagttatgcgagcggcctaacatttgccactgtgaagggtgctggacatgttgcgccgttgtataagaccttggaatgccaaaaaatgtttataacatggatttcagggaatcctctttgatgcaagtctaatagaatgacccatcggttatctgagtgggcgtcaggaatcctctttgaagggtcagttgcttgggtttctttagtgtcaactggttcaaatccttgatcgatatggttgatcgtaatatttttggaacttatttcaagactatatgagtacccttgcgttgcaacgagaacatataataccatgataatttatatacaaaatgtgtcatatattgttataagaaaatatttcataatccatttgtgatcctagccatacataaattttattattttaatttagttgtttcnna

SEQ ID NO: 111084 - DNA, 254 bp, Zea mays
  Clone ID: MRT4577_327C.1
aaattcttgaaaatgtagtctgtgaaactactcatacctctcttccggcgaattttctcctaagaactaggtttggggtagaaatgaattgacattattttctcatttgctttgtatggtatgaaggatttgtaaagctttgctcaaagttgtgtgcatttgtaaacactatcatgatatgttcaatgttatgtgtaaattttattgtctgtttatggtgactctgacattaatggaagagaatattttccatt

SEQ ID NO: 111085 - DNA, 514 bp, Zea mays
  Clone ID: MRT4577_32800C.1
gaggaaaaaaaaaaaaaaaaaggaaaaaaaaaaaacaacggggcccaaaaaaaataggggtcccggaaacccaatcgggacaaccaaaaagcatggggacccccctccaagagcccaaaaacgggccccaaaaaggcagagggggaaaaagcaaaccgaaaaaccctgtttttttttttttttaaaacaccaaaaaaaacccatgtaggggaaccaccccggccccccttattattggccaaccccccccccaagccaaaaaaaaaaaaaacaaacccaagggcgccaaacgaaggaaacaaaaattgcagggggcccacttgcaactgttacccaaacccaagggggggggggcccccccggacccccccggggcccaaaaaaaaccgggcccggcctttttttccggggccaccccaaaaacaaagggggcccccccgggggggcccgtctcccccagggaaggggactttttgccccacttgcaatttgagccccaaccccaacttgaccc

SEQ ID NO: 111086 - DNA, 1350 bp, Zea mays
  Clone ID: MRT4577_32801C.1
aaagtccgcagaaggaaattactttcacccaaagataggaatgtccgtccatgatggaagttgtccgaggagcagcctttgacattttacagtcagctggtggttctcctgcttcactcagaccgggtcggtggctagacttgtatagtggtactggatccgttggaattgaagctatgagccgaggatgttcagaggcacatttcgttgagatggatccttgggtcatctctgaggtcctcaaaccaaatctggagtgtactggatttattgacgtgtcacagatacatatgctccgcgttgaaaaattcttggccaatgccgaaaaatctcatggtaaatatccttcattcgattatatcagtgtaacaccaccatatctggaggtcaactatagcacactgctcgcccaacttgcaaggtcaccattggttggaaaagactgcctcatcgtgggtttgccttctgccttggtacgatgtaatgctaagcatggatcctgtggtgcttagccctcccctcttgatgattgttgcagtcgtcgctcacttattaccaaatgctgcagatagctgacaggaggttttggtaggaccaacttgctgatatatgggccaacttggtcagagaaaaagaagaaaagatgatttctgaagggggggttcaggcaaggtttgcatgcacagggtgtaatgataacgatgcatcacggtagtgcacggttaagtattcaagatttgcacaggggatacttggcctagtgtaaggcataagaaggtggttgatcttggttcactgggcctatccctgaataacttgcacagacagagagctcgcatttcgctttcctttgtggtcagagatccacatccgagaagaggggggaaacagaggtcctctaccttccaaacatcagtatcgaatccacagctcatgcacaccttgggaaaaaaaagaaaagagatccgtgctctacgttgcaattctaattgatatcctgccaagtattcttcgagaggtccattcaaaaaaaagtattcttctaggcttgtgcacttctgtcactgttttgtaccccgtgtttaatttctgggcggtatgatatcaagagtacccagatgtatccgtcgttgctggtctaaacactaatagggtgtttggtctgaggaatgggctagtccattctcttctcgctcttttttttatttggtttattaaatagaatgagttgatctatcaccaccttattacttatagttagttagtactaatatgaggaataaagtcattctaccaatttaaaaaaaaaaattatgatataccactttattttggatcgagtgattcctt

SEQ ID NO: 111087 - DNA, 2137 bp, Zea mays
  Clone ID: MRT4577_32802C.1
ttttgactagtcttatagctatcagattgatttcaaatgctgacaaatgaaaagtgcataagaccttcatgaagctgctaattctgaaattggattggcgattgatgtgaactagaagtaatgcgatataatcattgatttgtttgtctttttttttccattgctcgagggccgggaaggccctcttatcccttctcgtctcctgtcccggactcccgggaccggggaggccgggatcgagaaggggaacgagcgcgtcccgtgctcgccactcctcgccgatggcgtcctccactctgccagcctcccccttccgtatgtctcttcccggactacgagccccggaccctgctaaggttaagcacgtatccgttcgagcccccgctcgccgtcttcccgttgcagcctccgcggcaccatcaggcgccgcggcggcggcggcggcggcgagggagcgcaggcgtttcctggagcgctacgggctcaacccaaacgacttcgaggaagatgcagaggagaatccgagggaagagagaaaggacaggcggaggcggcggcagtcggggagaggggagcaaactgcggaagcggcagtgactccagcgaaggtggaggagcctcgggagactcacaaaatgctccaggtgctaggtggaaaagtccgcagaaggaaattactgtcacctaaagataggaatgtccgtccaatgatggaagttgtccgaggagcagcctttgacattttacagtcagctggtggttctcctgcttcactcagaccgggtcggtggctagacttgtatagtggtactggatccgttggaattgaagctatgagccgaggatgttcagaggcacatttcgttgagatggatccttgggtcatctctgaggtcctcaaaccaaatttggagtgtactggatttcttgacgtgtcacacatacatatgctccgcgttgaaaatttcttggccaatgccgaaaaatctcaaggtagatatccttcctttgattacattagtgtaacaccaccatatctggaggtcaactatagcacgctactcggccaacttgcaaggtcaccattggttggaaaagactgcttcatcctagtcgagtacccgctgaaaacagacatggctgaatcctgcggaaaccttgtaaaggtagctgacaggaggtttggtaggaccaacttgctgatatatgggccaacttggtcagagaaaaagaagaaaagatgatttctgaagggggggttcaggcaaggtttgcatgcacagggtgtaatgataatcacggttgggaacggttaaggtttcaagatttgcacaggggatacttggcctagtgtaaggcataagaaggtggttgatcttggttcactgggcctatccctgattaacttgcacagcacagagagctcgcatttcgctttcctttgtggtcagagatccacatccgagaagaggggggaaacaaaaggtcctctaccttccaagaatcaatatcgaatccacagttcatggcttcatgcacaccttgggaaaaaaaagaaaagagatccgtgctctacgttgcaattctaattgatatcctgccaagtattcttcgagaggtccattaaaaaaaagtattcttcgaggcttgtgcacttctgtaactcttttgtaccccgtgtttaatttctgggcggcatgatatcaagagtacccagatgtatccgtcgctggtctgaacactaatttaacgcactcattcgcagtatggcaatgatgtggccaactaacggtccctttcagatgtatccgtcgttgctggtctaaacactaatagggtgtttggtctgaggaatgggctagtccattctcttctcgctcttttttttatttggtttattaaatagaatgagttgatctaaaaaaaaaaaaacaaaaaaaaaaaaaaattaagaaacaaccgaaaaaaaatataaaaagaagtgggcaataacatgacaggaagccttcaagcaagataaggggggggctttaaagaggggtccattacttccttccccggtcaagcaatatatttttttttttttggggccccttaaaataattcccgggaacttttacaacgtctggatgggaaa

SEQ ID NO: 111088 - DNA, 248 bp, Zea mays
  Clone ID: MRT4577_32803C.1
ctctagccaaatcgacccgagctaccagagggggataccacaggatcgctggcccttaaactatgagggatatggccgccaggcaagcaatctctaagcaccaccagccattcccccacactctcagcaatatgccgtaggcgctgaagaaggtggtcacgctgaaggcgaatacggccccggccgacaaggagatggcggcactccccaacaacggcaacatggaactgtgaacatgaatgcgcaga

SEQ ID NO: 111089 - DNA, 1730 bp, Zea mays
  Clone ID: MRT4577_32804C.1
aggcgcccagctcccaagcggccgcagtgcccctgcttctgcccttgcacgttcggcccctgtgctgcactgctcgaactaggtgagggcagacggagtttgattctaagtctaggcaggcatcgcagtgcgctccctcctggccgcctctcgagcgagtggcgacgacggcgccttcgctgcgcctcagtcttcttaggcggcgcccctacccctcgaagccttccgccccacctagctcccgtgctcgccagcgtccactgaccagcaggctcccagcccccagctcccaagcagccgcagtgcccctgcaggccgcggcctagcccttgcctgtttgcgtcttgctgctgcacagtgagccagacagcaagctttgtttccttccattcacttcgttgtagtgtggagatcagactaaccaagggcaacccaaatttggggattctttaagtgaagcctctgtatagagatagtttgaagatgatgaaccagcacagggaggaggatgcattgagaggtcaagcagtcaaaaaccagaaggcgatatgggacaagaccctggaaataagattcttgctgcagaaggcattttctacttccaacaagttgccccaggaacccatcagagcaaggttttgcaatcatgataaccagatagaacaagcctatgatgatctgttgaattcatcgaagcagactttgagcagcatgatggagctgcaggaggctatgctcgagagtaatcaggctacaaagggtgccaatgaaattccttctgcctcaaatggagacaacgacgagtggtcagaagtacagagattgcagacaaggataacaacattcagaaatactgagattgataaatggcagaggaaaatacaggtgacaacgggtgctgctgcacttaaaggaaagctacatgcatttaatcagaacattagtgaccaagttgctggttacatgagagatccaagtcggatgattaacaggatgtacttgaccaactctgctgttagtgtatttggaaaggatgttggagaacctggaacagctgaggaggggcacaatatggaaggtgatcctgaacttattgacgattctgagttttatcaacaacttctcaaggagtttcttgagtcatgtgataagggggcctcagagtcggcattttatgctctaaaaaagcagcaggttaaaaagaggaagcttgttgatcgtcgtgcttcaaaaagcagaaagataaggtaccatgtccatgagaaggtcactaatttcatggccccagagcctatggttctttctccaatggctccgaagttgtttgagaatttatttgggaatgccaactagaattcattaaagcttggattcactaaagcttgaattcattaaagcatggattcgttaaagcttgaattcattaaagcttggaatgtcagctagaattcccattacttgatgcaacttttttgtacttttgtagattgcaagtaggtcagtaggtatgatgttttgagtcgaaagttttgatgggctacccagttttgtgcgagacaagcacaaagtgccatggacaggtgggtcctcgctgaatcgatgttacccacaagattctaaaaaatgagagggagcctacgaatttttacaagaggtggaaaaaaaaaaaaaaaaaaaaaaaaaaaaaaaaaaaaaaaaaaaaaaaaataaaaaaaaaaaaaaaagacggc

SEQ ID NO: 111090 - DNA, 279 bp, Zea mays
  Clone ID: MRT4577_32805C.1
attcccgggccgacggctttctgtcggcggccgccctcatttttagggggttttttcagcctgaaggcggttttaactaacaaacaacgcggctcagacaggacctcgttcgatacttaatgctggtcaagatccgggtcacaaggctgcataaggctcggtagagcctaccattgcctctggacctctgtctcacaaagaatgtagctgattcaccgacctgtagcacacaccggcgccaaatgaactacactcacggaccgccggtatcccagccgt

SEQ ID NO: 111091 - DNA, 358 bp, Zea mays
  Clone ID: MRT4577_32806C.1
acgcccgaagacggatcctgaatacgggctccatccacgcgttcgatttgggcagaacggtttatattttgcacaggacacgacatggacacatataggacagtactctcggaccagaacctgcccacggaccaaacaagtggacctgtcgcagacatcaagtctacacagcctctaactagggctgaaaactgcctagctcctacgtacacttactactgggatgtacctcagctctcgcatacaaggcggaggctcctatatagagtcataacactttgggaatatcacacatacttgctaaatgtgctctgacaactacagtgacaaggggaacaagcctccgacctttaatgac

SEQ ID NO: 111092 - DNA, 309 bp, Zea mays
  Clone ID: MRT4577_32807C.1
gtcctttttttttttttttttttttgaatatttttgggttgttttttattttttgtataaaggtattacaattcatggtagtggtaccataaggacgagaggaaaaaggtaaaaaaaacaaatacctggtaagggggatgaccatgctatgcacacaaaaagtaaaatgggggcgggatgaaaaggatacttaaccggtttaatcaaaacgaaggaaggggaagtaaagggaggaaaaaaagctgataagggaaggaacacaaccaacacgggggcaagaatgaagggaaagggggctcgaaaaaccac

SEQ ID NO: 111093 - DNA, 739 bp, Zea mays
  Clone ID: MRT4577_32808C.1
ttttttttttttttttttttcgatactagttcatcgcatacacttaaaatcaatcgtttacatacacatcacaatacacacaaattaaaacaaatagttacataaaacatgattttaaaaaattaaataaaatttgagttgtcttcaacctccggttcttgcgttcgagcagttcattgacgaacgaagggagaggaggaacgacgtcgagcagggagcggccgacggcgaggcacaggcgcgtactgtctggggagcaggggcacgggcatggccgagaggagggcgcgggcgcggccgaactccggcgacggcgtcgggtggctcgatgacgagcgaggagagagagagagagaggaaaagagggagagagcgagcttgggtgagccaggagctccggcacggcagagaccagcttttatagagagaggagagggagagggagggtcggtaaagagagagagagactagctatttacataggaggcctctcagaaaagtggcaaggcaaacaagaatctcaccctcatgatgagttcacaaacatcttcagcaactagaggggccatcatcttagatatcgtaaaagtctcattgaagtacatgtagatttcctttatcttgcgtccataacagtcacacccaactcataacctaatccaacaaatccatgccactatgaatgaatgaaattgaaccaaagccagacgttacttacgtcttcgaagaaagacttctt

SEQ ID NO: 111094 - DNA, 334 bp, Zea mays
  Clone ID: MRT4577_32809C.1
ggactaattggtatataccatgattggtgtgatcatttggcacttatccaagaacatatgaccttttgcatgctgatcatttgttctcacggctcaaaaacaggtgcaagcagcctgtgaccattgttgtcgagatggaccgtatattacggccaggaggttggataattatacgtgacaaagttgaaattctaaatccgttggaggaaatattgaaaagtatgcagtgggagattagaatgacttttgctcaagacaaggagggtatcttgtgtgcacggacaactatgtggaggccttgagtctctattatatgcaattcctcttgtataac

SEQ ID NO: 111095 - DNA, 735 bp, Zea mays
  Clone ID: MRT4577_3280C.1
cggccgggttcattcagctcttcgaacagatggattggtgctcttcttggactaggcaccatgaaccttggattagagcaagacttcttcaagagcttaacactctgatttaactagaacttcaccctttcaaaaggatttaacgaagctgtatacagtttcagtaagagtatctacttcaggaatcaatgggcactgtacatataaggctgcaatgaaatgccatttcagtcgattgagctattgcaaaacagttttggttcagccttctgcggtcaggtggtttccaggagctctgcccttcccatgatgacgtctgttttgaaacctggtggaggaatagtgctgccagggtgggcaagcctttatccaagggattcaattctcttgtcattttaggtgcatggtctttgtggaagcatagaaataggtgtgtttttgataattgtaaccctagcgctgcggtggtgttggcagctgcaagggaggagttgatgggttggcgtatggctggagccaaagcgctgtctttcttccatttagaagaggtgtcttaggtgtcttagctgcttgggggtgtttttttggttttggtttgccaaatgtaacacctttgtactggggttttttctcccctttttattcttcttcttaatacaaaaatatgcagctctcctgcgtattcaagaaaaaaaaagtcgattgaccacgaaaaaaaaaaaaaaaaaagcggcc

SEQ ID NO: 111096 - DNA, 664 bp, Zea mays
  unsure (1)..(664): unsure at all n locations
  Clone ID: MRT4577_32810C.1
ctccgtgcacgagncgaatcgcctagtctccgtccgcgataacacaccacccggccgatatccatctgccccggccgctggcgangcggagcgcgagcacctgacgtggnctgttcccgggctcgccccggcccatcncccgtacctggagctggccggcgcctcacctccgacgacggcgccgacgccgacgcgaccgcgctcctcgtctcgacgcccgncaacctgccggcgaccggccgccnccccacgccacaggatccgcttcctccngctctacctcccggcccccactaacctgccccccaccctgccccccccccncccccccccccccccccccgaccccncaactcaaccacccgccccacccaccccccgccaccnctnccncnaccctacaccccgcccgcccccccccccgcacccccccaccccctctacccccccccccccccgccccccaccgtgagcacgcccgtccgcgntgnccccggcccccacccctactatcccacccttcccccccgccacccgcctcccaccccccccccgcccaccccccaccccccgccacaccccccccnccccccnnccaccccccccccccccccacccctcgccctccctccccacacctaccatacccccccacccccccccc

SEQ ID NO: 111097 - DNA, 366 bp, Zea mays
  unsure (1)..(366): unsure at all n locations
  Clone ID: MRT4577_32811C.1
acaacaaccggagcatcatgggatatccaaggggttcgcgggattcggagggggatacgtaaacattagggggacatacacttgagggggttaaaaaaaactgggggcttcctaaaaaagggggccggtattgcccattactgggggggtccgcttaaatttcggggggctcgctgatgctggtggggggctaaaaatttgggccctggaggtggctttttaccaaggccgggtatatgccggcgggggccaggagttcgttgggggtgccgttttccacaaataggccgtcggaaaagacgggaaaggggttggngcttttgacgggggaaagccgggggggtattacaaggacaggccttcctt

SEQ ID NO: 111098 - DNA, 480 bp, Zea mays
  unsure (1)..(480): unsure at all n locations
  Clone ID: MRT4577_32812C.1
atcnggttgtcggcactcagcaccacttaacttattttgatgaagagcagaccagaaaacaggagagaaaagagggaaacttggggcgggggaccttctcttgaggagctcatgttgtggttgccttgccggagaacaggagccatcatcggtcaacaggaataggatcagctgtcgactctggagcaggagaggagatcaagagccgcagtcactggtcttggaacaggggcaccggtttgtatccagggtaacaggggcgtcggcatagtgtgccttttcggctactgtagctgggccaaaaatagaggcccataaaaaaaaactggctggttgaattgctccttaattggacaatttaattgatcaagtcgacgactagtcagacgacaaaggatctgatcaagcgtcttctagtcgaggactgctggcgaccggccgactaatcgcgattaccagacgatttgaaaccatgaccac

SEQ ID NO: 111099 - DNA, 302 bp, Zea mays
  Clone ID: MRT4577_32813C.1
ctcgtcttggttttctcgtcttcttggtggactcagtgctccactaattttacacacatactgttgttggtacatgccgggaaactggacagccatattggacctgtccccccttttcttacaggagatgatgccacgtgcctaatattatgtaactagtgcgatgtctgatctgcggcctgatgctcagcgatgacactaacatacatgtatgacactggacgctagccgagtcaactcttcactgacgtgtgtcaagacccctatcacaatacactactgtgtacactatgcagacaaac

SEQ ID NO: 111100 - DNA, 348 bp, Zea mays
  Clone ID: MRT4577_32814C.1
ttctgtctccctcgggacgcgccttctccttgactcctattatccatactcaatctctctagcatttttacgaaagcacatttctcttgcgcagacagcggcttattcgccggtcacgaagaatgccagtgcgtggcgtgagtctgggactaaccaattgtcacaggcttgcttgtgcgccagtatttgtctgtctgcttgtgtagcgtagacctatagtaccatgcttaccactagcttgcagctcattgaggcccagctctttgatggacacgctacttgctgcatctatgatagacaaacgagtgactgcaggaccaagctgagtgtgtctggtgcactacgacc

SEQ ID NO: 111101 - DNA, 380 bp, Zea mays
  Clone ID: MRT4577_32815C.1
ccggccgggacttacctggacgggtctacgagcgatcagcaaggctcgtgtcctaggccagtggcctacattgcacatggtggatgcgctggcttaccatctccccaagtgggagagtggacgtcataatgctggcttaccatctccccaagtgggagagtggacgtcataatttatagtagagggggtacgcgttcacgcggctcctgccaattctgaaaatccttctgtacttgttgccatgtgctggtttttcgtcggctgtttttgtttcttattgtctgctcatcactgaaggtttgcatagcttgtttccttgaaaaaagttggccaatttcagtcaatactaacaaaagaaaaaaaaaaaaaaaaaagcggcc

SEQ ID NO: 111102 - DNA, 341 bp, Zea mays
  Clone ID: MRT4577_32816C.1
ctcgggatttgctaggcgttttctccttaccaaagtcgcagtcacagccgcatatctgtcggcaatatctggccgcggaaagaggcctaaggggaagcccaagggcagggcaccgcgctacctcaaggaactgcgagacaacattcacgggatcaccagacccgcgatacgcacattgtcgaagaggaagcatgtgaagcgcatctacgggctcatctaccacgagacccacgacatcctcaagatcttcctaaagaacgttatacattacgccgacacctacacccagcacgcgcgacatatgacatgtgaacgacatggacgttgactacgctcttaag

SEQ ID NO: 111103 - DNA, 254 bp, Zea mays
  Clone ID: MRT4577_32817C.1
aaaaaaaaaaaaaaaaaaaaacacagaaaaaaaaaaatttggccctcctgctcctgctgcttgttcctttttttaaggggggttagggcgctgcgtcgtactcatggtcataatggttgcctgtgggaaatggttgtacgttgataacagttcacaacatcacacaccgtaggaatcataagcaatgcactctgtgcctaatgatggatctaattaatattaattgctttgagctgattgccctcttttcacca

SEQ ID NO: 111104 - DNA, 1030 bp, Zea mays
  Clone ID: MRT4577_32818C.1
ggcacggcacggcacggcacgaccgagctccagtctgcccccgcccccatccgcacgtccgccttgatccggcaaatggcgtcgccggcgcggcggctcctgcagaccaactccgtgcagtacccgacgctccccgcggccgacccgccgagcccgctggccgtcgactccgacgtggtggtcatcctcgccgcgctcctatgcgcgctcatctgcgtcgtggggctggcctccgtggcccggtgcgcgcgctcccgcgccgcgcccgccgccgccaggagggggctcaggaagaaggcgctcagggcgctgccgagcctcgcgtacgaggacgccgtggcggcccgggccgcggacggggcggcggaggtcctggcggagtgcgccatctgcctctcggagttcgcgccacgggaggaggtccgcgtgctgccgcagtgcggccacgccttccacgtcgcctgcatcgacacctggctcgccgcccactcctcctgtccctcgtgccgccgcgtcctcgtcgtcggcgacgcctccagtaagcgcccgccccagcctaagcgctgccgcaagtgcgaggcggccatggacgagccctcctcgtcgtccggttccgccggcgacacgcctgccggttcctgacccttctcacgagtgccacagccacgccgccgccgccgccagtttctagcaactgggctggcgatcttagctccactggaattccctcatcatcaggcgccgccggtttctagcaactgggttggcaatctttagctccactccacttcattccaaggattcgaacgttgatgctgtaaattgcaggttggtcgattatgtacatatttattttcagattagaaacatgctaaagtatcgtgtgaatgtgaatctcagaaacagaatctttcttcgcaactcagtttctcataatcttgccggcagcatgtttgacttctttttttctgtattagtgaactcatataatacagttcatattggaaatcacagggccttcttggctggc

SEQ ID NO: 111105 - DNA, 353 bp, Zea mays
  unsure (1)..(353): unsure at all n locations
  Clone ID: MRT4577_32819C.1
acccacgcnggacggaacgcgacgggagagccaagggccgccgcccgagcagattttttttattagggtttatcagcaagcacagtgccgtctgataaacaaaatgcttacggcgatcaaggcgcgcaagatgcgtacagctattatggatctcaagcagcctctgcccttcctgttgtaccaggacacggccatgacagaaatggatacagccggcctgccctcggcggagtacccatggcaacgggcaccaccagcggcactcgaagtaacccacaacctggcgaggtccgggactaccacaccgactatggcagggcgcatggctacagtaagcaccaccttacacactg

SEQ ID NO: 111106 - DNA, 283 bp, Zea mays
  Clone ID: MRT4577_3281C.1
aaaagccaaggggttccttaaatggcaaacaccttacataaaaaatttggttcgcaatcacgtcccacaagccgatgaccggggcaattcagtcacttttcctcccggttaaggacacaacgggccccatagctactgtggggtttcgccaagtaaacccccaaaccacttttcatcacttacgtctgaagcaggccactggaaagagcatggctccaccaagagcagttgacctgacccagggttagcgccagactttggtctttggcctttcatgcccgcg

SEQ ID NO: 111107 - DNA, 2550 bp, Zea mays
  Clone ID: MRT4577_32820C.1
atggccgaccgggtaactatcattccgtcgcacgacccgtggcctttctccaccgtcacggtggacgatctggaggcccttgtcaccgatggcttgctccgtcccctctctagtgacccgcagccggagtggatggtccctccgagcggggcggcctcgaccccgccgccggggtatgtgctgagtttcgtctccttccatgagcgggggttcgaagtgccagcaagccgtttcatgcgagcgctcctgcattattacggggtggagctgcacaatcccaaccccaactccatcgcgcaagtggccatcttcgcggcggtttgcgaaggatttttggggattgacccgcactgggatctatggacccatctcttctccgtggagccttttgacttgacgacgggggaaaagagggtccgcatggcggtgcgggccggtggttgcatcctccagttgaggcaggcgcgcgcgcaacagtacatccccgccatccttgtgtcttcgaacaaggggtggcagcaccggtggttttacctccagaatgacgatgggaggctcccgtcgtttactcaacgagtggtgactgccgccggcagcaactggcgctatggggtcgcacgcgagaaacaggagaatctccagccccttctggaggccttgcaggagctgcgagacggagggcttaccaccgcgggggtggtcgccgccatccatcgccgaagggagttggggtgtcacaagccttccctgccaccggtcccggaggacgcggtggaccgagccgcgcggagggtcgctgtggagaagaagaaggagaagaaggatgcgaaaaaggctcaggctcgcgagcggatgcgggctcgggacgccttggagaggcgccgtcggaggcaggagagggacaggctcccgagggagccatcgccggagatgcctgacaacgacgatgacgatgatgatgacgaagacgacgacatggcggaggttgatcctcaggtcgtcgtgactgcgcctgggcggaccgtcccttcggcgccccgggcgcctgtggcggggatggtgccgaagccggcagcggggcaaacctcggcagcgcctgcggggaccgaggcccgaggggcctccccgcaggcacgattggccttggtccggagtggcaaacggaggcacggttcggccggtctggctccccggaaagcccttaagacggtgccggcttctgcagccagtgccgcaccgggccacgccggtcagctggccttcacacaagatgcccccaagcggggggctcaggcggcacgagttgccatggggcgagctccccagactgacccctccgtcgaggcggtcatcgtgccgggggagactgctggcgcggccgcggccttgagcccacctgacgggttgccagcgccggcaccagcttctgccgaggctgttgccgttctgcccgtggagccacccttcgccgccgatgctgagatggttgaggcgccgctactcgaggtcggtgatcggaagcctacctccttagccgaggaggtacccgatgcgtcgactgcagggggtcccgacgccttggaggatgggggcgcagaaccgcagcccgtcctagggagcggcgacctcatccccgcgcggcgcgatcccaatgagcggcgtggacaggcgctccggttctggacccgtggcgcctcaaaacccctcttcgtccttgatgatgagcgggaggagcagtctcgggatgagcttcgtgagtgtgccgaggcagcgatggggtcgcttcggtcgaccatggaggtcctttccaggaacgttcccaggatcctccaggatctgagcaccgccaagtcgtcgttcatccaccgcgaggccgacgtctggggttcgctacggttcctgaggaccgcgcttgccgaggctaccgatcgcctctcccaacagagcgccgaggcggcagaccttcgattgctctgtgacgagctgggggcggaggcagcggcggcatgcgcagaggcgcaacgacggcagttggagcttggccaggtcatcgagttcgagtcagccctcaacgagtccgccaaggcacttgcccaggcggctgagcagaaggaggccgaccgcgtggccatgtccgaagctatctcggccttctgccaggtctttggtcttgatgacgtcccctcgggaagctccccccagagtcgcctgcaggccttgggcggccatgtgcgcggcagactccgtgaggcgctgcatcacggcgttaggcgggccttcgctgttctcgcttcccactacgatgtggatctggagcgggtcagcgaggggtactgtcttcccgatgaagatgaagctgccctggccgaagtacagaggcttgaggcggccgtcgcgggcccaagcgcggtgctggcgtcctccttcgaggtggagatccttccgcttgcgtcaccgtccgaggccggggcggatctcgccgagggtggagacggcgctgagggtagagacgaagccgagggtgctgctcgtcccccgggcgatgcctga

SEQ ID NO: 111108 - DNA, 180 bp, Zea mays
  Clone ID: MRT4577_32821C.1
ggccgacgaccgctgttgctgatggaggaggaaggggggcggcgctttcagaggcctcctgatccaggactggcaggattgatccacctccaagtctccgggccaccttctcctgggaggacgaccatctctacccctagaggactgtcactctagcatctttgaggactgcgacaggac

SEQ ID NO: 111109 - DNA, 1398 bp, Zea mays
  Clone ID: MRT4577_32822C.1
tcaggcatcgcccgggggaggagcagcaccctcggcttcgtctccaccctcagcgccgtttccaccctcggcgagatccgccccggccttggacggcgacgcaagcggaaggatttccacctcgaaggaggacgccagcaccgcgcttgggcccgcgacggccgcgtcaagcctctgaactacggccagggcagcttcatctttgtcgggaagacagtacccctcgctgacccactccagatccacatcgtagtgggaagcgagcatagcgaaggcccgcctaacgccgtgatgcagcgcctcgcggagtctgccgcgcacatggccgcccaaggcctgcaggcgactctggggggagcttcccgaggggacgttgtcaagaccaaagacctggcagaaggccgagatagcttcgaacatggccacgtggtcggcctccttctgctcagccgcctgggcaagtgccttggcggactcgttgagggctaactcgaactcggctgcagaagccggcaccgtcttaagggccttccggggagccagaccggccgaaccgtgcctccatttgccactccggaccaaggccaatcgtgcctgtggggaggcccctcgggcctcggtccccgcgggcactgctgaggtttgccccgctgccggcttcggcaccatccccgcctcgggcgcccggggcgctgaagggacggtccgcccaggcgcagtcacgacgacctgaggatcaacctcctttgcggccgacacgggcgatgactcttgggggacaggcgggtcggtctgactccccggagtcacctcaactacctcggccaaggggtcaagtaccccctcagcctgcccctgttcttcggaccgggaccctaatgtcccggccccagataccgacggtgccagcccactcgggggctggctcgacgacccctggcccagcctcagatccgggctgagaccaaggcggaccgccatgtcgtcgtcttcgtcatcatcatcatcatcgtcgttgtcgtcgtcgtcaggcgtcttcggcgacggctccctcgggagcccgtccctcgcctgcctccgacgaagcttctccaaggcgtcctgggctcgcatccgctcgcgagcccgagcctttttcgcgtccttcttctcctttttcttctccacggtgatcctctgcgcggctcggcccaccgcgtcctccaggaccggtggccggacgggtttataaatcctcaaccccagggacacatacccatggtcggggcgcatcgcgggttgggtaagggcgccaacgtcctgcttccctaccgtacctgctacccgcttgaggaggtcgtcggcggagagggaggtcgaggacatctccgagccctccaaatcgacccccggcttcat

SEQ ID NO: 111110 - DNA, 2823 bp, Zea mays
  Clone ID: MRT4577_32823C.1
atggccgaccaggtaaccgtcgttccgccgcgcgacccgtggcctttctccaccatcacagtggacgatctggaggcccttgtcgccgatggcttgctctgtcccctctctggtgacccgcagccggagtggatggtccctccgagcggggccgccccgaccccgccgtcgaggtatgtgctgagttttgtctccttccatgagcgggggttcggagtgccagcaagtcgtttcatgcgggcgctcctgcattactacggggtgaagctgcacaatctcaaccccaactccatcgcgcaagcggccatcttcgcggcggggtggcagcgccggtggttttacctccggaatgacgatgggaggctcccgtcgttttctcaacgagtggtgactgccgccggcagcaactggcgctatggggccgcgcacgagaaacagaagaatctccagccccttctggaggccttgcaggagctgcgagacggagggcataccgccacaggggtggtcgccgccatccatcgccggagggtgcttcccttaacagagcagcggttgctgctttcggagatgatgccgggggtagacttggagggttcgcagatgtcctcgatccccctctccgccgatgacctccataggcgggtagctggcacggtagggaggctggacgccggcgcccttacccagcccttgatgcgtcccgagtgcgggtgcatgtccctggagttgtggtgtcacaagccttccctgccatcggtcccggaggacgcggtggaccgagccacacagagggtcactacggagaagaagaaggagaagaaggacgcgaaaaaggctcgggctcgcgagaggatgtgggctcgggacaccttggagaggcaccgtcggaggcaggaaagggacgggctcccgagggagccgtcgccggagacgcctgacgacgacgacgacgatgatgatgacgaagacgacgacatggcggcccgccttggcctcagcccggatctgaggctgggccaggggtcgtcgagccagcccccgagtgggctggcgctgtcggtatttggggccgggacatcagggtcccagtccgaagaacaggggcaggctgagggggtacttgaccccttggccgaggaggttgatcctcaggccgtcgtgactgcgcctggacgaaccgtcccttcggcgctccgggcgcctgaggcgaggatggtgccgaagccggcagcggggcaaacctcggcagtgcccgcggggaccgaggcccgaggggcctccccgcaggcacgattggccttggtccggagtggcaaatggaggcatggttcggccggtctggctccccggaaggcccttaagacggtgctggcttctgcagccggtgccgcactgggccacgccggtcggctggcctccacacaagatgcccccaagcggggggctcaggcggcacgagttgtcgtggggcgagctccccaggctgacccctctgtcgaggcggccgtcgtgccgggggagactgttggcgcggccgcggccttgagcccacctgacgtgttgccagcgtcggcaccagcttctgccgaggctgttaccgttctgcccgtggagccacccatcgccgccgatgctgagatggttgaggcgccactacccgaggtcggtgatcggaagcctacctccttagccgaggaggtacccgatgcgccgaccgcagggggtcccgatgccttggaggaggggggcgcagaaccgcggcccgtcctggggagcggcgacctcatcctcgcgcggtgcgatcccaatgagcggcgtgggcaggcgctccgattctggacccgtggtgcctcgaaacccctcttcgttcttgaagatgagcgggaggagcagtctcaggacgagctatgtgagtgtgccgaggcagcgatggggtcgcttcggtcgaccatggaggtcctttccaggaacgttcctaggatcctccaggatctgacggatctaagcaccgccaagtcatcgttcatccaccgcgaggccgacgtctggggttcgctgcagttcctgagggccgcgcttactgaggctaccgagcacctctcccaacggagcgccgaggcggtggaccttcggttgctctgtgatgagctgggggtggaggaagcggcggcacgtgcaaaggcgcgacagcagcagttggagcttggccagctagctgaggtgtctgctcgggccggagcccttgcggaggacctggtcgtggccgtcgggtctgcccagtccgcccaagccacagcctcggagcagcgtgcccaggctgaagagttcgagtcagccctcaacgagtccgccaaggcacttgcccaggcggctgagcagaaggaggccgaccgcgtggccatgtccgaagctatctcggccttctgccaggtttttggtcttgacgacgtcccctcgggaagctccccccagagtcgcctgcaggccttgggcggccatgtgcgcagcagactccgcgaggcgttgcatcacggcgttaggcgggccttcgccatgctcgcttcccactacgatgtggatctggagcgggtcagcgaggggtactgtcttctcgatgaagatgaagctgccctgaccgaagttcagaggcttgacgcggccgtcacgggcccaatcgcggtgctagcgtcctccttcgaggtggaaatccttccacttgcgtcgccgtccaaggccggggcagatctcgccgagggtggaaacaacgctgagggtggagacgaagccgagggtgctgctcctcccccgggcgatgcctga

SEQ ID NO: 111111 - DNA, 379 bp, Zea mays
  Clone ID: MRT4577_32824C.1
cagaatttgttaagctttccatttttggtacagttttcgaagtgacaacaagatatgttgatctacaacctgttggaatgggtgctttcggcttagtatgttcggctaaagatcaattgacggggatgaatgtcgcaataaaaaagattatgaaacctttctctgctcctgtattagccaaaagaacatatcgtgaactcaaattattaaaagccctgatgcatgaaaatatcatttgcctgagtgacatatttatttcccctttagaagacatatactttgttacggagttgcttggaacagatttacatagactacttcaatcccgaccattagagaagcaatttattcaatattttttatatcaaatactgagagg

SEQ ID NO: 111112 - DNA, 1419 bp, Zea mays
  Clone ID: MRT4577_32825C.1
atggctgaccgggtaaccgtcgttccgtcgcgcgacccgtggcctttctccaccgtcatggtggacgatctgaaggcccttgtcgccgatggcttgctccgtcccctctctggtgacccgcagccggagtggatggtccctccgagcggggccgccccgaccccgccgccggggtatgtgctgagtttcgtctccttccatgagcgggggttcggagtgccagcaagccgtttcatgcgggcgctcctgcattactatggggtggagctgcacaatctcaaccccaactccatcgcgcaagcggccatcttcgcgacagtttgcgaagcctttttggggattgacccccattgggatctgtggacccatctcttctccacggagccttttgccttgacgacgggggaaaagaaggtctgcatggcagtgcgggccggtggctgcatcctccagttgaagcaggcgcacgcgcaacagtacatccccgccatccttgtgtcttcgaacaaggggtggcagcgccgattgcccttggttctcacagtcgggatttccgtccgtctccaggagttggggtgtcacaagccttccctgccaccggtcctggaggatgcggtggaccgagccgcgcggagggtcgctgcggagaagaagaaggagaagaaggacacgaaaaaggctcaggctcgcgagcggatgcgggctcgggacgccatggagaggtgccgtcggaggcaggacagggacaggctcccgagggagccgtcgtcggagacgcccgacgacgacaatgacgacgatgacgacgaagacgacgacatggcggcccgcctcggcctcagcccggatctgaggctgggccaagggtcgtcgagccagcccccgagtgggctggcgccgtcggtgtctggggctgaccccttcgccggggcggccatcgtgccgggggagactgctggcgcggccgcggccttgagcccacctgacgtgttgccggcgccggcaccagcttctgctgaggctgttgccgttctgcccgtggagccacccgtcgccgccgatgctgagatggctgaggcaccgctactcgaggttggtgatcggaagcctgcctccttagccgaggaggtacccgatgcgtcgactgcagggggtcccgacaccttggaggaggggggcgcagaaccgcggcccgtgctggggagcggcgacctcatacccgcgcggcacgatcccaatgagcggcgtggacaggcgctccggttctggacccacggcgcctcgaagcccctcttcgtccttgatgacgagcgggaggagcagtctcgggatgagctccgcgagtgtgccgaggcagcgatggggtcacttcgatcgaccatggaggtcctttccaggaacgttcctaggatcttctag

SEQ ID NO: 111113 - DNA, 296 bp, Zea mays
  Clone ID: MRT4577_32826C.1
atcggaacccggaaaaaaactgagcacttaaacagggtgaagatcagacacaagatactaaagaaaactctgtatgtgcgccgccggtaccttacgagtactagctgggtctgattgcaccgtcacggacgggctgagcccactgggccttcaaggggaggacgaagcgccggcaagaagagcccatccgactacggggcctgggttcatacatgacacgatgcagtagagggggggcgacaacgcatgtgcgcggtggatctgggcccgacacggagatccccaggatgatgttg

SEQ ID NO: 111114 - DNA, 212 bp, Zea mays
  Clone ID: MRT4577_32827C.1
cgggaactcgagaagcccaaccttttggcggataaaacatttcactggaatcaagggatgtttttttttacatccactggggtttgtaaaaaattttgtctttaaagagatattggaaaacagcgacatttttgcaaaactccccttcccttaggtttacatttcacaatggcaggggttctcccgcataggggaaaaagcattatttttgg

SEQ ID NO: 111115 - DNA, 906 bp, Zea mays
  Clone ID: MRT4577_32828C.1
gatctgacggatctgagcaccgccaagtcatcgttcatccgccgcgaggccgatgtctggggttcgctacggttcctgagggccgcgcttaccgaggctaccgagcgcctctcccaacagagcgccgaggtggcggaccttcggatgctccatgatgagctgggggtggaggcagcggcggcacgcgcagaggcgcaacggcggcagttggagcttggtcaggtcatcggcgagcgggaccaatctcggaaccaggctgccgaggttgaaagccgggctgaggcccttgggggccagctagccgaggtgtctgctcgggccagagcccttgcggaggacctggccgtggccgtcaggtctgcacagtccgcccaagccgcagcctcggagcagcgtgcccgggctgaagagttcgagtcagccctcaacgagtccgccaaggcacttgcccaggcggctgagcagaaggaggccgacagcgtggccatgtccgaagctatctcgtccttctgccaggtcttcggtcttgacgatgtcccctcgggaagctccccccagagttgcctgcaggccttgggcagccatgtgcgcggtagactccgcgaggcgctgcatcacggcgttaggcgggccttcgtcgtgctcgcttcccactacgatgtggatctggagcgggtcagcgaggggtactgtcttcccgacgaagatgaagctgccctggccgaagttcagaggcttgacgcggccgtcgtgggaccaagcgcggtgctggcgtcctccttcgaggtggagatccttcctcttgcgtcgtcgtccaaggccggggtggatctcgccgagggtggaaacgacgctgagggtggagacgaagccgagggtgctgctcctcccctgggcgatgcctga

SEQ ID NO: 111116 - DNA, 1188 bp, Zea mays
  Clone ID: MRT4577_32829C.1
atggcagaccaggtaatcgtcgttccgccgcgcgacccgtggcctttctccaccgtcatggtggatgatctggaggcccttgtcgccgatggcttgctccgtcccctctgtggtgacccgcagccggagtggatggtccctccgagcggggtcgccccgaccccgccagcggggtatgtgctgagtttcgtctccttccacgagcgggggttcggagtgccagcaagtcgtttcatgcgggcgatcctacattactatggggtggagctgcacaatctcaaccctaactccatcgcgcaagcggccatctttgcggcggtttgcgaaggatttttggggattggcccccactgggatctgtggacccatctcttctccgcggagccttttgcctcgacgacgggggaaaagagagtcagcatggcaatgcgggccggtggctgcatcctccagttgaggcaggcgcgcgcgcaacagtacatccccgctatccttctgtcttcgaacaatgggtggcagcgccggtggttttacctccggaatgacgatgggaggctcccgtcgttttctcaacgagtggtgactgccaccggcagcaactggcgctatggggtcgcgtgcaagaaacagaagaatctccagccccttctggaggccttgcaggagctgcgagacggagggcttaccgccgcgggggtggtcgccgccatccatcgccggagggtgcttcccctgacagagcggtggttgctgctttcggagatgatgccgggggttgacttggaggttgagattttcgttcgtctccaggagttggggtttcacaagccttccctgccaccggtcccagaggatgcggtggaccgagccacgcggagggtcgctgcggagaagaagaaggagaagaaggacgcgaaaaaggctcaggctcgcgagcggatgcgggctcgggacgccttggagaggcgtcgtcggaagcaggagagggacgggcttctgagggagccgtcgccggagacgcttgatgatgatgacgatgatgatgatgacgaagatgacgacatggcggcccgccttggcctcagcccggatctgaggctgggccaggggtcgtcgagccagccctcgagtgggctggcgccgtcggtatacagggccgggacatcagggtcccggtccgaagaatag

SEQ ID NO: 111117 - DNA, 2673 bp, Zea mays
  Clone ID: MRT4577_32830C.1
atggcggtgcgggccggtggctgcatcctccagttaaagcaggcgcgcgcgcaacagtacatccccgccatccttgtgtcttcaaacaaggggtggcagcgcaggtggttttacctccggaacgacgatgggaggctcccgtcgttttctcaacgagtggtgactgccgccggcagcaactggcgctatggggccccgcgcgagagacaaaagaatctccagccccttctggaggccttgcaggagctgcgagacggagggcttaccgccgcgggggtggttgccgccatccatcgctggagggtgcttcctttgacggagcggcggttgctgctttcggagatgacaccgagggtcgacttggagggctcgcaaatgtcctctgtccccctctccgccgatgacctccacaagcgggtagctggcacggtagggaggctagacgtcggcgccctcacccagcccccaatgcgtcccgagcgcgggtgcatgtccctggagttggggtttcacaagccttccctgccactggtcccggaggacgcggtggaccgagtcgcgcgaagggtcgctgcggagaagaagaaggagaagaaggacgcgaaaaaggctcggtcccgcgagcggatgcgggctcgggacgccttggagaggcgtcgtcggaagcaggagagggacgggctcccgagggagccatcgccggagacgcctgacgacgacgacgacgatgatgacgaagacaacgacatggtggcccgccttgccctcagcccagatctgcggctgggccaggggtcgtcgagccagcccccgagtgggctggcgccgtcggtatctagggccaggacatcagggtcccggtccgaagaacaggggcaggccgatggggtacttgaccccttggccgaggtagttgaggtgaccccggggagttgggccgacccgcctgtcccccaagagtcgtcgctcgtgccggccgcacaggaggttgatcctcaggtcgtcgtgactgcgcctgggcggaccgtcccttcggcgccccgggtgcccgaggcggggatggtgctgaagccggcagcggggcaaaccttggtagtgcccgcagggaccgcggctcgaggggcctccccgcaggcacgattggtcgtggtccggagtggcaaacggaggcacgattcgaccggtctggctccccggaaggtccttaagacgacgccggcttctgcagttggtgccgccccgggccacgccggccggctggcctccacacaagatgcccccaagcagggggctcgggcagcacgagttgccgtggggcgagctcccgaggctgacccctccgtcgaggcggtcgtcgtgccgagggagactgctggcgcaggcgcggccttgagctcacctgatgtgttgccgacgccggcaccgacttctgccgaggctattgttgttctggccgtggagccacccgtcgtcgccaatgctgagatggtcgaggcaccgctactcgaggccggcgatcgaaaacctacccccttagccgaggaggtacccgatgcgccgactgcagggggtgccgacgccttggaggaggggggcgcagaaccgcggcctgttctggggagcggcgaccttgtcctcgcgcggcgcgatcccaatgagcggtgtgggcaggcgttccagttctggacccgtggtgcttcgaaacccctcttcgttcttgacgatgagcgggaggagcagtctcgggacgagcttcgtgagtgtgccgaggcaacgatgtggttgcttcggtcgaccatggaggatctgacggatctgagcaccgccaagtcgtcgttcatccgccgcgaggccaacgtctggggttcgctgtggtttctgagggttgcgcttgccgaggctaccgagcgcctctcccaacggagcgtcgaggcggcggaccttcggatgctttgtgacgagctgggggcggaggcagcggtggcatgcgtagaggcgcaacggcggcagtcagagcttggccaggtcatcggtgagcgggaccgatctcggaaccaggctgccgaggctgaaagccgggccgaggcccttgggggccagctagccgaggtgtctgctcgggccggagcccttgcagaggacctggtcgtggtcgtcagatctgcccagtccgcccacgccgcagcctcggagcagcgtgcccgggctgaagagttcgagtctgtccttaacgagtccgccaaggcacttgcccaggtggctaagcagaaggaagccgaccgcgtggccatgtccgaagctatctcggccttctgccagatctttggtcttgacgacgccttgggcggtcatgtgcgcggcagactccgtgaggcgctgcatcacggcgttaggcgggccttcgccgtgctcgcttcccactatgatgtggatctggagcgggtcagcgaggggtattgtcttcccgacgaagatgaagctgccctagccgaagttcagaggcttgatgtggccaccgcgggcccaagcgcggtgctggcgtcctccttcgaggtggaaatccttccgcttgcgtcgtcgtccgaggccgaggcggacctcgccgagggtggaaacgacgctgagggtggagatgaagccgagggtgctgctcctcccccgggcgatgcctga

SEQ ID NO: 111118 - DNA, 343 bp, Zea mays
  Clone ID: MRT4577_32831C.1
aaaaattacagcatatttcattggtaatggccaaaagggaccaaagcatgcctgcaaaaacctcccctacggggacaaactttgggcccatgccccctggttaaaaaaaacggggacatctcccgggggacatataccaaaacctttggttacgggccccccctaccaggttggttttgcccccgctcacttgccgggggccaaattgggagcgtaggcccccgccttttttttgacaggggcacccaggggggcggcgagggttttaaagggaccccttccggggaaaaagggccgccccaaaaaacccaacatggggaaaatggggaggggggccgttttg

SEQ ID NO: 111119 - DNA, 690 bp, Zea mays
  Clone ID: MRT4577_32832C.1
atggggtcgcttcggtcgaccatggaggtcatttccaaggacgttcccaggatcctccaggctaccgagcgcctctcccaacggagcgccgaggcggtggacctttggttgctttgtgacgagctgggggcggaggcagtgacggcacacacagaggtgcagcgacggcagctggagcttggccaggtcatcgagttcgagtctgcccttaacgagttcgccaaggcacttgcccaggcggctgagcagaaggaggccgaccgcgtggccatgtccgaagctatctcggccttctgccaggtcttcggtcttgacaatgtcccctcgggaagctccccccaaagtcgcctgcaggccttgagcggccatgtgcgcggcagactccgcgaggcactacatcacggcgttaggcgggacttcgccgtgctcgcttcccactacaatgtggatctggagcgggtcagcgaggggtactgtcttcccgacaaagatgaagctgccctgaccgaagttcagaggcttgacgcggccgctgtgggcccaagcgcgatgttggcgtcctccttcgaggtggagatccttccgcttgcgtcgccgtccgaggccggggcggacctcgccgagggtggaaatggcgctgagggtggagacgaagccgagggtgctgctcctcctccgggcgatgcctga

SEQ ID NO: 111120 - DNA, 1050 bp, Zea mays
  Clone ID: MRT4577_32833C.1
ttagaggaggggggcgcagaaccgcgacccgtcttggggagcggcgacctcatccccgcgcggcgcgatcccaatgagtggcgtgggcaggcgctccggttctggacccgcggcgcctcgaaacccctcttcgtccttgacgatgagtgggaggagcagtctcgggatgagctccgttagtatgccgaggcagcgatggggtcgcttcggtcgaccatggagatcctttccagggatgttcccagggtccgaggataccgaagtaccgaacgccttgcccaatggagcgccgaggcggcggaccttcggttgctctgtgatgagctggaggtggaggcagcggcggctcgggcagaggtggcgtcggcacggacggaggcgcagcggcgacagctggagcttggccaggtcgttggcgagcgggaccaatctcggaaccaggctgccgaggctgtaggccgggctgaggcccttgggggccagcttgccgaggtgtctgcttgggccggagcccttgcggaggacctggccgtggccgtcgggtctgcccagtccgcccaagccgcaacctcggagcagcgtgcccgggctgaagagttcgagtcagccctcaacgagtccgccaaggcacttgcccaggtgtctgagcagaaggaggtcgaccgcgtggccatgtctgaagccatctcggccttctgccagagtcgcctgcaggccttgggcggccatgtgcgcagcagactccgcgaggcgctgcatcatggcgttaggcgggccttcgtcgtgctcgcttcccactacgacgtggacctggagcgggtcagcgaggggtactgtctacccgacgaagatgaagctgccttagccgagcttcagaggctcgacgcggtcgtcgcgggcccaagtgcggtgctggcgtcctccttcgaggtggagatccttccgcttgtgtcgccgtccagggccggggcggatctcgccaagggtggagacgacgccgagggtggagacgaagccgagggtgccgctcctcccccgagcgatgcctga

SEQ ID NO: 111121 - DNA, 1880 bp, Zea mays
  Clone ID: MRT4577_32834C.1
ctctggtaaatgtgatcggatcaaaagcattaccacaactcccattaatcatgaaaaacataatgctaatgtcacatcaaatttcatgttgccctagcggaaattatgctcatggttccactagaactgccgctgaactttctaaccaagacataactgtgttgctatctgcactgacaacaattgaggtgattgtggaaaagctgggtgaatttgttaatccatatttgaaagaaatacttgatctggtagtactgcatcctgaatgcagcactcaaatgcatgccaaattagatgcaaaagcagcacgtgttcgagagctattgactgtaaaagttccagtccggcttatcctctcacctttactgaatctgtactctcttactgcaaattgtggagatgcaagtcttacgttggcattcagcatgcttgctagtctagttggtacaatggaccggctggctgtaggaacttaccattcaaaaatatatgaacattgtttagcagctcttgatctccgtcgtcaacaccctgactctttgaagaatataaatatggtggaacaaagtattattcatgccataatctctcttaccatgaaacttacggagggcacttttaggccactttttcttcgtactttggaatgggctgaggctgaagttgatgaatcctcatcaaagaaaagtttggaccgtgcaattgttttctacaaattggttaacaaacttgctgaaaaacacaggtccttgttcacaccttacttcaaatatctactcgagggatctatacaatatctctctgaagacgatgctttgggtggttcgaagcataagaagaagaagaccaaacttgtagatgttcaagttgaacagaaggataaattattggggttaaaattgtggaatttaagagctctagttttgaaatccttacaccaatgtttcctctatgataatgaccagaagatccttgattcctctaatttccaggttcttttgaaacctattgtctcccagttcgttgtggaatcaccaaaatctgttgaatcagttcttgacgctccatcaattgaagaagtagatgaaactataattctgtgcttgggccaaatggcagtaactgcacggacagatgttctttggaagcctcttaaccatgaggtgctgatgcagactaggagtgatgaagttcgccccaaaatgctgggcctgaaggttatcaggtacatggtccaacatctgaaggaggagtatgtcgttctcgtaccagagaccataccgttcctaggcgaattgctcgaggatgtggagcttcctgtcaagaccctgtcgcaggagatcttgaaagagatggaaaccctcagtggcgaaagcctccagcagtacctatgaggcatcatctcctcgcggtagtaccgtttggctgatgaactgtagaacatctactcatttcctgtggattaccagttcaacagatcggcatacttgtcggatgtctggaaactgaaattacatgctgtccaattcatggaaggcaagtgcaattaacttaaccttcaaggaggcaaatgcagtttaaggaaaacttacacgttgaaagcacccatattatgttttcggatgagttcctatgtagctacgttgaaagagtacttttctacacaattgattgaggtgttctcgatttgatctctttttgagcttttggtgtcgttgggattttgcgctaaatattggaaattagaccaaggggctgtttgttcgttgtgaaggaattataatttacttaatatagtaggttatttggtttggaatttaatattccatcacatgttaaagtttagatataatcctatcctaaatttatagggtgagaat

SEQ ID NO: 111122 - DNA, 245 bp, Zea mays
  unsure (1)..(245): unsure at all n locations
  Clone ID: MRT4577_32835C.1
gccggagagcgtccganagattggagacccctgctgctgtcgcgcgccctctccccgccccgaccctcacctgtctcggtctctctgccatttctcctttcgctttcacggctcgccagccatcgccctacccctccagcgggcacaggccgcagctagctaccgtctttttttcacctccgcccgtctcttcacgtttcagtctacttccctttttttgattttgctgaatgaaaggcaccagg

SEQ ID NO: 111123 - DNA, 306 bp, Zea mays
  Clone ID: MRT4577_32836C.1
cagtcttcccgcgtccgccgattcctcctccttggtcgccgcgtccttggctgccgtctgaaaaatggctacaaacttcctagcacatgagaagatctggttcgacaagttcaaatatgacgacgcagaaaggagattctacgagcagatgaacgggcctgtggcaggtgcctcccgccaggagaacggcgccacgtgatcctccgtgacattgcgagagccagagagagcatccagaaatccctggctggaagtcaggccccggggcctccagcggcaccagcgagaccacggtgactcgtcgtc

SEQ ID NO: 111124 - DNA, 171 bp, Zea mays
  Clone ID: MRT4577_32837C.1
ctatccatgtttcaggcggaaagtggaaagcgaaccgaaggattaagtccaggttgtggctcaacccattactcacacaacttgacccatcaacttgttactcgcacgtgcaattaaaatggatgggcccattcaaattaccggaataagttttaaaggggggcccaaaat

SEQ ID NO: 111125 - DNA, 414 bp, Zea mays
  Clone ID: MRT4577_32838C.1
ccggccggatcttcattctataggatgtatgtacatatgtctgtgataattcctttcatgatgccttctgtggtcaaccgcacataatagcaggatatttgctttggggcagtctagagcagcatactcatccgatcttccatatcatcttctattttaaaccttactctatgaacaggacaaaacaggtttacacaaccatatatacgatctattggagatagcacgggggggggggggggggtgcgttgattatgctattatgctactatagctcccaatctagccaatttgtttgctttgatatcactaaactctcgtaggaatatgtgtttggtgttctcacaaataacaagttagtggatatctgccacacctgattttgaggacaaaaaaaaaaaaaaaaaagcggcc

SEQ ID NO: 111126 - DNA, 200 bp, Zea mays
  Clone ID: MRT4577_32839C.1
agtgagtcgtattaaacagtgcacagactgcttgaccgcgcgataacggccacgcgggacgcgagagtggagtcaatggatggattgcacggtccattaggggagtgcagcaaggtcgtgctcgggatcgactaagggggacgtctccatgaagctcggaatggtcaccgtccagaagcaggtgccagtcgcctgtggac

SEQ ID NO: 111127 - DNA, 637 bp, Zea mays
  Clone ID: MRT4577_3283C.1
gcttgggggaatgatgatacagttcaggagagcctcggtatccgcaaggggacaattggagcatggaaacgatacagccatgcattgccttacaattatgatatccagagtgtagtggattaccattcaaggctagccacaaaaggatacagggcgctgatatacagcggcgaccacgatgctgttgtaccccatgttggcacacaagcatggattagatacctcaacttgacaatcgttgatgattggcgaccatgattcacaaggagttatgcgagcggcctaacatttgccaccgtgaagggtgctggacatgttgcgccgttgtataagaccttggaatgccaaaaaatgtttataacatggatttcagggaatcctctttgatgcaagtctgatagaatgacccatcggttatctgagtgggcgtcagccgcggaatcctctttgaagggtcagttgcttgggtttctttggtgtcaactggttcaaatccttgatcgatatggttgatcgtaatatttttggaacttatttcaagactatatgacggcctttttctcgcaacgagaacatataataccatgataatttatatacaaaatgtgtcatatattgttataagaaaatatttcat

SEQ ID NO: 111128 - DNA, 1050 bp, Zea mays
  Clone ID: MRT4577_32840C.1
tttttttttttttttttttgggaacagaaacatgtcagactagtttgctgactgatgcttataacaatcaataacaagtgttgtacaccttaactaagaggtcttattctataaactatcagtgttcatatatacaactgtcatgactcaatagtacttagtaacatgtgtgctgtcatactgaaaatacaaaatttggaggtatcactaaacccaggctatccttctcccagatttgcgagcgaaagcatgcggcacaatgagatgtagcatcttatccaagctaatctcaaataagatggcccagcgcacagatattgtgatgaagcttcaaaataagttggttttgcagtagaggggcaaccaagtgatctgattagctcatggactggtaggaccttgaacttcgttggtggattcatagcaacattgtggaccttatgctcgtagatcttaccatccttgtcgagtttatacacagaagcaccatcgaagcggccatgcccatcccaaggtactcgaggaatgccgtgggcgatccagcgaatcatgataatgttctcagcaggctgccatatactaactatatcaacccacaatgccttgaagaagatccggccagtaaaacgaagcgcccagaatatcgtcttgtaattttccaggcccttgaatgtattcaaagggtctgtgaagacaatgtcatctctgtagatgtcaaagctgggctccttgtagagcacatcggggagctcctccctgagcgtccggatcgcgtaccccatgttgaggtagtacctctgcctcacctcgtcgtcctcgtccccgcgcctccccgcgaccggcggagactccgacggcgtggccggcgcggcaagaagaggaggcggcatccggccctcccgcacggggtcggcgaccctgatcacccgccccgcctccccctgcttgacgcgcccccccgccaccgccaccgccacacccctcctcctccgcgccggcggccgcgccgccgcgaggtccaacaggtgcagcagctgacccatttttgga

SEQ ID NO: 111129 - DNA, 104 bp, Zea mays
  unsure (1)..(104): unsure at all n locations
  Clone ID: MRT4577_32841C.1
actcggttacctttaaatncaaacatgcaaatcaggcatgatctgccttagcgctgggtagtcttcatactcaagacagggcggtccatatgttaaaccaacac

SEQ ID NO: 111130 - DNA, 192 bp, Zea mays
  Clone ID: MRT4577_32842C.1
cagtcgcgaaagcgattatgccagaccgaccggcggaaggggcgcatggcagcgcggtcctgcgcgacgaccgacaactaccgatccgagatgggacgccacctgctcgacataggtagctgtaccgcacaccggtcctaagacgggtccacaccgactcaccagaacccgacccccacaggcgcaacggct

SEQ ID NO: 111131 - DNA, 730 bp, Zea mays
  Clone ID: MRT4577_32843C.1
cgggtggtgctttactggcttaaggagggtagtcctagggtttgaggggatttaggtgacgttgaccggggtggccgccggacacgcgactacaatgagctgaagagaccaccaatgtcaaggtcctattcgcataacgatcgccgggctttggctgatggcacagttgatcggaggaggagaagtagaagcaggagcaggacgaggggctactacactggcagcaggagagatccagatctgcgagcaggcactcgagatttggatcgcaccaaggtgacagactctggcgctgttcctgctgctggtggtgatggaggcatgcacaatgtggatgccaacgaaataccaaggcagccgaaggtgcctggttcagtggtggtttcggagacggatgacagcgctgttgaagctgtggctatcgaagataagcaaatggagtcagataccgctggactggaccatgctcaagacatgtctgaaggcgaggacagtgagtttgccgaagacatttctgaagacgaggatggtgagtttgcaggctctgacttgaatgatgaagatggtgatgaaatggataacacccagagccaactgtccgatgtgcatgttcatacatctgaatctgttgaggaacttgatcttagacagtctcagctcagcaatgctgaggagggaatgggaacatgcattgcacacgtctatgcatgcatggtagagccattggcag

SEQ ID NO: 111132 - DNA, 472 bp, Zea mays
  Clone ID: MRT4577_32844C.1
aatactcgactggaccctccccggccgcgaagggagatggcactcatgtctgccaggcacgagccgaacgactggatttcgatcgcacggcattgctccggcgcatgaagtgcccatccgagacctaccatccccgtcctcgccatcgcaccacctgaattctggaaaaggaagtctatgtcctattatcatgaacgaatattgcgttgtgccatgctacctcacggtgatatgctgatgactgccgggacggtcaaaacgcctctagggatctgagctttgcaaacaaagaatatggaacacattgtatcacatgaaataggagagaggaatagttgatgagaccactgaaaaaccctcctgcctgaaacgcactcctgtcctgatgaattacctagaattgccagtccatgacagcagcctgatattatgttccagaggctggagtgctcatgcatgcaaaacccagaac

SEQ ID NO: 111133 - DNA, 339 bp, Zea mays
  unsure (1)..(339): unsure at all n locations
  Clone ID: MRT4577_32845C.1
aagcacaanagngcaccaacaaaggcagccaaagaagnnggccnccgaaagcacacaggncgnacagcaagggcngccacggcgaccagaagcccacaaggcgcacaagcaccganagacgccccacggcccccgcaccncncaccagcgggggccncggaangcgaaaacccaannccncaacccnacagganccaacaggcaancgcagcnggcancnaaccggaancacccggggnccnccaacaancaacagcccgannacagcagnnaccncnggngcaggaaggggcacaaaacancagggcacaacacccacaacaacnngngccagcaaac

SEQ ID NO: 111134 - DNA, 1509 bp, Zea mays
  Clone ID: MRT4577_32846C.1
atggaggcgctcccggctgatgaccaaagaccctttgaggacctcataatgcgcgatgagaaggagccgctgccattaggcacgcggcaagtactgaacgcggccggaccgtctgagcatcatctcaaacagtccggttataccgtggatcgtccgacatatttcgccggaccgtccgatccgacgcaggcccgcacacaaaacgctcaggtcgcaccgtgcatggctggaccatctgggtacaacctcgaacaattcggccccatcatggactgtccggtacattacgccggaccgtctggatatgtcgcggaccgtctgataccttatgtcggaccatccgaatatgttgcagatcgtccgctatcttacgccgaaccgtccggatatggcatgaatcgaccggcgtattacgccggaccatccgactctacacgagtccacgcgcagaccgcccaagtcgcgccatatatgaccgaatcatccgggtacagccctagaccattcgacccgatcgcaaaccgtctagccctttacgacggatggtccgggtactacccaggcagcaccatatacatctggacagtccggacacaccttcggaccgtttggcccggttgcggaccatccggccccttacgccggaccgtccggcaacaatatggtgccccaccagcaacacattataaccatgccatgccacttcatggacacagggctgaatactgttcggccactagagagcccgagagatatccctgggaaagccgacagagtgatgtcaggcaacttgagatttccacccacaaacttaatgggtggtcgccagacatggcggagaggattagagatgaagtagccggaatgttcagggacaaactcggtgttagtatgtcaagtacaggtcaatcgtatcggaagccttataaccaccgattcgacactgtgccgtatccacaagggactaggataccagacttctctaaattttttggtgaaggtgggaaaagcacgcacgaacatataagccaattcatagcacacttgggagaattggctaatggggaagcttaccacgttcgtttattctcgttgtcccttactgataccgcattcgcatggtacgcagccttgccaccgaattctattaactcttgggaagaattagagcggaaatttcatgaacacttcttcttaggagaacatgagttagaattggctgacttagcttttgtccaacaggggcctgaagaatcgatacaattggccataaatgagggccagttggcttttcaagagatgcaagtagacacacaaccatttcctgttaatacaatagaactcacatgcaaaaaagttttggttcgacccgaaatgaccgataaaggcaaaggcaaggacatcgtcattggcgatcctcacatgtcaaatatatcacaaaaggagattgctcgaaaggctccggacgagaaggctaaaaagtccgaaggcaccggggggcaggcataa

SEQ ID NO: 111135 - DNA, 2397 bp, Zea mays
  Clone ID: MRT4577_32847C.1
ctatttttgtgatatatctgacatgcgaggattgttgatgacgatgcccttgcctttgcctttatcggccatttcgggccgaaccaagacctttttgcatgtgagttctattgtattaacaggaaagagttgtgtgtctacttgcatctcctgaaaagccaatcgaccctcatttatggctgattgtatctgtcgacgaaaaacattacaatcattggtggcatgagaaaaggaattatgccacttacaataagcacgcctctttaattcatcaggaggaggaatagtatgagttaatttaatgttgccgtttttcagtaactcgtcaaatattttatcgcatttggcaacattaaaagtaaacttaacttcctcttgtcgattctttcgaatcgactgtaaagcagaacacgctgaaggtttagcctgtcctggccaaaccagttcggcggtgtatacatccgtggattcatcgtccgaattatcgtatcccactagatgcatcttatggctagccgattttgatgtttccttatttcggctttcacaggtcatagcccgctggtgtaagtgcactagtgaaaagaattgggtgccatctaatttttcttttaagtagcgtcgcaacccattgaaagctagccctgtcagttgtttttctgcgacatgaatctgaaagcatcggtttctagtgtcccggaatctccggatatagtcattaaccgattcttcaggcccctgtcggactgaagctaagtcagccaattctaactcatgttttcctgagaagaagtgttcatgaaatttctgctctaattcttcccaagagttaatagaatttggtggcaaagatgcgtaccatgcaaatgcagtatcagtaagggacaacgagaataaacgaacgcggtaggcttccccatcagccaattctcccaagtgtgctatgaattgtcttatatgttcgtgtgtgcttttcccactttcaccagaaaacttagagaagtctggtattctagttccccgtgggtatggcacggtgtcgaatcggtggctataaggcttccgatacgattgccatgtacctgacacactaacaccaagtttgtccctgaacatcccggctacctcgtctctgaccctctctgccatgtctggcgaccatccattaagtttgtgggtggagatttcaggttgcctgacattactctgtcggctttcctcccaggtatgtttaaggtgtgtgttaggtgtcctattaatgtcaccagctcctgccctatacccctcaggctctcttgtggccgaatagtattcagccctatgtccatgaggtggtatggcatgattataatgtgttgctggtggggcaccataatgttgctgcgatgaatgtgggaactgtgcgtattgcgcagctctcagctctgcgtatgcatatccggacggtccggcgtaagaggccaaatggtccgcgacctggccaaatggtctgaaggtatatccggattgtccagccgtatatggtgctacgtgggtagtctcgtacccagaccgtctgtcgtaaagaatcggacggtccgcgatcgggccgaatggtccaggggtcggccggttcatgccatatccggacggtccggcgtaagatggcggacggtccgcaacatatccggacggtctggcgtgatgcaccggacggtccgtgatggggccgaagtgttcagggttgtatcctgatggtccggccatgtacggtgcgacctgagtgctttgtgtgcgggcctgcatctggtcggacggtccggcgaaatacgccggacggtccgcggtataaccggactgtctgagatgatgctcggatggtccggtcgcgtccagtacctgccgcgtgcctagtggttgcggctgtgatggtgacacgaaagcgtgcatcggcataccatatgatggctgggtcaaaggtgacccgtttacagccgatgtgtttgacgtgggtggcactgtattagactctcgcgatggaaaattaggagcagctgatttctcgtatgcacgtaaatgcattttaatagattcatctacatattgctttaactgatctcctcgttgatccatgaaagtcgtaagagatagatctggagtacttacagcgggaccctgcattggaggtaggagagattccatatcgatctccccttgacggacgatcttctggtggcgatccaccgtgaagtgtgacaagtacttgtccgccgcctccttgcgccgttcggagagtttatgcagtagttccgcctcttccttgtcgcgttgttcgttccattgccgcatcacctccttctcatcgcgcattacgaggtcttcaaagggcctttggtcatcagccgggagcgcctccat

SEQ ID NO: 111136 - DNA, 173 bp, Zea mays
  Clone ID: MRT4577_32848C.1
ctccctggtatccaggtttcccgacccaaccgttttacggcaagaaggagcctccattatgtttcacgggaataacacttagcacacggcttttgcgcttggaaagctgactttcaacaaaagacccccgatacctttaccatgacatcgctaccaaacggtttaggccaata

SEQ ID NO: 111137 - DNA, 304 bp, Zea mays
  Clone ID: MRT4577_32849C.1
gggcccaaacacaagcaggggggcttttattttattcatataaattaacttacaaagatcaatagacaagttcctgggggaaatcttattaccggcggggggagtaaacacggggcatgccatccggggggcagctaataaggtgggggaaatgttgcccccaattttgaaccacttgggggggaaagggccaggcatgtccaccctcttgtgggggggggccccgaaggagtcccttggggcctgccccaggttggcaggcagcctgtccctggggtaggggtcaaacggacccggggggccc

SEQ ID NO: 111138 - DNA, 2763 bp, Zea mays
  Clone ID: MRT4577_3284C.1
aggggcctcacctcgcgcgcctcaggcgctgtgtgctcgaacctcagtgtgcatcagtgggcttcggggcactgtcaggctgctcgagacataggcggctgggttgcggctcctgctaggcccagccggcaagccgccgcggtctgccctggcgcctggccttgccgctctaccggccccagatgcccgcatcccgtttgggatccgagtcccagtcgctgtcgcttgttctcatccggccaaatgacgatgtgttgtgggggcccacctgtgccctgcgttttccgccatggctaattctacatcaagcagatctcactgtttgattcgtatttcattgacctcatttgacgcaccagagaggaaaagagcaagaaacaaattatggatgattgatctaggtggaagtgaaaggcttgtaaagacaaaggcaactgggaaaaggctcaaggaaggcaaagccataaatctgtcgctgtcagccctagcggatgtcatagatgcactacagaccaaaaaatcccacatcccttataggaatagcaagctcacacaagttcttaaagattctataggatgtgagtccaaaactctgatgcttgttcatatccgtccaaatgaggatgatttgtgtgagagcatctgtaccttgggttttgcgacaagagtcagaagtattcgcctggaaaatgaagaaccacaagaagtaaaagcaagaaaggaacatttattaatggaattagaaaaggagatcagtgatctagaacaagaatgtgaaggtattgttagaaagattaagaagctcaaggagacaatggagcattttaaagggcatcagccatctgctgaagcaaattttgacatttcacatccatccagtgaagagctgaaaactgtcatgccaaagaatacaaaggattcgaagaatcggagagatgtttcttccaggttacccaggtttatgaagccaacagcgtctagccagcacaggatagacttaaataaacacatacctgttagtaacaagacaaaaccaccagtgccaccaaagagaaggccttcctcagtttatgctgagtctgtaaggctgccagtaaatgctgcaacttggcagtcagaatgtagttctgaatgcagtatctccatgacaagtgacatgaactggataccaagtatacaagatgggacagaatgcagccaggatacatcagaatatgagaccaaacaagtgattttctcagaacatgagaaaccacctcagagtcaagtgatttcatttgaagaatcaggggagatgcaggataaaaccaaggaaatgggcatcatagacattgacagctggattcatcaacagatcattgaaaacactggcatatgtcagtgtcacactgaaaggacgctagatgttattgaagtaaatgaatatgaaacttacaattctaatactgcttcaccagttcagaaggaatttactaatggttccaaaccctcactggatgaagatagcaacctgaacctttgtccccccacgcaaaacacagaagatagcaaggaaaccagggctgttaatcaattcacaaaaacagaattatacactcctccattaaaagaactttgcggcagtgccaaaattaaggaacataagaatgaaaagcttgggcgtcatggaagttgcagaagatcactgcaggaagagctcggcaattgcaagccagagcagccagacaaggaaccaaaagctgatccaaacatgcaacctgaaattgaattccatgacaacaaacaccatataggtaagttgacaaaattcattcaagctcttcgaacagcatggattggtgctcttcttggactaggcaccatgaaccttggattagagcaagacttcttcaagagcttaacactctgatttaactagaacttcaccctttcaaaaggatttaacgaagctgtatacagtttcagtaagagtatctacttcaggaatcaatgggcactgtacatataaggctgcaatgaaatgtaagctgccaatatgccagtggcagatgaattgctagtctgaaatagtttctttggttataaatggataatttcaagacaagtgggaaaatgggaagaaatgtgatatatgacaaattttgaattaacattctcaatttatcataaatgataaatgattgttacagtatgcagagaagctattgcaatatctgaactgagggagagttatttacatctccaggccatttcagtcgattgagctattgcaaaacagttttagttcagccttctgcggtcaggtggtttccaggagctctgcccttcccatgatgacgtctgttttgaaacctggtggaggaatagtgctgccagggtgggcatgcctttatccaagggattcaattctcttgtcattttgggtgcatggactttgtggaagcatagaaataggtgtgtttttgataactgtaaccctagcgctgcggtggtgttggcagctgcaagggaggagttgatgggttggcgtatggctggagccaaagcgctctctttctttcatttagaagaggtgtcttaggtgtcttagttgtctggggagtgttttttggttttggtttgccaaatgtaacacctttgtactggggttttttctccccattttattcttcttcttaatacaaaaatacgcagctctcctgcgtattcaaaaaaaaaaaaaaaaaaaaaaaaaaaaaagtactctgcgtctttaccactgct

SEQ ID NO: 111139 - DNA, 2469 bp, Zea mays
  Clone ID: MRT4577_32850C.1
atggctggttctaaggatcacaccaagatctccaccaccaacatcatcaagccggccatggaggcgctcccggctgatgaccaaaggccctttgaagacctcgtaatgcgcgatgagaaggaggtgatgcggcaatggaacgaacaacgcgacaaggaagaggcggaactgctgcataaactctccgaacggcgcaaggaggcggcggacaagtacttgtcacacttcacggtggatcgccaccagaagatcgtccgtcaaggggagatcgatatggaatctctcctacctccacttcagggtcccgctgtaagtactccagatctatctcttacgactttcatggatcaacgaggagatcagttaaagcaatatgtagatgaatctattaaaatgcatttacgtgcacacgagaaatcagctgctcctagctttccatcgcgagagtctaatacagaaccacccgcgtcaaacacatcggctataaatgggtcacccttgacccagccatcatatggtatgtcgatgcacgctttcgtgtcaccatcacagtcacaaccactaggcacgcggcaggtactggacgcgaccggaccgtccgagcatcatcttagacagtccggttataccgcggaccgtccggcgtgtttcgccggaccgtccgacccgatgcagacccgcacacaaaacactcaggtcgcaccgtacatggccggaccatcagggtacaaccccgaacaattcggccccatcacggaccgtccgacgcatcacgccggaccgtccggatatgttgcggaccgtccgccatcttacgtcggaccgtctggatatggcatgaaccggccgacgtattacgccggaccatccgactctacacgagtccacgtgcagactgcccaagtcgcgccatatatgaccgatccgtccgggtacaaccctggaccattcggactgatcgcggaccgtccagttctttacgacagacggtctgggtacgagactacccacgtaacaccttatacggctgggcattccggatataccttcggaccgtttgaccaggtcgcggaccatccggcctcttacgccggaccatccggatatgcgtacgcagagccgagaactgcgcaatatgcacagtttccacattcatcgcagcaacattatggtgccccaccagcaacacattataatcataccatacacctcatggacatagggctgaatattgttcgactacaagagagcctgagaggtacagggcaatcgtatcggaagccttatagccaccgattcgacaccgtgccatatccacagggaactagaataccagacttctctaagttttctggtgaaggtgggaaaagcacacacgaacatataagccaattcatagcacacttgggagaattggctgatggggaagcctaccgcgttcgtttattctcgttgtcccttactgatactgcatttgcatggtacgcagctttgccaccaaactctattaactcttgggaagaattagagcagaaatttcatgaacacttcttctcaggagaacatgagttagaattggctgacttagcttcagtccgacaggggcctgaagaatcggttaatgactatatccggagattccgggacactagaaaccgatgctttcagattcatgtcgcagaaaaacaactgacagggctagctttcaatgggttgcgaccctacttaaaagaaaaattagatggcacccaattcttttcgctagtgcacttacaccagcgggctatgacatgtgaaagccgaaaactcacatgcaaaaaggtcttggttcggcccgaaatggccgataaaggcaaaggcaagggcatcgtcatcagcaatcctcgcatgtcagatatatcacaaaaggagattgctcgaaaggcttcgtacgagaaggctaaaaggttcgaagacgccggggggcaggcacagttaatgaaccaaacacatcagcctagccccaacatcgtagatggtccggcacctatgtgcggacaatccggtgctcagacaaacggtccggctaactcagccggacagtccacctatgaccaaaggcgtcaacctctacacaaagcaaggaaaaagacgcaaggtcaaagcacatataatcggctgatcaaagtcgatcctacttttgatcagttgctctccaaaaatactagcaaaaagactgttccacatgatcggtcaacaaagaaaccccggtcacctgctaaaacaaaacggtcaaacaaaacgacccgaaaggcgacacaacaagcatcgcctattcattctatgagaccagggtactttccacctatttactcatcgtcggtatattatcctgttcaaacatggaatggcacgatgatgaatccatggtacatgtatagtcccttcgtctatccagactggggggcacctccattctattccttttga

SEQ ID NO: 111140 - DNA, 2329 bp, Zea mays
  Clone ID: MRT4577_32851C.1
cccgcacgcgccgcccgaagccaaccgtcccagtctgggccccaccggcgagagcccgtcggcgtcaatccaggacccgataaatagccgcgccgggcggggagaggtggtgctcctcaccggcctcggcgtcgtcgcctcgcaccgcacccaccggtccaccacccacctattcttcttgtccctctcccccctcgcaaatcggaggccaagtacactgcccacccaaccaagtcaggagcagaacaagtagtacgggctgtgttttctgcgacggcgagccaagagcagaacaagtagtacggggcgtgttctctgcgacagcgagcggaccggatcggcggcgccatgtcgcacgacgagctcgccgacaaggagccgtcgtcctccgaggaatttcagctcgcgccgacggattccaagttccggagcctcagccctgcaccgattccgatcccagcttctccgggcatcagatcattggtcgactcggtctctgatgagacagtaaatgtagatctcatggcctcacatcaaagtgaaaatggatcaatctctacagctagttctaccgttagtttactggaatcagagaaggcagcatatgaatttcttgctcaaactcctgtcagatcaaccgatgcacatcttattgagttttcagaggccttgagaactgtcgcaaaagccttacgacaagtggctgaagggaaggctgctgctcaagcagaggcagcagagtggaaacgtaagtatgaattagagacagcgcagaagcagcaaagtaaaatcagaggctacagcagttgtatcagtaataacttggacaaactggccagccaactaaccctggagacacctgcacctgatcaattaggctgttgtggtaagcatggtatatgtgcacaccaggttctccaggatgaagttcctggacctatcccaagatctaatcacaaggtgggagggagaaaggcaccatttaaactttcatggggatgtaacggggataaaaatggccagcataagcatgattttgtgtccttcgaaaaaggtgatataacaacagcagaacggagcaataagcagatcttactgaaatgggaatcaccaccacaaacagtgcttttcataaccaaaccgaattccagctctgtgcgtgttctttgtgctgaaatggtcagatggcttagagagtataaaaatgtaaacatctttgttgatccacgtgttagcaaggaacttctaacagaggattcctactacaacttcgtccaaacgtgggataatgatgatgatataaagatgctgcacacgaaggtcgatctaattgtaactctgggcggtgatggaactgttctgtgggctgcatcattgttcaaaggaccagttcctccagttgtcgcattcgcccttggatcactgggcttcatgacacccttcccgagcgagcactaccgtgagttgttggacaacgtgctgaatgggccatttagcatcacgctgagaaatcgcatacagtgtcatgtaatacgagacgcggcgaaggatgaaatcgtgaccgaggagccgttcttagtgctaaatgaagttacgatcgaccgagggatatcgtcttaccttaccaacctggaagtctactgcgacagctcttttgttacttgtgtgcaaggagacggactgatcatatcaaccacatctggaagtacggcatattccctagcagctggagggtccatggtccatcctcaggtccctgggatccttttcaccccaatctgcccgcattccttgtcgttcagacctttgatcctgcccgagtacgtgactctccgcgtccaggtgccgtacaacagcagggggcacgcctgggcgtccttcgacggcaaggaccggaagcagctgtcacccggtgacgccctgatctgcagcatttctccctggcccgtgcccacagcctgcctagtggattcgaccaccgacttcttccgcagcatccatgagggtctccactggaacttgaggaaatcccagtcgtttgacggcccgcgtgattgattcaacagtttatttaccgttccatacttatatacaaaggttgcgtgggtttagatgtgaggtagtatagacgtatagttgagaatccaaatatatagccatgaccatgcgtgtgtgtacatgtttctgttcttcagtgctccccagatctgaatggaataattggcgagccatacacgtatgacgagatggcagcttgcagtcgtgcgatctgggcacttgtgacgattgatggggaggaagcctccatccttttttagctttccatact

SEQ ID NO: 111141 - DNA, 324 bp, Zea mays
  Clone ID: MRT4577_32852C.1
ctgacacgtacttccgggtcctatcgttcctctccgacgccggtcgatctcatggcgggctccatggacgtcgtcatcaccgcccttacgctagcgtacgagactacgcataggccggctgcccagggccgtattctatgcaccgtcgcacccgatcgctcacgatgccgatcgctacgcctccgcccctacggacagcgatcagcccgctcctcggctcggtccaccaaggctgtagcggcagcactagctgatcctctcaaggtcatgatatcaagagctactacgtccggcaagggcacacagtgcgagctgattaagacc

SEQ ID NO: 111142 - DNA, 159 bp, Zea mays
  Clone ID: MRT4577_32853C.1
acaaaagattcggggtgcaattgaaagatattgaattgacaaatgccaaaataagatagtaccaaaatcatggtgtcacaacaaagcttatcgttatattgcgtatatatgtagattggacccaagtttcaataacgcaagatctgaaaaaaatggtta

SEQ ID NO: 111143 - DNA, 323 bp, Zea mays
  Clone ID: MRT4577_32854C.1
atttagaggacactgctggattctctatatatagagtttctctaaatagttctctatccatttgaatactttaaataatcggtttaacaaaactaaaatatatacaatacatgagagtatgacaaatatgtatttacaaaaaaaaaaaaaaaaaaaaaaaaaagacgggcgacaactattgagacaaattatgccgccactggattcctgtccattacctgcacgcaatccatgtcaacccacaccgagaagactcacagcttgtccttttcattgccatagaagaattcggtgttacattgatattactcgcacctatccta

SEQ ID NO: 111144 - DNA, 386 bp, Zea mays
  unsure (1)..(386): unsure at all n locations
  Clone ID: MRT4577_32855C.1
ctgccnntttttttttttttttttcttaggatttaacttataataaagtttgtttttgtttacatcatatattttttttcttttatgctgaaaaaagcatgtgtctaaaaagccaattcttaattctttaaaaacttttccccgttttaaccgccttttaaacccacatatgttaacccccctccccaaagatcaagtttttttaaaaccctctaaagcctttttttgagggtttccaaaaaaattttctaaaaaacgaacttatttaaattaattcccccaaaaaaaaacccccccgattaaaaagaataatctcccttgaaatgtaaaaaggtgttacccttaatgggtttccaagattatcccttttttttaattgctaaaaa

SEQ ID NO: 111145 - DNA, 163 bp, Zea mays
  Clone ID: MRT4577_32856C.1
cccactcgtgcagatgaaggcttggacacgctaagacaccccgtgctacgaaaggatggacccagcaactagcgacccacaccaccgttgctaacatcctacccagccagccctaagaataccgcccaacgccagcatttttaccacaggagcgaacccaacc

SEQ ID NO: 111146 - DNA, 1665 bp, Zea mays
  Clone ID: MRT4577_32857C.1
gcctcaaaggcctatacaggcctggctcggcgagccggcagcccggcacttataattccgccttctcccacctgcctcacaccctctagccaaaaccctagcagccgcccggtgctccctctctgcagatctcccttcgcagccgccgaggaaccccttcacagcgcggaagatggctgaacaggaggccccagtcgtggttgaggcaccaaccccagttcttggggagcctatggacttgatgactgctctgcagctcgtgatgaagaagtcaagtgctcatgacggacttgtgaagggtctccgtgaggctgccaaggccatcgagaagcacgccgctcagctttgcgtgcttgctgaggactgtgaccagccagattacgtcaagctggtgaaggcactctgcgctgagcacaatgttcacctggtcactgttcctgccgcgaagactcttggcgagtgggccgggctttgcaagattgactctgagggcaaggcaaggaaggttgtaggctgctcctgtgtcgtcgtcaaggactacggtgaagaatctgagggccttaacatagtgcaggagtatgtcaagtcgcactagatgtgtgacatgtttcagtgatactcttgatttggacctgggcttaaaattatgcttttgcatctggggcttgcctaggagattagaacattttactagaagagccgaagaggatatgtatgaacaatttggacatctgaatttttttttgtttatggtgctgtcgtctggttttaatgcaaatcatgaagagccgagtttattccaaaaaaaaaaaaaaaaaaaactctagccaaaaccctagcagccgcccggtgctccctctctgcagatctcccttcgcagccgccgaggaaccccttcacagcgcggaagatggctgaacaggaggccccagtcgtggttgaggcaccaaccccagttcttggggagcctatggacttgatgactgctctgcagctcgtgatgaagaagtcaagtgctcatgacggacttgtgaagggtctccgtgaggctgccaaggccatcgagaagcacgccgctcagctttgcgtgcttgctgaggactgtgaccagccagattacgtcaagctggtgaaggcactctgcgctgagcacaatgttcacctggtcactgttcctgccgcgaagactcttggcgagtgggccgggctttgcaagattgactctgagggcaaggcaaggaaggttgtaggctgctcctgtgtcgtcgtcaaggactacggtgaagaatctgagggccttaacatagtgcaggagtatgtcaagtcgcactagatgtgtgacatgtttcagtgatactcttgatttggacctgggcttaaaattatgcttttgcatctggggcttgcctaggagattagaacattttactagaagagccgaagaggatatgtatgagcaatttggacatctgaatttttttttgtttatggtgctgtcgtctggttttaatgcaaatcatgaagagccgagtttatgcttgatttgcgtttacctatttactcatgtttctatacccatatcccattggcttatggaaatctgttttgtgccgtgtggcaaatcaaatcatacttgaactgcaatttcggaaaaaaaaaaaaaaa

SEQ ID NO: 111147 - DNA, 369 bp, Zea mays
  Clone ID: MRT4577_32858C.1
gattagaacctctaaaatttcccccactcgcctgtcgaagcagaacctgtagcattcatggaggccagctgtacacggtagcaaggggaagatgggtgcggacgatctcacggcacgctgttccaggaagaagtttgtgacgcggtccttcaaggcctgtctgcagttccccgtcaacctgatcggactctacctcacgaagggccagtacgtgcagcgcgtgaacactgtcgcgtacgtctacctagtcgccgtgctggaatacctcgtcggcgaggttctcgaattggcaagaaacgccgcgaacgacagcattaacacgcgcatcatcccgctccacgtgctattggcgatccgcatcgacgagga

SEQ ID NO: 111148 - DNA, 309 bp, Zea mays
  Clone ID: MRT4577_32859C.1
tacgactactatggggaaagctgcgcgcgctccgcaggtccggatcctgtatagcgggcgcgatccacgcgtccgaccaagagcaacgacagtcgtttcgtgcgccatgtacctctcactcctccaaccaaagcttttctgatcagtatacaccgcttgctcctccataacggtgtcacgagagacatagaccggctatggaggcaatgtagaggatgctgactagggtgatgcgcctgtggagatccgtgcctctgtccggcgtcctccaccatgtaggaccgcacgcgcctctgcaggccaccggcg

SEQ ID NO: 111149 - DNA, 471 bp, Zea mays
  Clone ID: MRT4577_3285C.1
gggggggggggggggttttttaaaaatttttttggggggtttttttttttttttttttttttttttttttatcttataattttcgacctttcgggttagacccgctaaattcccccctcttttccgtcgaaccccagggcggccccaagagggacccggggggggggggggcgaaaccctggggccccccaactccccccaaaagggggggcccaaaaacaaggcgaaaaacggccaaagcggatcccgggggaaaaaggcattccgggccaaaatgccccacaaaaaacaacccaaaagcaaaaagggaaaagcccgggggcccaaagaaaaaaccaaccccccaaaaaagggggggaccccaccccccccccccaagagggaaaacccgcccggccccccggaaaaaaaaaactcccaacccccgggaaaaggcggatagaaaatcgcccccccggggaggcttttttt

SEQ ID NO: 111150 - DNA, 242 bp, Zea mays
  unsure (1)..(242): unsure at all n locations
  Clone ID: MRT4577_32860C.1
aacaccaaaaactcttttgtgggcncgggttcatttacaaattccttttttcccccatcatgttacaagggcacacacttatatcaatacctatgccgatatcccctcccgcacaaacctacatgcgctaatccgatagtattcaatttacgtcgtaaaaaaataatatggagcgatcgacttgacactggatttcctgccctcccttgtcgcgaaaacttttaatccaagaacagccccct

SEQ ID NO: 111151 - DNA, 1263 bp, Zea mays
  Clone ID: MRT4577_32861C.1
tcgaggccggccgggtattcgggcagatcgggaggtactggaaggagcggattgcacagccgctcataatctcgctggcaaaggggatcgaggcgtcgctcgaccctgtgccccggatcattacgcccacgcagatgatcagcaatgcaactggagttcccttggagaacattctatatcttggaggcccaaacattgcttctgagatttataacaaagaatatgcgaatgctcgcatatgtggagctgacaagtggaggaaacatcttgcaaatttcttgaggcaacctcattttattgtatgggacaatagtgatctcattactcatgaagtcatgggcggcttaaaaaacgtatatgccattggggccggtatggtggcggcccttacgaatgagagtgcaaccagcaaatcagtatacttttcactttgcacatcggaaatgatatacatcactcatcttctagcaccagagcccgagaaacttgcaggacccttattagctgatacatacgtcacactgctgaaaggtcgcaatgcatggtatgggcagaagttagctaagggagaactgactctagaaatgggggacagcatcaagggcaaagggactatccagggtgtttctgcagtcaatgcattttatgaactgctgagccagggaagcctaagcgtgatgcatccagaaaccaagaaggctgttgctcctgttgagctatgcccaatactcaaaacactatacaaaattttgatcaagagggagcttacgaccaattccatcctccaggcaatacgtgatgaatcaatgtatgatccacgggaaagaattgagatggcacagaggcagtctctttaccggccatctcttcttggcctgcctaaagctgatgcgaaggcctaagatatggtgtttcttcctacctgatgagagcttgcaggagccaggaggcgcttactggtcttcaagatccttacgtgcctcagatgtgtgttgtgtcatgcgtgtacactaatacactatagagttgggtgatggcatatttagcatgccaggataaactttattgcccgtgtctgaaatacaagctgttgtgattcaaatttatttgtcacttagactggagtaaagatgtgtatgccttttattttatgatggcttcagagtctcaaaattggttgtaagattactccctgcgtcccaaaatataattcgttttagattaatcataaaaaaaaagaaaaaaaaaaaaaaaaaagcggcc

SEQ ID NO: 111152 - DNA, 134 bp, Zea mays
  Clone ID: MRT4577_32862C.1
cccactgataacctacctatatgtgacttcaaattaccattcagcatggaggtttttttagagttgattactacgacgtcgagtgttcctcctattaatactctccatgaatgccatccgccctgtgctgtcgg

SEQ ID NO: 111153 - DNA, 1368 bp, Zea mays
  Clone ID: MRT4577_32863C.1
ggcttgaaaaaattgaacctgaggtccccatcggcagatcgctatgcgcggtttttggtggaaaagggctatgcggtggccatctgtgaccaggtggaggatgcagcggaagcccaggcagaaaaacgcatggtggaacggcaggtgaccaagttactcacccccggcactttgaccgatgacagtatgcttccggccaagcggaataatttcctggcggcgatcgccatggtggaggataaatggggcctggcccatgcggatatctccactggggaattttttacgtgccaatccagtaatttggatgacctagcagtggaattacttcgactccaaccgtcggaagtattgatacccacctctgcccccgatattcgcaatattttgcgccctggggaaccttcagagcatattcctaaacagttacccaccagtttttgttattctctccgttcccaagcgcccttttccttggtggaagcaaaacagagattactaaccacttttcgagttaaatctttggagggcatgggctgtgaaggtttacccctagcaatccgggcggcggggggattattggaatatatcgaagatacccaaaaagcccatgtggtgcccattcaaccattaaaaacctatggcttaaccgattttctggttttggatccaaggctttttagtttggggtttacccattgtgatgattgtggtcggtggtgctagttggtggttagcaggcttagccatggagccggtttatcgttcctaccaacaaatccagcagttcaccgctgatattgcccacgaattacgtacaccgattacggcgattcaggcaacgttggaaacgacattaaatgcagaacctaatgctgaagaaacccatagcaccttgcaaaccttaaaacgacaaaattatcgtctcagccatttaatccatgatttattactcctctcccgcatggatttaacaacagttaatccgacccagtttaccctttgttgtctcaatgatttagttgaagatttaaccgaagaatttgccagtttggcgatcgccgctggggtattgttatctgcgaagttagacaatcaagcaaatatctgggtcaggggagaagaagaacagctttatcgtttggtgggtaatttaatcagtaatgccattcactacaccccaacggggggcgaggtaaccgtcatgcttgagaccgataaacagcaagccatcatcaaagtccaagatacgggcattggtattgcttcggagaatcaaagccgggtttttgaccgtttttatcgggtggatacggcccggtctcgacaacggggaggggcaggattaggccttgccattgcccaggc

SEQ ID NO: 111154 - DNA, 302 bp, Zea mays
  Clone ID: MRT4577_32864C.1
acttccatacaatgttttttaggcttctgctgtgacatgtttaatcctgtacgatatattactgcacggtactatacttttgttggtgctgctaacgcataaatgttcctatcttttccctttctttataaatgaccaagttttgtctttcatttaatcgtagtaataaaaccctcctgtggcccattcttatatatattcttgtaatccttcaaagacatggttctgtcttaagtcccaacacctcacaattaccatattcagacattcaaaccaaaaaaatatctaaataaaaccaccct

SEQ ID NO: 111155 - DNA, 310 bp, Zea mays
  Clone ID: MRT4577_32865C.1
gaaaaaaaaccggctaaacctttttttttcttttaaaaaagtttccccctttccacccataaagaccagccctaacattttgggtttggtaaaaagaggggcatttaatgcgtgccaaacaaacaacagggccctttaaacatagcaaaacttacaacatgatccaagctccagggcacgtaaattttacatttaaaaaaaaaagggggggaatccttaatgctgggcggaagcgggaccaagcttgaccccttttttgaggatttgcatggaaggccccctgccttttttgcccccccccccgatttaa

SEQ ID NO: 111156 - DNA, 262 bp, Zea mays
  Clone ID: MRT4577_32866C.1
tcggtcaaagttcctttgtttctttcttgatttgtgcttgcgttgggttcggtgttcgatcggcgcatttgccgcatgggcgtggctgtcaaagttccttagcatctttcttagatatgtgcttgcgatgggttcggtgctccactttctttttatgtgattattaatctcgttttcagatgcatgtacacatgtatgtgcctgcaccatttggtcttgtgaaaacttgatcattgtattccaatctctagtgtagcaacct

SEQ ID NO: 111157 - DNA, 463 bp, Zea mays
  Clone ID: MRT4577_32867C.1
ggggcccccccttcaagcacttatttaaaaagccgggcaaaggtaaaaaacggggggggaaacccggggggggggggggggaaaaaataaggggttacagggggggggctggctggcaaaaaaaaaaaacctgggggggcttgcagctcgggaaaataaataaataaaacaaagggaagcccgcccccaaaaaaatcaaaccccggggggaaaaaaaaaaaaaaaacttccctggggaagggggggcaaaggaacaccggggaggaccgggggaggggcccaaaggcaagtcccttaaagttaaaaaaaaactccaaaagcccctggggggggggaaggccccgaagccttgaaaattgggccccccttttcgccttttaaaccaatggggtaaactaaatggacccagcctttttggggaacaatttgggaacaggggcccggaacccaagggggggccctt

SEQ ID NO: 111158 - DNA, 295 bp, Zea mays
  unsure (1)..(295): unsure at all n locations
  Clone ID: MRT4577_32868C.1
naaaaaaaaaaaaaaaaaaaaaaaaaaaaattaataaaaaaaaaaaaaaaaaaaaaaaaaaaaacaaaaaaaaaaaaaaataaataaaaaataaaaaaatattttataaaaaaaaaaaaaaaaaaagggggggccctttttagggatccaagtttatttccgcttactttcaacgtattaatttttttttgggttgccttaattttacttctgggccggtggttttaaaccgttgaggttggaaaaaccttggctttcccaaatttattctctttgaatgaattccccttttccc

SEQ ID NO: 111159 - DNA, 307 bp, Zea mays
  Clone ID: MRT4577_32869C.1
cctcaaggagatcttttatatatcgtcgccctgcacgtggggggctgcgattaccacttttactctcatcttcttggtgacaccccccggatgaagatcaacttccgcaggggcgaaaaaccggattttaaaaagataggtcagtctctaaagtcccaacatgataaccacttgcatttttatgtgagtaatggacatttataattgactctcttaacatgggttaatattaaggggtgtatcccctcctaattaagagtcacggtgtgggaaaccggggtttttaatttcgcttacaaaatttata

SEQ ID NO: 111160 - DNA, 162 bp, Zea mays
  unsure (1)..(162): unsure at all n locations
  Clone ID: MRT4577_3286C.1
ccacgctttttcggtccccgnanctcctacccacccgcgtggcagaggggttncnncttctcgacccgtgcggnaacgaggccagnannaacaggtatgngnncggcggnncgcggcaccctcagnatcccggcgcctcccccttcnnctccgcgccccacc

SEQ ID NO: 111161 - DNA, 282 bp, Zea mays
  Clone ID: MRT4577_32870C.1
gctatttggtgcttgaatgtgactgttctttttactttttgctaagccttatttaaagtttgtataccatggaatatgtaggatttgtccagtcattttagtgctgagggggtctttgtgtttttgttgcagttttcctggtggctcgttttgtattgtaagagggcactcactgacataagtactaaggcactaagagaaaatacacacagataagtatttataagatgcttgtgatccatagcatgatttttgtttcgttttgtaagagaaaaaaattac

SEQ ID NO: 111162 - DNA, 456 bp, Zea mays
  Clone ID: MRT4577_32871C.1
gggggcataaaaaaggggtttgggcctttgtcctaaacgggtaaaaccccaacagggggtaaaaaaaaaacaatgggtttgggaacaaaatactaacccagcctttgccaaataaaatttaacggccaaaaacaaataaatcaaataaaattgggcccaaacttttttaaaactaggggtttccccctttatagcccacaagggcaaccccttggaaatggcccccaaacaactataaaaatctccccaaaaaaaaaaaaaggggaaaacggcaaaaaaaaccctggggtggtttttttaaaaggagccccccgggcaaaaaaattttaagggaaaggtcaaacctcaaagggggacaaaaaaaccgttccttaaaaaatttaaaaaaagggtgggggcccaccttccccggaaaaatttttgtaaaaaggaggcttccacccttttttgtttttt

SEQ ID NO: 111163 - DNA, 112 bp, Zea mays
  Clone ID: MRT4577_32872C.1
aagctgcaaagcggagaaaggagtttactatatgaggtcggctgtgctggctgcatgtgtttgggactgcagctggaatctatagaaacaggatactacataaaccacagtg

SEQ ID NO: 111164 - DNA, 307 bp, Zea mays
  unsure (1)..(307): unsure at all n locations
  Clone ID: MRT4577_32873C.1
acaatgttgattgtagagggccacgttagccacgtgctggtaaacgcacaactgggtggtcaaaagtacaggctcaaccactactgctgaaggtagattgttgctgctgtaaaaacagagattcaagctgctagttggttgaaggaagaaatgctgggggtaggcagcagtagctggctgaaggtagttgttgttgttgcaaataaaaancagattcaatgaacctaattggttgaatggnaaaaaactgctgttgctggagagtagcagcaggtttgctagcacagttgttgtaagttgttgtgcc

SEQ ID NO: 111165 - DNA, 188 bp, Zea mays
  Clone ID: MRT4577_32874C.1
accatcgcccccatctccatcgggttcatcgtggggttccgcaagacacaggacaccgcgtattaccgatcttacataatgcccgacatgaacaatatgacccgccctcatcaactgggagtggggctaccaatgggtatactgggtcggccccctaatctgcagcggccttgccggactcatctacg

SEQ ID NO: 111166 - DNA, 891 bp, Zea mays
  Clone ID: MRT4577_32875C.1
gcaagacggggaaaagtgagcacattcttgcacgaagcttgccgccgctgagctggggaggagatcttgcctaggtctagcgaggaggaggtcgatcgatcgattggctaggactctaggaggaggagctggttcataagcagacctaccgacccacccatcgactgtacttgttcggaggaagggatggccgatctgctgagcttcctgaagacgatcttggaggccgggttcagtataatgagcgcgctggagaaggctggccacaacgcggacgactgccgcaggatcggtcagctcctgcaaacactgagtgccatcgctaacgccaagtacctgcaggacaacacgacgaaaggtctgaaggagaccctccagcgcgcgtccgagatcgtcaagacgtgcaaccgcaagaccttggtgagccgtgccttcaaggccaatcaaatcgccgacgagctacgcggggtttgcattgatatattgctgaacctgaatacggtgctccttgccaacgtggccgacattaagaaaactgttacctacaataactcaatgttggcccaaattttggaaatatgtgctgctaatcccgatgttcgtctgctacggcaaaagattgacagattggcacagacctactgtaattcaagtgatgatgatagttatcaaaatgaaaacaaaagggagacaaagagaacagaccttgacagaccaggatttaagacagagaaagacaatgcaccagtggatagcaaggtgccacgtgcttccttatcagatggtggctcaatcaagtctactccagtgaaaagtgtgattggacaaggtggccctagcatcgtcaagaaggcacatagcagcaacccaactgatggtgatggttctagc

SEQ ID NO: 111167 - DNA, 219 bp, Zea mays
  Clone ID: MRT4577_32876C.1
ctcttatttttagaaaggcaccagcaaatagcagactctgaggcagcacgttacactcagtgcggctcggagactaagatactagatggaatccatttcatacagcaggtagcaccagactcatctctatgaattggagccagtgctactgttagttatgccttataccttatgagggctgttcaggtattggctcacaataagcctgtaacgcctgac

SEQ ID NO: 111168 - DNA, 887 bp, Zea mays
  unsure (1)..(887): unsure at all n locations
  Clone ID: MRT4577_32877C.1
aggcgtcgttattgggtcatcttttggcggtgctcgttcttttgtcattggtcactttgctccttctggcaaccctagcagccttggtatgggatgtgcatacacatcttggttcctcctcttttggtggctttagctttgcagctgacttcagttgtgatctgacgtgtgtggtcattggcacctctgctccgtcgacggtcttcttgttgttgatagcatcatcaaatgccggatggtcagatggatcacttggatatgctttatatgctactcagcaactctaaggaaggacgttgtttcctggtaacccttgattggcgaactctttggcgaactcgtagccccactcagttgggcggtccctcatcccttcgaggattcctcccctcgttgcgcgtaatggagggagacaatggagcggcgttgctacatggagtcgtgaggaggataaagatcaaggcatcttcggcgagcatgtggctcgatggcaattcattttggaaatctactgttgttgctgcatagctagtcttctctatgatgtttgtatgttttctctctctagtgtatccatgtaaaatctctttgtaacttcatcctgtggaccattcatgggtcagctcttgacgccattattattaatggatttattcaggatctggaaaagagaatccaaatgatgatggtcctgaaaataaccctcagtttactactgtttatgttggctatcttcctcacgaggctaccatgaatgatgtgcgcctgtttttccattcactgnnggctggttcaattngagaagtccgtgtaactcgtgataaggctttggctttgtgaggtacagcacccatgaggaggctgcatttggcattcanatgggtaat

SEQ ID NO: 111169 - DNA, 324 bp, Zea mays
  Clone ID: MRT4577_32878C.1
tatgctcgttgctctttctgcatgtgttgctaacacgaccatttctgatgagtactcacatgctcctatagacgcccttattgcgatataccattgatcactcaccgctttagattgtgaaatcccaggccttctaaccctacgagatccaattatcaatctaaccaggcacctaacctttatcacatctgttctttgaacaatcgccagccctatctttgatgcagccattggtacaaaccattaggttgcaacagactcggcaactcgtgctaccagagatcattcaagtagctttggcaaacctttgctgctactattatc

SEQ ID NO: 111170 - DNA, 380 bp, Zea mays
  Clone ID: MRT4577_32879C.1
atcgaactgattcagttttttaatttattggaaggggatatatttatacaaaaactttgcaaggcaaataggataaatgctgcaaccaaacgggacctgcacaaaatattaatacatcctaatcatacgttggataccccacagaatttttgatccatgcttttctccagggggggcacccagatattatttacgaagctcccacctggccctagacggccacctaaataataaaagataaaccggccggggcctagggaagaggaatacatccttctttaccgaccaacaaccctggaaagttccaattcttgcttagggcgcaaaggccagcttagctcgatacaaggaacttggttatgggcgcagcaaaattacct

SEQ ID NO: 111171 - DNA, 970 bp, Zea mays
  Clone ID: MRT4577_3287C.1
gaccagctgctagataggcatgtactattctgactgaccgccccgttcgtctctcaatctctcctcatggctcgctccaagctctccgtagaattgttgctggcattgctcgtggtcctcgccgccggcccggcgatgcgactggtcgaggcggcttcggcgcacctgcacttttacatgcacgacgtgacgggcggcccgtccccaacggcggtgcaagtggttagcgggccgcggggcaacttcggcaacaccatggtgatcgacgacaagctaaccgaggggacgtcagagtcgtccacgacggtgggacgcgcgcagggttactatatggtggcgtcggtggcgaacctcgagctcctcgtcaacatgaatgtcgttcttacttcgggcccatacgccggcagctcgctcacggtggtgggccgtgacgacgtcagcgtcccggtgagggagctctcagtggtcggcggcacggggcagttcaggatggcgcgcggctatgtgctgtggaagaccgtcacccccgcgattctcgacctggagatcttcgtcaacccttcttgagcctatcaggcaataatggtatgattcctgcatacatgtgaaaaattgattgggtgatctgtcaagtgtgtgtaatccttttcttttcattcggtctgggagcaactacctgcactttatgatttgttgagcacatatgtaagtgaatgagctatggttctgttggttaattggctggtttatttgaggacctatatatacattctatcgacgtagtatatatagctcctaaaagagacgtattgcgcgtttagagcttgttcggttatctctcaatccatatggattgagtgggattgggtggtttaaatcccaaggaagtcaaacttcttcttaattttttccaataccatccaatccatgtgtaacggaattaaccgaacaaggccttaaatggatcaag

SEQ ID NO: 111172 - DNA, 591 bp, Zea mays
  Clone ID: MRT4577_32880C.1
tttcaataatttctttttgatcagatttctcccctgcttcctccatccttccgtctctcgcactcccttcgtttcctctcctccttctgccctgtgaacttacgatcctgcccctgcgtgggtcccaccatctcagttcgtactttgtgttaggtctctctttttcttttcttttttttccttcatctgctccgcagcgagaccaaaggagggttgcaaaaaaaaaaaactctgtgcctctccgtctttcctttcggacggctcagctccgcgctgacgtgtctggaggcgaagcgcagccgtcgatatgtcgctgagcgagaagctggaggccgcgcgtgtcgtcctcggcaagcgcaaggagcgcgagcgcgagctgctgcaggcccagccgctcccggtggcggctagagccgagccgtggaatccgggtccggctcgcgcggccccctccgccgccgacgccgccgccggcgaaaacaagctcctggccgggcacctggcccacgagttcctcgcgcacggaacgctcctgggtcggcggatcgagcccagccgcggagccccagctccggctccggcaccggcgcg

SEQ ID NO: 111173 - DNA, 1552 bp, Zea mays
  unsure (1)..(1552): unsure at all n locations
  Clone ID: MRT4577_32881C.1
ttattcggcacgaggctagctggtacatgtgtttacatgacataccaggaacttgtacgtgtacaaagggtccacggagacgagctgcgtcggcgactgcagcgcggcggcgtgcagcaggcagacgagcgactcccactggttgcgccccagcgagtcgcccacgaacatcaccgtcttccccttcatccgtgtcaggaagaccgtggcacaacgcctgatgtcacgttgtcccagcggcgccgcggccggcgtcacgccacgcggatggtcacccacgccacgtccctagaccggtgtggtacgccggcgcccacagcgtcgatgaggaggaggtcggagcagcagtagctgtcatgggcagtgccgcagatgtggagcagtcgaatgagaggctagacgggctggagcaccacagcaggctggggntcgctgttggccggtagccgctcctcccccaccggcaccgagagggacttgtgacccaaggatctgttcccgggggatgtggtgtttgcgctcgtcgatgatctcaggctcaaccactccaaggacccataggccatggggttatgcaatccaaagaaggaaattcctgcttgagccaattacagaaggccctgatatttgtcaaattgatggttgtagtgttaaattggaatacaagaggaggcaagtcaaatatggtttgtgtgacagcacgttactaacttactctactatatctgcatgagaaaggatgaaccctgtttgcatgtatactaattaatctacggattcattaatgggtgaataagattttatttaattatgacagcaaacgtgacatgccattacaatattcgttatgccaaaaaagtaagttgcttatagtttagcctttggtttcaatttgcactttatagaattatactggcagagctcctgacggagcacctgacggagctcgccacaggtaccaaacggcgcagcagcagttgatgtgcaacccgagtgtactgccgctcgaggaggccagtaagtgccaacaacatgaatagccaaagcagggaaatagggctggcgggggcacatgggtaacttggtcctggagcattggagaaggagcataccacaaggaaaccaacacgagttccttgcttcctgaaggcctcatagctcagattactgggttaacgaacaactcatactttgatggagcacatgaggttcgacattatgtcaggaagcattcgaatcttggtcgtattgtgcttgaagttgctaaggactcgcaaatcccccgccaagcaaactgctagaaatcttttcagaggtggagatgatgaagatgatagtgctgatgccgacacaaatgatcctgttgtaccttggtcactccactgtgtaggagttcctttagagatgatatgaccatattcgttcggccattttcccaacactggtctataccgcaggtcgatgcataaacaactgccttagaaaaacatagttttaaaggatnnaaacttgagatangaatgacaacttaaacagtcatcatagctaacaa

SEQ ID NO: 111174 - DNA, 224 bp, Zea mays
  Clone ID: MRT4577_32882C.1
tattgtaacattaatgactcggttggcctcgataacgacgaagagaccaatccacggggaagtcagttcttatttcatgtgcctctaggatagggctccccagtaaatcaaataagattaacccatatatggacattacctgctacatattcttcgaaaatgtcgaacagtgatcgcaaaaggcaacagaaactcataccttcacgccgtgggagaggccgaat

SEQ ID NO: 111175 - DNA, 456 bp, Zea mays
  Clone ID: MRT4577_32883C.1
tactgtaggttgagccgcctcccctgcccggtccggtactgcattgccgggccacgcctccgattttatttttgcatttcggttcctcgtctcgacagagtggtccgtcgaacaggccttaacccccgttatactgtcgctggcccgtatagtcctcttcgacagaccaaaccctagtctaggggacggcagcgcgatacgcgcacggcgacttgttcatcatgcgcaagcaggtctaccagcttatggcggccagccgtaacggcgatgttcaggaggccagtcgcaagtactgtgatctgcacgactgccctctatacttgaggcctttgtcctcaccacctcgttcagcttaccaagatcgacatgggccctcgcccgaagctgaacttgctgtagctgcgcatagaatatgatgaagccaaagccaaaggctctgataactatgaccgtgaa

SEQ ID NO: 111176 - DNA, 303 bp, Zea mays
  Clone ID: MRT4577_32884C.1
ggactgcacccttacctaggcattgggttcgagtggagctctagccgtcagcattcaacaacacacgacgatatactctcttacgccggcctaacaccaatggctaccaagatattactcctacttgcgctacatgcccttatagtgagcgcaacaaatgcgagcatcattccacagtgctcacttgctcctagggccaggattgcacagccactgaaaccaagtacttaaatgggctcaaaccatactaccgtgcgagcctacagcgctacaactagcgctagcggcgagcgccttacaaca

SEQ ID NO: 111177 - DNA, 324 bp, Zea mays
  Clone ID: MRT4577_32885C.1
gctttctttttcgaatccaagcaaccacacccgcgggcccagtccaaccttcgaggcgcgaagcttgcgctcgaggcggccgacgcgagcgccctcaagcgcaaggcgggggacggcggctaggtccccgacgccaccgcctcggcagaggtggccgcagcgcctacccccggagaggacgcggtcatgggcgacgttccacatgctccgcacgctgctggatgtggagaagagtgggcggtgcctgaccctaaccctagcccgagccttgggggctgctctgaccccgtgtaggtggagctcttcattggctgggactactac

SEQ ID NO: 111178 - DNA, 385 bp, Zea mays
  unsure (1)..(385): unsure at all n locations
  Clone ID: MRT4577_32886C.1
cacgcaaccgcacaactccaccaccccgccgagctcggctgggctttgccgtggntttcgcntntcttgtgttggccttgttgtttctcgtggggtgtgtttcgggctttccggttctgtcgggcgggttgtcctcgctggcggcctcctgggcgggttctttgcctgttttgctctgggttggctggtcgccgtcggtgctggtcttgcctcttgccccgttggttctgtccgctggcggttggtgttgccttctggtgcggctgtcgngtgggtgggctccttggccgtgttcctgcggctcctttgccgggccggccccgggtccctgttcgcgggtgctggtgctcngtttcttcgtgccgttgctggggctggtgtgctt

SEQ ID NO: 111179 - DNA, 587 bp, Zea mays
  Clone ID: MRT4577_32887C.1
gcgccgcggggcgctggaggcgcgggcgagtgcggggcgacgccgccggacacggtggcgctgaggctggcgccgtgcgcgtcggcggaggaggaccccggctccgcgccgtactattactgatgcatcgcggtgcactccataaggaatcatatttctaagttcctattctatgtgttgttgttcaacaccgatagtaacattggtatcaacgctgatttcattataactataccaaaacatttgaatatttatatccgatgtgttgtctacatttataaaaatttaatgatatttagtatcatagatatgtattattttaatgtacatgttgaatttagatttaatatttctttaactcctaaataaagtttgactgacttaccatttatgatggaatatgatttattattgtcttatataagcctgcatcgatttactctgcatatcttattatctacttgatgagtgtttgtaatatgtgtgaatgccaactgttacttatacattgtcagtgtgaaatggctatggatttcacctttgtttgctggtcagtggacagtgaactatttatttgatgagtaaat

SEQ ID NO: 111180 - DNA, 167 bp, Zea mays
  unsure (1)..(167): unsure at all n locations
  Clone ID: MRT4577_32888C.1
caggttgttagtgtactaaaaacaataactgaacagccaaacctcaatgttttggggtccnaaaaaaccnaaccaacaaactgaacaataccccggggcaaacaaacctcaacaagaaacccgataatgagaaaaccatacatcctaaatcttccccacacaaaaag

SEQ ID NO: 111181 - DNA, 812 bp, Zea mays
  unsure (1)..(812): unsure at all n locations
  Clone ID: MRT4577_32889C.1
cattgggtacctcgaggccggccgggccttttcagtttcattcccttgcttagccgggcaaaagtcggccagccatggccgcaccgagcgcggtcattgatcggctcctacgccggcttgccgctattggtccggacgagctgccgtcggctgtcaaggaggacatgatctatttgaagaaaactctctcccggtggcacgttgttctggaaagtacggagaagcaattcttggagggggtcaacggagagtactcgcagaggagcaaggtcctgatgtcaaaagagaataagatgaggaagataaagcagatagcctaccacatcgaagatattctggatgaattcgagggctgcggaagaagtggatctggagcgaatagcgcaaggggatgtgattgggactagccgtcgccgtaaatcttcgcctcgcctctacatcttggatatcttgcgtcttccttcctaccatacctctacacctcatgtgcttgcggcttcgggttccacgacgacgtttgctcagtggcatcatcgtcttggtcacttatgcggatctcgtctgtccaccctaataaagtcaggatgtttaggtcctacacatgctgagtctagttttcattgtaagggttgtcatcttggaaaacaaatacaacttccatattttactagtgattctcattctgctaaaccttttgatttaattcactctgatgtttgnggtcctgctccatttgtctcanaaggtggtcataaatattatgtcatttttattgatgatcattctcgcaaaaaaaaaaaaaaaaagcggcc

SEQ ID NO: 111182 - DNA, 681 bp, Zea mays
  Clone ID: MRT4577_3288C.1
cccacgcgtccgcccacgcgtccgcggacgcttgggctgactcgtggtagacctactcattgcaagaccagtactaccctgccgtccacctcaacggcgccggcgccggcgccctcttccacgacaaggaccggaagcacctcccattcctgaccaaccacaacaatggatgccagccattcaccgtcaccacgacggcttcctcagagagcagcagcaagcacagcaacggcaactgtgctctctctcttctgtcagacaacccgacaccagcacagacggccatgatccctactaccgcgcagtccctcgccgcggcgatgcagtacggcggcagactccctggcagctgctgcagtaccaccatggctatggctactaccatgtgagcggcggcgagcagggcaacaaccccgacggcgccgccgttcacgcccttcccttctcgtcgtggtagacgagctctcctgatggaatcatgtgcgctaggcaggcagttgctctcctgtggttcaccaaacgtatcggttgtaatagtaggctcgatcatactggaaaccgtgacaagttgtccattttctcatcttatcctgataggtctaatttatggaaattcttcctaagttattatgattcggaaccgtgtaaagattctaaaaaaaaaaaaaaaaaaggccccta

SEQ ID NO: 111183 - DNA, 349 bp, Zea mays
  Clone ID: MRT4577_32890C.1
ggggctgtgatggcgacgaagaggagcgtgggcaccctcggcgaggcggatctgaaggggaagaaggtgttcgtgcgcgccgacctcaacgtccctctcgacgacgcccagaagatcaccgacgacacccgcatccgcgcctccgtccccaccatcaagttcctcctcgagaagggcgccaaggtcatccatcccgggggggggggtcgtccaaaaggtgtgaccccaaagtacagcttggagactattgttacacaccttggtgacctccttggaggtgctatgtcgatttcaccgacaccgatcgggtcatcggtgactctgtcaagaaccaggtctacatgaaccc

SEQ ID NO: 111184 - DNA, 249 bp, Zea mays
  Clone ID: MRT4577_32891C.1
ctctgagtttatcatactatcataagcggacagggagttgggggttttttattaactgcaaacactagacatctatgggcgcaaaagactaagaatacgcttgttggacgggaccaaactcatcttggcgtacaggtagcatcagtggcgctcactgaaccggggagaactgttctactcctgaaccggaggaacacatggctttcacgtgacgagcataggcatttatgggatacgacctgtgtttcc

SEQ ID NO: 111185 - DNA, 253 bp, Zea mays
  Clone ID: MRT4577_32892C.1
ttgcctgttttgattggtatggagtcactttgaacaacgtactgcttattgcccgcgtgcttcgccgtgaggattgcgctggcatggaatggctctattctagtcttttaggattgcatcccagtctgctgttggcttggagggaaggacttgccccatcttgtgtattcgaatagtggggacgatgaaaaggaatacatgttgttaccgactgtttaagatatctgttaagcttgatggggtagctgtggat

SEQ ID NO: 111186 - DNA, 3308 bp, Zea mays
  Clone ID: MRT4577_32893C.1
gattggggcccaattcggcacggcccacggcatcgccaaccagtgaaataatcctaacatccgtaacgccatcctcgccgccgccgcagcctcctgcgctccgctccactggtggtggtagggagtgcagcggatccatcccgtgtcccgatccgatcccttcgctgctagtatcgagccttgccatcgtgctcaccgaagaggacttcatcagtaaagaattgctttagcaacacttacaatataaggaaagagggttcacgttggatacaatccggtcctcccttgttgctaaatagggtaaagtttgttggcaagaggacatcctgttctgttgcaacagagccgccgcctgctgccactgaagaaccaggcatggatgtccccaaggagatattcttgaaagattacaaggcacctgattattattttgacacggtggatttacaatttcaacttggtgaagaaaagaccatagttacatctaaaatagttgtatctcctggagttgaaggcatctcagctccactagttcttcatgggcatgacctcaagctcatatcaatcaaagtcaatggcactgaattaaagggtgaagagtataaagtcaattctcgccatctgatgctttcaacacctcctgctgttgtattcaacttggaaattgtcacagaaatatatccccagctaaacacatcactggaggggctgtacaagtctactggtaacttctgcacccagtgtgaagcagaagggtttcggaagattacctactttcaggaccgcccagatgttatggcaaaatatacttgccgcattgaagctgataaaactttgtatccggttttattgtccaatgggaatcttattgagcagggagaccttgagggtggaaagcattacgcactgtgggaggatcccttcaagaaaccaagctacctgtttgctctagttgctggtcagctgggatgccgggaggattcatttgttacatgctctggccgcaacgtaacactaagaatttggactcctgcccaagatttaccaaaaacagcacatgctatgtattctcttaaagcagcaatgaaatgggatgaggaggtctttggtctggagtatgatcttgatttattcaacattgttgttgttcctgatttcaatatgggagcaatggaaaacaagagcttgaatatatttcaatctagacttgtgttggcatcaccggagactgccactgatggtgattatgctgctattttgggtgttgttggacatgagtatttccacaactggactgggaatagagtaacttgccgtgattggttccagctaaccctgaaagaaggactgaccgttttcagggatcaggagttctcttcagatcttggctgtcgtacggtaaaacgtattgctgatgtctccaaacttagaatctatcaattcccacaggacgccgggcctatggcacatcctatccgtccccattcttatatcaagatggacaacttctatactgttacggtttacgagaagggtgctgaagttgtcagaatgtacaagaccatgtttggagcatcagggttccgaaagggcatggatctttattttaaaaggcatgatgggcaagctgtcacttgtgaagacttctatgcagccatgtgtgatgcaaataatgcacaactgccaaactttttacaatggtactctcaagcaggtacgcctatagtcaaggtggcatcttcatatgatcctagttctcagacattctctttgaaacttagccaagaagtaccacccactcctggccagccggttaaggagcctatgttcatacctgttgctgttggacttgttgactctactggaaaagatatgcccctcacttccgtttacagtgatggaagtctccaaacagtctctactgatggccagccagtcttcactactgtgcttcagtttaaaaagaaagaagaagagtttatgtttaaaaacattcctgagaggccagttccttctttgttaaggggatatagtgctcctgtccgtctagattctgatctgagtgagggtgacctatttttcttgcttgccagtgactcggatgaatttaacagatgggaagctggccaagttttggcacgtaagttgatgctcagtctcgtagctgatttccagcaacagaaaacactggttctaaatccgaaatttgttgatgggattagatcaattctgcgcaacacaagcttggataaggaattcattgcgaaagcaataactttgcctggtcaaggggagattatggatatgatggaagttgcagatcctgatgcagttcatgctgtccgtaactttattaagaaggagcttgccgtgcaacttaaagatgatcttcttgcggctgtgaaaagcaacaggagttctgaggcttacacatttaaccatgatagtatggctcgccgtgcattaaaaaatacatgccttgcataccttgcgtcattgaatgagccagatttcgttgagcttgcactgcatgagtacaagtctgcgactaacatgacagagcagtttgctgcattagcagcattatcccaaaatccaggccaagttcgtgatgatgccctcttggatttctataacaagtggcagcatgaatacttggttgtaagcaagtggtttgctcttcaagctacttcagagattcctggaaatgttgcaaatgttcagaagctgctgtctcaccctgctttcgacctgaggaatcccaacaaggtgtactcactaatcgggggattctgtggctcacctgtgaacttccacgcgaaagatggttctgggtacaagttcttgggtgagatcgttttgcagcttgacaagataaaccctcaggtggcctcccgcatggtttcagcattttctcggtggaggcggtacgacaagaccagacaagctcttgctaaggcccagctggagatgatcgtgtcggccaatgggctctccgaaaacgtgttcgagattgcttcaaaaagcttggcggattagcttgggcagttccgaggaattgcgagtgggagtgcttaactgaatctctcttttgttggtaaaatgacaagtagagataataaacaggcgggccgaatttgcatgaactgataaaatataagtgtgatgatgcccgctttgtggggggctttggagcatgcaaaaaaaaaaaaaagaaagaatggaactgctgattttttttaaaaaatccgctcagcggaccgctgtggggcagaaaacatctgaagcacgacggctgctctctgtct

SEQ ID NO: 111187 - DNA, 726 bp, Zea mays
  Clone ID: MRT4577_32894C.1
aatgcgaggagggtaaagctggtaggcgtggccttaatcgtgctctccctttggactaatatatatggagttgtcagcgtgtggaaggggttttttagtggttagtaggagggcgccttctatggaggatgtgtaggcatgtagaagggacgcagattggggggtctccccaccacctcatccagcgtggatttggcacggatttcgggctctgatttggcgcggactccttccagcagattgggggatatccccaccgatggtgccgcgtaaggaggggcgggtgcctactatggaggatgtgtagggtttggcgccgatggatgggattgccatccattttcctctcggtgccgaagatggaaggggatctccgagggacaaggcgcagatgaggggatatcgccagggaaggagagtgtgagcgtcgtggggccgtgctgtttggggaaggagagtgcgggcgcggcagggggagcatgtggtgccgtgctgtttggggaaggggccgccgcaacagggggctgcgccggtgcggggaaaggaggcgggcaatacggcccttacacgcagagtgcagggtgagggaggtcgccgtccacgccatgggcgacgtcggggagagaggggagaataggtgcgtcgctgacggaggagcggatgcgcggacgggactggggtctggggggcagccatgggaggaggctcgccgcctcgtgccgaatt

SEQ ID NO: 111188 - DNA, 493 bp, Zea mays
  unsure (1)..(493): unsure at all n locations
  Clone ID: MRT4577_32895C.1
aaactgaagcacagtagtgaagactggctggccatcagtagagactgtttggagacttccatcactgtaaacggaagtgaggggcatatcttttccagtagagtcaacaagtccaacagcaacaggtatgaacataggctccttaaccggctggccaggagtgggtggtacttcttggctaagtttcaaagagaatgtctgagaactaggatcatatgaagatgccaccttgactataggcgtacctgcttgagagtaccattgtaaaaagtttggcagttgtgcattatttgcatcacacatggctgcatagaagtcttcacaagtgacagcttgcccatcatgccttttaaagtaaagatccatgccctttcggaaccctgatgtctccaaacttagaatctatcaattcccacaggacgccgggcctatggcacatcctatccgtccccattcttntatcaagatggacaacttctattctgttacggtt

SEQ ID NO: 111189 - DNA, 864 bp, Zea mays
  Clone ID: MRT4577_32896C.1
ccggccgggaaggcccacggcatcgccaaccagtgaaatcatcctaacatccgcaacgccatcctcgccgccgccgcagcctcctgcgctccgctccactggtggtggtagggagtgcagcggatccatcccgtgtcccgatccgaccccttcgctgctagtttaggattcatccttcgacgtttgggattggttcggttgggatggcgcgtcgcctgattagccccgcagcggcgtgccgaggctgcggtttggttaggaccgggtttctgcccgccatctcctccttccattatcgagccttgccatcgtgctcaccgaagaggacttcatcagtaaagaattgctttagcaacacttacaatataaggaaagagggttcacgttggatacaatccggtcctcccttgttgctaaatagggtaaagtttgttggcaagaggacatcgtgttctgttgcaacagagccgccgcctgctgccactgaagaaccaggcatggatgtccccaaggagatattcttgaaagattacaaggcacctgattattattttgacacggtggatttacaatttcaacttggtgaagaaaagaccatagttacatctaaaatagttgtatctcctggagttgaaggcatctcagctccactagttcttcatgggcatgacctcaagctcatatcaatcaaagtcaatggcactgaattaaagggtgaagagtataaagtcaattctcgccatctgatgctttcaacacctcctgctgttgtattcaacttggaaattgtcacagatatatatccccagctaaacacatcactggaggggctgtacaagtctactggtaacttctgcacccagt

SEQ ID NO: 111190 - DNA, 627 bp, Zea mays
  unsure (1)..(627): unsure at all n locations
  Clone ID: MRT4577_32897C.1
cgacctgaggaatcccaacaaggtgtactcactaatcgggggattctgtggctcacctgtgaacttccacgcgaaagatggttctgggtacaagtttttgggtgagatcgttttgcagcttgacaagataaaccctcaggtggcctcccgcatggtttcagcattttctcggtggaggcggtacgacaagaccagacaagctcttgctaaggcccagctggagatgatcgtgtcggccaatgggctctccgaaaacgtgttcgagattgcttcaaaaagcttggcggattagcttgggcggttccgaggaattgcgagtgggagtgcttaactgaatctctcttttgttggtaaaatgacaagtagagataataaacaggcgggccgaatttgcatgaactgataaaatataagtgtgatgatgcccgctttgtggggggctttggagcatgcatgcgcgctcgtctgttggaatggaactgctgtttttttttacctgctccgctgagcggaccgctgtggggcagaaaacatctgcagcacgacggctgctctctgtttcaaaaaaaaaaaaaaaaaaaaaaaaaaaaaaaaaaaaaaaaaggccggccgctcgcgtnctagaac

SEQ ID NO: 111191 - DNA, 735 bp, Zea mays
  Clone ID: MRT4577_32898C.1
cagaatctgagtcaccgtcactcaggcaatcaggatttggagaaatcagcagaccagaattgtctaaataaagatgtggagatcgaggaacgagaattgattgaagaggaccataataatatcatttataaaagcaagcttaagcaggaaaatgttgtactgaaatcagttattgaaacaagttcagcagagcagttacaggtgaataatgcaacgtcgaaggatgctacctgcaacaacagagctacaagagaatctgatgagaaacacattcttgaggtaatggaaaagatgcaaaaaaggagggaaaggttcaaagaggctattgcaccaaaaaaagaagtcggtgacaagaaagacctatcggctttagcatgcagtacagatttcatccagaatcaacggcctgctaggaaacggcggtggggtggtaattgttggatgctggaaatgccttgagagtttgtccgtgatggtttcttcaacaaggtgttctgcttatgttgctcaaaacattttactgttatgtttacttattctgatggctgggttggggaaacaaaatatagaaagcatattcttcaggcacttttatagatatagtatcttgcatagtttaagagtaaaaaggttcgacttcaaatgtaacgtgtttgtggggttctttcaaaccactggagatgatttactatcccctaagatgagatttaaatggtttcctttctgcagactgct

SEQ ID NO: 111192 - DNA, 426 bp, Zea mays
  unsure (1)..(426): unsure at all n locations
  Clone ID: MRT4577_32899C.1
cacaaacaacaaggcaccagaaaggagctcctcggcgtctgtgccgcgcggatggggggcggggtcacaaacaccncngnggggcgaggggcccccgncngcgccgngcgccgcgnggggcgggggccggcgngcgggcggcgaggcccctggggcgacggggaaaagcgcataccagacaaaagccctaaacnttgaggaggaagtttgggggggggggggactcctttttttttttntcaggagaannaacaaacacaaacggagaaagacgatagggaggaagacagtccccccccacacccaggacggcaagactnatcgccgaagaaatcaaggagggaggcgtccttccaggaaacaaggatgacaggggcaggagggaggatggtggaaatgaaaaggatgacaccacccaaggccaag

SEQ ID NO: 111193 - DNA, 772 bp, Zea mays
  Clone ID: MRT4577_3289C.1
cattgggtacctcgaggccggccgggctgacgtctccatctacacccggattcgcctttttttttcggcacgcggcacggctctccttccttcgccgccgcccgcccggccatggattccccgaggggtcccgcgagcttcgcaacgcaggccaacgccctcctccgcaagaacctctgcgttcagaaacggaacctcaagacaaacatcggcatcactttcttcccaatcctgatttgcgtgcttctcatcgtgctccagaacgtcatcaacagcgagcttgacaagcccaagtacaaatgcggttgcgtctgcctcgagaccagtgccaacggaaggtgcgtaaggaaagagtgtggcattcagtactcgacgctggatcaggtggggagctgtccgattcccagcccgccacagtggccagccctgattcagatcccccgtgctgatttccgggctgcaaggacgttctcccaaccgtttaatgatttgcctgatccattttgccgtgactcctggtcttgccctgcaactgtccttgtcactgggaaggacagagcggttgcagaagctatatcaagagggctgtttcctgtcctttctccgtctttgaatgcaacagatttactggatctcttctccaagatagtcgctggctcagatacacagccatggtacacacagttgctagagcctgcatttttctctggtcgtacattgtatgtgatccagcctgagtgcacacctgtcatgtcacagaacatttacatat

SEQ ID NO: 111194 - DNA, 1712 bp, Zea mays
  Clone ID: MRT4577_328C.1
taactgttcaccgcagagacaggcgtcttcgtactcgcctatctccgcgacccaaagcgtacccccttctcccattcttctctcatttctcgccatgcggcgtcgctaccccctttcgacaacaccatgagggagtgcatctcgatccacatcggccaggtcggtatccaggacgaaaaggcgagctgggagctgtactgcctcgagcatggcattcacgctgatgggcacatgcccgcgagacaagaccattgggggaggcgatgatgctttcaacaccttctgtcatggagactggcgctgggaagcacgacccccgcgctgtttttgttgaccttgagcccactgtcatctatgaggcgaggactgtcacctatcgccagctcttcgatcctgagcagctcatcagcggcaaggaggatgcagccaacaacttcgctcgtggtcactacaccattggcaaggagattgttgacctgtgccttgaccgcatcaggaagcttgcagataattgcactggtctccagggcttcctcgtcttccacgctgctggaggaggaacgggctctgggcttggttctctcctcctggagcgcctgtctgttgactatggcaagaagtccaagctcggtttcaccgtgtacccatccccccaggtgtccacatccgtggttgagccatacaacagtgtcctgtccacccactctctcctcgagcacactgatgttgctgtcctgctcgacaatgaggccatctatgacatctgccgccgctcccttgacattgagcgcccaacctacaccaacctcaacaggcttgtctcccaggtcatctcatccctgacggcttccctgaggttcgatggtgctctgaacgttgatgtgaacgagttccagaccaacctggtgccctacccgaggatccacttcatgctttcgtcctacgctccagtcatttctgctgagaaggcctaccacgagcagctgtccgtggccgaaatcaccaacagcgccttcgagccatcctccatgatggccaagtgcgacccccgccatggcatgtacatggcatgctgcctcatgtcccgggtgaatggggttcccaaggacgtgaacgcttgctgtggccaccatcaagaccaagcgcaccaatcagttccgtggaactggttgcccgactgggcttcaagtgcggaatcaactccagcctcccagcgtcgtcccaggcggtgatctggccaaggtgcagcgtgccgtgtgtatgatctccaactccaccagtgttgtggaggtcttctcccgcattgaccccaagttcgccctcatgtacgccaagcgcgccttcgtgccctggtacgtcggtgagggtatggaggagggcgagttctccgaggctcgtgaggatctggcggcgcttgaaaaggactacgaggaggtcggtgctgagttttacgagggtgaggccggcgacgagggtgacgagtactagacgctctactggcgcggcgtcgtcgggcttgtgtgcccctgctatcctgtgatctgccctgagtggctcctatcgtgttatgtttctgtcgggtcttatctatctgtcgttgtgtggttttcaacttatgttgtaaggctttattcccccgctttggttctgggttattaagtttggcgttattgtttaaaaaaaaaaaaaaaaaaaaaaaaaaaaaaaaaaaa

SEQ ID NO: 111195 - DNA, 356 bp, Zea mays
  Clone ID: MRT4577_32900C.1
attaaccccttatccattttaattacaaaaatttaccttttacatttcccaccaaaaatgggatgccctgaaataaaaaaaattttatcaagaatcacaagtttgaacaaattgggcactgggcttcactggttggtcctaatcctgctccccgtttcctccggggttcttttctttcttgttgccgggggagtcttggttgacccccacagggaccttcccatgggaaaggcttcattggctacccgggcatggtcccggggtggtctgtgcacctttgacttggggccaacaaacaaggctggtttttcatttttggttcccgccgcgagctgggagataacaccgacggaggc

SEQ ID NO: 111196 - DNA, 448 bp, Zea mays
  Clone ID: MRT4577_32901C.1
gggagcaaagcaaagccaaaaagggttcattcattcagtgggggaaagggggagagatcccatacatgggggggggggggggcagacctaagacatcatcagaaattcataagggaggagcctatgaccaggccctttttttgggggagggaccccccttccttgggcaagggggggggcaaatgggggaacactagccccacagggggggggtggttgacccaaaccccactcgagaaggccgagatgcatcgcacccggccttttttattttgggatcgccgcagccagcaaaattattattaggggaccagctaggagtttttttcgttcgttcaccaaggggggatcttccagcgctggggggggccctcgcaccacttccaaagcacaatctcggtaccgtcatggacccccccgggggccttgtcgccggggaaggggtcaa

SEQ ID NO: 111197 - DNA, 557 bp, Zea mays
  Clone ID: MRT4577_32902C.1
tcttttcgacgagcctggtggagttcaccagccagggcaggaacaagacggtccggctgcaggtggagcaggacacggaggtcgtcgtccggtcgtcggagacgcggaaggaggtgggcaaggtggagacggaggccaagtacccgctgtggctggagatggtgacggaggacggcgagaacgggggctacgtgatgcgggcgaacctgacgcactccctgcgcgtcgagacggacgccgaggccgaggggctgttcgatgccgagacgaaggtggcggacgagcaggccgccgtggggtggatgctcgtcagagaccacgacgtgctggacgggtccgccgccacgacgcaggcgtacaggtacagcgacgaggcggggaagtatgagcgcgccatcgatacgctggatggtgcggtgctgagcgacatcgtgacggagagctaccgggccttgggcttggcttggcttgatgctcgagctggacccgcggaagctgtcatggaattgtgacgggaagctgtttggagtgacatttgctgacggctggttttgcac

SEQ ID NO: 111198 - DNA, 281 bp, Zea mays
  Clone ID: MRT4577_32903C.1
cggacgcttttttttttttttgcggtggcacgaagtcttatggcgaagcaggcttgtctgaaactcccagagccggtacatgtccgccactacgtaatgtcagtcactgccccggcataacgccgcccgacctttattggccggtgccgcaagctcgcttttacccaccggctatggcgacggctatgggcgcgatggacgacacctgaatagcctggatcccgaccgatgctatgttcccgcttggatctcggtgtctggacgacgtaccagcggatgta

SEQ ID NO: 111199 - DNA, 538 bp, Zea mays
  Clone ID: MRT4577_32904C.1
aaaaaaaaaaaaaaaaaaaaaaaaaaaaaaaaaaaaaaaaaaaaaaaaaaaaaaaaaaaaaaaaaatttaaacataaaaacaaaacaacaacttagggaaatttcttgaaaatatccataaacactaaagaaaagaattttttttgcttttgagggggccccttttggggctatttttttgtgtttttcccctcccttggcgcggcgttttaccttgttttaagggggccaaccctgccttttccgggtttatttacatttccctgggcccccttttcacaaggtggggtagggaaaaaccgggcggtccccattttttttccctttagtgaaaccccctttttggccattgggcgcaccctgtaagggccattaatttcgccttttctagaggttcccccccttgtgtgcgattggctccccccctccctagggccctttccttcgggttttttgggtttttttcccccgggtttccctttttttccccggccctttgcaccccgtggtttccttttttggtttctttttagggcct

SEQ ID NO: 111200 - DNA, 731 bp, Zea mays
  Clone ID: MRT4577_32905C.1
aacttcacagtagctcgaagctctagttctagctagatagtaatgggggggaaaatggctccgcttctcgctgctgccaggagccacgctgcagcccgatcctggtcttaggagccacctagcaccgacccaacaatgagagttgctcgcggcaccacctgccgccgtcttctccactcagcaccaagcgaaggtgtaaccttaactttactacacgatctgcaagaggaggcagccagaatggagtccgaatgttgagcgcctcggaaatcccacatagggactgggtcccctctgacttctgcttcggcgtcgccagttcagcgtaccaaattgaaggtgcttggagtgaggatggaaagggggaaagcaactgggatctcttctgccaccagcctccggaataggatactggacgctgagcaattcagacattggagctggattcggaccatatgtactatgcggacgtcagattgctcaaggatatgggcatggacgcatataggatctctatctcttgtcccataatactgacgaatggcaccagagaacgaggtattaacccggaatggcatctggtactacagaaacctcatcaacttgctgctagatgacggcatacagccatatgtcacaagtttccactgtgatgtgcctcgagcactagaacataagtacggaggcttcgtacatcctggacataagagcattgtggatgattacacata

SEQ ID NO: 111201 - DNA, 723 bp, Zea mays
  Clone ID: MRT4577_32906C.1
aattcggcacgaggcatggaaggagggggtagcaacacgcccttctaccgcggcaacagcaccgcactcgccaccaacccttctgctgctgctgctgctgctgctgcgcgagcagaatggggcacagaaaggggacagggaggctgccatcgatgccgagatagtgagggttaacgacctaccagctcatagttcctacgccatacaccgcatgaaggtgctaaacaaacttcgtcatctgctgtccatcaaggtgagcctatctgcattctgaacgagaggctttcactaattctcacaaatgctgttgtagactcataatttctttgaacaactctatgctggtggtatgccctatcgtcctattatatgtgttcattcagcagtgtagcacaacctgctgtttcatgtattttagttttccatgatttgactgttggtaaaacacagtaaatatgcctcatcacaattaaatgatgagcatcaacattgcactagaggaagtgcgtgtgtgacacgcacatgtttatggttgtcattagagaatttatatatgatcaataaggaattaaataaataatattgagaatgagagaggttgtagattgtgataaatatattcacgtgacagaatggagtttgcaaggtagcccacccaaaatacaggatttacacatattcttctataaaaagatacaatactcttgccagtggtacataatc

SEQ ID NO: 111202 - DNA, 564 bp, Zea mays
  Clone ID: MRT4577_32907C.1
atggcgcgcagaggcatgctagtcctccagtgccgccgccaccaccaccaccaccaccgcaacaacagcagcaacagcagcagcaacaacaacaacaacaaccaccactaccagcgcagcaacagcaacaggagcggcggtcgtcccgcttctagggtcgctggaaagtccagggccccaagaccgcaaagattacaaaagggacctccagaaggtgttcgccagggagctggaggcatcgtgataggagaagaggctggccaagagggaggaggccctgagcgagagggaagccctcacaacagagctccgagccaagctaaaggccctagaccagaccctggaggcctagcgaatccagcaagtggaggctatagaaaggatgaaaaaatggtagcaggagctagaggacaagaccagcgacattgccctcgccgaggagaacctcaaggagaaagatacgtccctgaacaggcgggagacagatctcgccaggcgggagaaggatctcgccttcagggaggaaatgctcgaaaggcgaggcatgttgctggccgagcatga

SEQ ID NO: 111203 - DNA, 568 bp, Zea mays
  Clone ID: MRT4577_32908C.1
ttttttgaggtgcctaaccgtgctacacagaaactgaaacaggtgacaagaaagaaagaaagcacaccgcatctgacaacctacctttctctcaacgggaaattaacctccatctttttttactttacagcttgattgtaactcaacaagacatgagccccatttatacttgagataaataagaaaatgctaacatgtgccatgctgtcattccatggaactctaccctctaggaaagggagcctagctcagtaggttgaggatgtggatgtatgccgagaccactaggttgaagtcctcgtcgagacaaatttgggtgcccattttctcaatataaaggcatctagttcctccaaggttggtatcatttttcattccatggaactctcgcaactattgaaaattcttttatcagtgacaacaatcaccaaatagtgttagcagaattcaaccataaattttcattgctcatcactcatgtgtagtatagttacatattcatttacaattaacatggacaaagaagaaaaatgggaaacttttgaagacctaccactaccagtactgg

SEQ ID NO: 111204 - DNA, 1099 bp, Zea mays
  Clone ID: MRT4577_32909C.1
atagcgtcggccgccgcgcccaccccggcggtggtcgtgtccgcgccgacgcccgcgctgcactcgccgctcgggccactcggtgaactggtagcttgtgcttctggtgccaactttacaccacatattattaatgttgctgctggtgaggatgtcagcatgaaggtcatatctttctcccaacaaggtccaagggctatttgcattctatctgccaatggagttatcgcaaatgttacactgcgtcaacaagactcattaggtggtacagttacttatgagggtcggttcgagctgctctccctgtccggatctttcactcccactgatagcggcggcggcaccagaagccgctcaggtgggatgagcgtgtccttagcagccgccgacggccgcgtcatcggaggcggagtcgccggcctcctcgtggccgccagccctgtccaggtcgtggtgggaagcttcctcccgagctaccagctggaccagggcgccaacaagaagccggtgatagagatcacgacagtgccgccggcgcccgtcgggttcaccatctcaagcggggacatggacgacgcgtacagcggcagccagcatccaaggtcggcggcggcgaaagggggctcgacgacgacggcactgttcaaggtggagaactggacggcgcccgtgcccgcgcccgatcaggcgaggaaggcgccggcgccggcgccggaggccaaagtccccgtccccggaggctgaagccgacatcctctacctagctgcggccgaccgtcgatcgatcaggccctgcagcttgttgggaatccagtaattcgtgatccttgtaaccgacgccgtcttagtacagaagtggatcagtatgaatcacctgctgttcatcattaattaggtgtcgacattttcccggtttatatatgtgtggagcttcattacccattgtttaaataacggtgtatgtatactggttagcagtaatacagtcgtcgtagcacagtgccaattttgtgtgtgttcatctgaaacatagtaatataccccacagcatgtagtgtagtaccttttatgtcagaaaaaaaaaaaaaaaaaagcggcc

SEQ ID NO: 111205 - DNA, 380 bp, Zea mays
  Clone ID: MRT4577_3290C.1
ccgactctttcttaccaaggtagtttattatccatggatattggtggtggagtggaagaccagttagagagttgaggcaatacttcaaaactggaaaaaccaatagtgtaacatggaggaaaaaccagctcacatctctcatagaccttgttcatgagaatgaagatgctatatttaaggccctccataaagatcttgggaagcaccctgttgaggcttaccgtgatgaggttggaggggtagaaaaatcagccagcaaagctttgatctgcgttgagaaatggatggcccctaaaaagagtgatatcccttttcttttcttcccagctaaaggagaagtgttgtcagaaccacttggtgtggttctcataatttcttct

SEQ ID NO: 111206 - DNA, 275 bp, Zea mays
  unsure (1)..(275): unsure at all n locations
  Clone ID: MRT4577_32910C.1
nccttggttttttnnaaaaaaccntntnattgggacccttaaagggnaaccccccgtaaccaaaacccgacaattcctgacaaccaaaaataaaggaacaagtttctaaaacccattccatgagaaccaccaatacaacaaaaagaactaaaagactccaagacaaccatgaccgaacaaaaccaaacttaaaaaaattaataaagccaactcataagaacctgcacacaaaaacctgtccacctaacgagccaaacataataaatcacacaaga

SEQ ID NO: 111207 - DNA, 280 bp, Zea mays
  Clone ID: MRT4577_32911C.1
ggggtgggtgttttttttttttttttttttttttttttttttttttttttttttttttttggggcagaaaaactatgatagtcccaagattttgtttgggatcctaataaccagattaaaatgggtcccgcggcggcccacccttattggccggggggggggacccaaaagtcatgatgaatcccaccccgaaagggatgaatctactccccctagagctagatataagccctcctaaagagcattttcggacccctgggcggacccctgggccgacccc

SEQ ID NO: 111208 - DNA, 249 bp, Zea mays
  Clone ID: MRT4577_32912C.1
ccgtggacggcatcgtcgtgaacagcttcgaggagctggagcacggctcggtttcgcgcctcgcggcggccacgggcaaggccgtgctctccgtcggccccgtctcgctgtgcggcgccgccgcacctcctagcctcctcgactcgcgggccaactcggacgatgccaggctgtgcatggcgtggctggacgccaagagagccgactccgttctctacgtcagcttcggcagcgccgggcgcatgcctc

SEQ ID NO: 111209 - DNA, 482 bp, Zea mays
  Clone ID: MRT4577_32913C.1
ggcagagacgataaacttacgtatgaatatacatgctttactctaaccggacaacctaagatttgaaatgatatgaaacgaccaaccaagcttgctgcgataataaggatgattgactacacctgattaatagcgtgagctgactggtaagcatggcaggctgaactcttgatactttgatgtgaggacgtggacattgcccaaggtaaccatggacatggccaactagaactgtcatgacttcagtagtgactcgtgaaattggaccattgcggctgaacatggattgtctaccgtggcgtggcaagataggaacaggaacttgggcgctaacacgtacttgtaagactggttggctaacggcggctgattaactgagtcattggggagctgcgaaaaggccatgtggcagtaactggaacgctatgggcaccgaaccatgaagggctatgtgtaagcgaagcaaaggcactgtttttact

SEQ ID NO: 111210 - DNA, 631 bp, Zea mays
  Clone ID: MRT4577_32914C.1
ctcgaggcggccggtagcgaacaaatcgagtacagtcggctaggtaatctggtggtacgacgacatggcggccaccagcagcaagtcgtcgtcgtcctcgagctcggcgcagcgggcagctgccgcactgctcgtggccgccgccgtggcggtgtccgtcctggtggtgggcgcggcggcggtgtgcgacatgagcaacgagcagttcatgtcgtgccagcccgcggcggccaagacgacggacccgccggccgcgccgtcgcaggcgtgctgcgacgcgctggcgggggcggacctcaagtgcctgtgcggctacaagaactcgccgtggatgggcgtctacaacatcgaccccaagcgcgccatggagcttccggccaagtgcggcctcgccacgccgcccgactgctagcagtgtgctagccaagccaagccaagcaggaaggcccccggcattgctagctgtacgtgtctgtgtgtgcatctgcagcagggtgcaggcaggggcccgtacgtgaatttgtatctgcaggaagccaaacactactggatctctgcacgtacaacgaagcgttattattatagggacctggcgccgtctatcgatctggcattcactgattcacatgcg

SEQ ID NO: 111211 - DNA, 533 bp, Zea mays
  unsure (1)..(533): unsure at all n locations
  Clone ID: MRT4577_32915C.1
tatcccgggtncgnacccacgccgtccggtcacctgcttatgccggaaacagctgtttcttctaggagccaaagcaaggaagagcaagagggagatccaaagcagcccgcactccaaagtggttggagcaccagcggaagaggagcaccaagcccaaatgccaaaaaatccttccagcactggactgacaccgaaacaggatggtgcctggcatgactgacaagaaggctatacctcaaacacaagnactaacttccgggaggttgccatcaaagatgctgggacatgtgctaccaagagggctactcttagtggtaataagtactacagagtacaatgaatgagaacacacgatctctctgagaacctgaacaaggtagcggattcctgaaccagatggacctgagccgcaagaactcctttgtgaagatgctcatgatatgctttgagccaaccttcaagctgaagggccttagggtgtagcgcaggcaggatgctcccaagtttgccatggacgaggaatatgacatgga

SEQ ID NO: 111212 - DNA, 1080 bp, Zea mays
  Clone ID: MRT4577_32916C.1
aacccatagcgaacaacatcgagtacagtcggctaggtaatctggtgcgacgaccgacgacgacatggcggcggccaccagcagcagcagcagcaagtcgtcctcgagctcggcgcagcgggcagcagctgccgccctgctcgtggcggtgtccgtcctggtggtgggcgcggcggcggtgtgcgacatgagcaacgagcagttcatgtcgtgccagcctgcggcggccaagacgacggacccgccggccgcgccgtcgcaggcgtgctgcgacgcgctggcgggggcggacctcaagtgcctgtgcggctacaagaactcgccgtggatgggcgtctacaacatcgaccccaagcgcgccatggagctgccggccaagtgcggcctcgccacgccgcccgactgctagcagtgtgccagccaagcaggaaggcccccggcattgctagctgtacgtgtctgtgtgtgcatctgcagcagggtgcaggggcccgtacgtacgtgtctctttctctctctcatcttgtcactgcgcctagagtgagtgcagtgtgtgttcggtactaattaaatgttcttgtcgtcgtctgtgcatgcatgcaccatgttcgtgtgtcgtgacgtacgtacgcgcatgtgtgtcactacctggtcgtgtgtagtgtatgtatgtgcttgccgggcaaaagttgcatcaagctaaaaaaaaaaaaaaaatagttcttgtcgtcgtcgtctgtgcatgcatgtaccatgtcgtcgtgcatgtctattatgtgtgtgtcgtcgtgtcgatcggtacgtataaatgcctgttgttagcatgtgtgtcattacctagtcgtgtgtagtgtatgtgtgtgcttgccgggcaaaagttgcatctagctaaaaaaaaaaaaaaaaatagttcttgtcgtcgtcgtctgtgcatgcatgtaccatgtcgtcgtgcatgtctattatgtgtgtgtcgtcgtgtcgatcggtacgtatagatgcctgttgttagcatgtgtgtcattacctagtcgtgtgtagtgtatgtatgtgcatgccgggcaaaagttgcatctagcg

SEQ ID NO: 111213 - DNA, 624 bp, Zea mays
  unsure (1)..(624): unsure at all n locations
  Clone ID: MRT4577_32917C.1
tcggctaggtaatctgggtggtacgacgactgacgacgacatggcggccaccagcagcaagtcgtcgtcgtcctcgagctcggcgcagcgggcagcagctgccgccctgctcgtggcggtgtccgtcctggtggtgggcgcggcggcggtgtgcgacatgagcaacgagcagttcatgtcgtgccagcccgcggcggccaagacgacggacccgccggccgcgccgtcgcaggcgtgctgcgacgcgctggcggcggcggacctcatgtgcctgtgcggctacaataactcgccgtggatgggcgcctaccacatcgatcccaagagcgccatgcagcttccggccaggtgcgatctcgacacgactcccgactgctagcagtgtgctagccaagccaagcaggaaggcccccggcattgctaggtagctgtacgtgtctgtntgtkcatctgcagctkytgggtgcaggggsccgtacgtacgtktctctttctctctctcatcttgtcacctagagtgagtktgtstgtkcgtactaattaaaatgttcttgtcgtcgtctgtgcatgcmtggaccatgtcgtcgtgcatgtctattctgtgtgtctcgtcgtgtcgatcgg

SEQ ID NO: 111214 - DNA, 154 bp, Zea mays
  Clone ID: MRT4577_32918C.1
tcgcccactcgtccgcccacgcgttcgcatgatttggctccttattttctgttgttgttacagcccaattctttggaggaataaagtttctggtgtattgagaggtgtctttctgaaatagggagcatatcagatgcacacgtgtctttcgtgt

SEQ ID NO: 111215 - DNA, 3397 bp, Zea mays
  unsure (1)..(3397): unsure at all n locations
  Clone ID: MRT4577_32919C.1
ctcaatgagttctccgatcaaggaccaagatttagtgcccgagcacatggacaagagtgttgctcaagaaaaatccagcagtgaaggatatgaaacgcctagcgacccttttcctaccactagcatagatagggccgctctccgtgagttgcaacgtgaccctacttatgatccacgagaagctgaggaggtcatgtctgaatttcgtgcgatactcgaagaagccgtggcacgaaacgaagacgtaccggagccgacccaagacgcaccggaacagaccaagacaacaaccgagacgtcaaggaaaaggaagcagagcgatcgaaaaagaggtgacagggggctgaacaagtttcccgacaaaacatacaaaatctcagacgtgagcccgaaaggtcagccccttgctccagaagaggcactacctaagttccggaatgcacttgggtttttagttagagataatcttgacataacaatacgacagtggagagatgtgtcagatgatgtcaagaatcaaatatggaataagctattaatgaggttcgttctgcctcggggttcagaagaactcgtgaaggaatacacgatgaagcagcttgcgataaatttccgaaactggaggtctgagatgaacacaaagtttgcaaagaaaggtctggacccgaccaaaaaatataaaatctcagcaggtcagtgggcagtatttttagagcagaggagcagccctgatttcatatctctaagtgaggcaaattctgaactatcaaagaagaacaagtaccgccaccacctaggcacaggtggttacaagcgtcaggttcctaaatggagacaagaagacgccgagaagaaggccgcagggttgccgacgctgtccgagcaacttggtgaaagggcggcaaattggctccgtgctagaaaaccaagggaaaccgagaccggtgtatcttttgatgatcccattgtcgaagaagcggcaaaaaacatatatacaatggcagctaagcagagcgaaggaacttttaagccacaaagggaaagagacatcctaacggctggtctcggtaaccctgagcatcctggccgtgtacgaggaatctcgtctaaggaaggatggaaggaaggattcggacaacagtgggaaggtctgtacaggaaacgtgatcgatacaaggaagagatggcggattattttaagttggaggccaagaaagagttcaaagccatgatgtctcaaatgctatcgaatcctcctccagaattgatgcaacagttggcgagtgcgatgtctgttcaacagatgaccactccacaaatacaaataattccagcagctcaaccgccggcttccacagattgtacgacattaccaagctctgttgcttcaacgggaaataaggaccgttatccagttgatgacatcacaaggcctgtggcgtgcgcactggttataagatatggtattaacaataaacgtacaaagaaagtagccacaggccttgcgatcccaggacgcaagttccatggaaacgatattccagatgattattgcaaagtagaagtgacgacggtcgtccaaggatccgaggacgacatgctagacatccctgggcccgaaggtatcgagaaacttggacaagctatcaagaattttatcctttggcctcgaagggatgtcgatttgcttgattggtcgaattcgccgcaggcgtcgcaggcccaaccgtctccgccttctcaaatttttgctcctattgtacatccatcatcctcacctcctcaaacttcacatgctgctcctcatcctttttctgacccaccgtctccgccacaagcatcaccattcagggctccaccaccttctcctccccatcctcttggtgacccactgtctacgccaccatcaagggatccaccttctccacagccatcaaacgatccaaggccatcaaagaaatctaaacttcctattccaaaattggtgtccccgtatcagaaaaagaagagtaaagctactactgctggcacagttcggtttttgaaagggattggacggagcctcacgtcacaaactgttgatttggccgagcacgaggagtctgcaaaaaaggctgaggcaatggccgcaaagataaagaagccaactaaggcagattacaaaaacgtgcctaaaaaatatgtgccgggcagacctctgctacctcttgagaaactaagaaaggtcccggctggtgttaaaaggttgcatgactggtacatgcgggcatcatcggttggcatcgacaccatcagtgtgcatataccagaccatgcttttattggttcgaaccaaaaggccgttgttacattcgaggacatgtggttaatgatgaaccttcagagactcgacgtgcaacttgtaacgatgtttgcattaatgcaacatgatcagcaggagattctttacggtaccaagcccaatgctagtgccagtaaaagggttgggtatctcaacccaatacttatatccgaggaaagccacacttttagaatcgggaaagacaacgatgaaataaggggaaagacggacgaagaagttgagaagcgtataaaggaaatgaagaaggattttgaagctcgatacgccacatacataggacatgcaatgcttcaatttcaagacagggaagccataatggccccgtacaactttaaggaccactggatatgcttcctcatttatcctaaggttggaaaggtgctagtgctcgactccttgaacttcgacccttcgacatatgcaacattcctcagcatcttagagcttgcttatagattctataagatgaaaggtggaaagtacgacctgtcgaaaaaactcgtgccactagacatccatcatcactggccgtgccacaagcaaccacaaggatcggtcctatgtggattctatgcgtgcgagttcatgagagtgaacggacgatacatcacgaaccctgacaagcaatttcaacgaggaaacccggagaacttgaccgaagctgcattgtatggcatagtcgaggacctctgcacattcatattgaaagaggtcattcccgcagaaggaaaatatcacgatgcttccgggacattagctttgccagagttcagaatactaacagaaattagtagattatctcttagccgagatagttattagagcttaggtgaaaacttatgatgtatagaatgcatgaagcatatatggttgtaaacagaatactttgatgtatataaatgtatgatagaatttaatttcatgttgctttcaatatcaatatagatatatatatatatatatgtttgtgtgtgtgtaaataaatatatatataaaacagtattgtttgaaattttanaaaaaggcgggaaaccc

SEQ ID NO: 111216 - DNA, 331 bp, Zea mays
  Clone ID: MRT4577_3291C.1
ggacggaacttgctggacccacgcagtgcgctggccacacttgatccataggctgcgcacccaaatagatgcgatccagggacggcagtggtacgacgcggcacaatatggtcagaactagctgcgttgcacattatgatcacgagcgctgcgtattgaccagatgcgccactggtcgcgcagctagagcggccgagattgggcccgctgcgcgctgctgcaggccggggtgccctgcggttgagactccttcaacatggccacatcgaaggagcagatcatgttggtcgaggcggtagctttgttcacgctgctacccatgttgacgagg

SEQ ID NO: 111217 - DNA, 880 bp, Zea mays
  Clone ID: MRT4577_32920C.1
cattgggtacctcggcgccgggcggcgggggccagcgaaaaacatcgagtacagtcggctaggtaatctggtggtacgacgactgacgacgacatggcggccaccagcagcaagtcgtcgtcgtcctcgagctcggcgcagcgggcagcagctgccgccctgctcgtggcggtgtccgtcctggtggtgggcgcggcggcggtgtgcgacatgagcaacgagcagttcatgtcgtgccagcccgcggcggccaagacgacggacccgccggccgcgccgtcgcaggcgtgctgcgacgcgctggcgggggcggacctcaagtgcctgtgcggctacaagaactcgccgtggatgggcgtctacaacatcgaccccaagcgcgccatggagcttccggccaagtgcggcctcgccacgccgcccgactgctagcagtgtgctagccaagccaagccaagcaggaaggcccccggcattgctagctgtacgtgtctgtgtgtgcatctgcagcagggtgcaggcaggggcccgtacgtacgtgtctctttctctctctcatcttgtcaccgtacctatctagagtgtgtgtgttcgtactaattaaaatgttcttgtcgtcgtcgtctgtgcatgcatgtaccatgtcgtcgtgcatgtctattatgtgtgtgtcgtcgtgtcgatcggtacgtatagatgcctgttgttagcatgtgtgtcattacctagtcgtgtgtagtgtatgtatgtgcttgccgggcaaaagttgcatctagctaaacagtagtattacttttgcttaaaaaaaaaaaaaaaaattcgatctcaggtgcctttgtatctgcaggaagcccaacactactggatctctgcacgttac

SEQ ID NO: 111218 - DNA, 830 bp, Zea mays
  Clone ID: MRT4577_32921C.1
cattggtacctcgaggccggccggatagcgaacaacatcgagtacagccggctaggtaatctggtacgacgacccacgacgacatggcggcggccaccaccaccagcagcagcaagaagtcgtcgtcgccgtcgtcctcgagctcggcgcagcgggcagcagctgccgccctgctcgtggcggtgtccgtcctggtggtgggcgcggcggcggtgtgcgacatgagcaacgagcagttcatgtcgtgccagcccgcggcggccaagacgacggacccgccggccgcgccgtcgcaggcgtgctgcgacgcgctggcgggggcggacctcaagtgcctgtgcggctacaagaactcgccgtggatgggcgtctacaacatcgaccccaagcgcgccatggagctgccggccaagtgcggcctcgccacgccgcccgactgctagccaagccaagcaggaaggcccccggcattgctagctgtacgtgtgtgtgtgtgcatctgcagcagggtgcaggggcccgtacgtacgtgtcactctctctctcatcttgtcacctatgtagagtgtgtgtgttcgtactaattaaaatgttcttgtcgtcgtctgtgcatgcatgcaccatgtcgtcgtgcatgtctattctgtgtgtgtcgtcgtgtcgatcggtacgtatagatgcccgttgttggtttggactggtcgtgacgtactatacgtacgcgcatgtgtgtcactcctggtcgtgtgcagtgtatgtatgtgcttgccgggcaaaagttgcatctagctaaacagtagtactattaaatttgaagtaaaaaagcggcc

SEQ ID NO: 111219 - DNA, 196 bp, Zea mays
  unsure (1)..(196): unsure at all n locations
  Clone ID: MRT4577_32922C.1
ggccgcttttttttttttttttttggatacaacagcgtgaagttcttacatatatatcccagcgggctcaagcttatagtcatcgtgtacacataatttaatngccagaacgatactctaggaccaagtgtcnaggcccatctctctctctctctgcntcnctacaaagctatcctaccgctgatgcgcggctctg

SEQ ID NO: 111220 - DNA, 1393 bp, Zea mays
  Clone ID: MRT4577_32923C.1
aaaaaaaaaaaaaaaaaaaaaaaaaaaaaaaaaaaaaaaaaaaaaaaaaaaaaaaaaaagaacttaggggcacgacaacatcgagtactgtcggcctgggggacgttcgggacgctcactgataatggcgtggtggcacggaccaccaccccggggcgggggggatagcgaacaaacatcgagtacagtcggctaggtaatctggtggtacgacgacatggcggccaccagcagcaagtcgtcgtcgtcctcgagctcggcgcagcgggcagctgccgcactgctcgtggccgccgccgtggcggtgtccgtcctggtggtgggcgcggcggcggtgtgcgacatgagcaacgagcagttcatgtcgtgccagcccgcggcggccaagacgacggacccgccggccgcgccgtcgcaggcgtgctgcgacgcgctggcgggggcggacctcaagtgcctgtgcggctacaagaactcgccgtggatgggcgtctacaacatcgaccccaagcgcgccatggagcttccggccaagtgcggcctcgccacgccgcccgactgctagcagtgtgctagccaagccaagccaagcaggaaggcccccggcattgctagctgtacgtgtctgtgtgtgcatctgcagcagggtgcaggcaggggcccgtacgtacgtgtctctttctctctctcatcttgtcaccgtacctatctagagtgtgtgtgttcgtactaattaaaatgttcttgtcgtcgtcgtctgtgcatgcatgtaccatgtcgtcgtgcatgtctattatgtgtgtgtcgtcgtgtcgatcggtacgtatagatgcctgttgttagcatgtgtgtcattacctagtcgtgtgtagtgtatgtatgtgcttgccgggcaaaagttgcatctagctaaacagtagtattacttttgtttgtcttcaaaaaaaaaaaaatttgtatctgcaggaagccaaacactactggatctctgcacgtacaacgaagcgttattattatagggacctggcgccgtctatcgatctggcattcactgattcacatgctatgtttcatgtttcattgcgtgccggccggcactcgtttggggtgtttgtccctaaaagctgcttcagactactgaatacccattcccgaccaaaaggtcggttgtttggaccaacgaagagtggcaagacatgaactgctggaagcgcaagtcgcacgccgccgccgcgcccaccaccaggacggacaccgccacggcggcggccacgagcagtgcggcagctgcccgctgcgccgagctcgaggacgacgacgacttgctgctggtggccgccatgtcgtcgtaccaccagattacctaagccgactgtactcgcggacgcgtggg

SEQ ID NO: 111221 - DNA, 400 bp, Zea mays
  Clone ID: MRT4577_32924C.1
attcaagttcatgggtaatttgccttataaaccaccaaacagatagaaaaacaggaaccgggggggggcaagatcaagaaaactaggaacctaaccacagacggagcacaacaaaacagagggcacaaggggggagccctggttattgaaaacaaattggcatggacgacgccctcctcggaaacgaaaaaggcaaaaaaaggcgctcactgggcgctggcgagctgggagcgaatgagcttaccagcggagaccaagttggacagggggggcctgaccggcggggacttgcgggacaagagagccgcagcggggttcacccacaggatgtgggtagacagcaaggacaggatcttcccgaagcgggcggagatctcctcggccgacgggatcctggggg

SEQ ID NO: 111222 - DNA, 728 bp, Zea mays
  unsure (1)..(728): unsure at all n locations
  Clone ID: MRT4577_32925C.1
acgagtacaagctttntttttttttttttttttttttttttcttttttttttttttttttttattttttggcccttattcgttctggtggtgccgagtacagggctgccctgtagcccctcaacaccaattaggagacgctctcactaagagaagctaggagccagaagagaaaggctaccagcccaacacctcaggtggaagagttggaccaggagatcagggatttagaagctatacatcaccaggtgcagaggaaaagggacaagatgtttcggttagtcgaacttcaaaggaagatcgacgaagcagctgaagaaatgcgccatatcgcgcaggacgatcaaggacgagggcctcaacatagagagcttcgtcaagaaactccaatcgacattgatagatggtatgatgatctgtagcatggtaattttgcttttgattatgcttctcccctagcagcagagttgcagactaccccatggccaccttcatacaagccgccacagaaccccatgtatgatggtcactccgacccgaagcaattcctcatgagctacgaagcaaccatatcatcatatggtggcaacactactgtcatggcaaagtctttcgtcatggcagtcaggagtgtgactcagacttggtattcttcttttcggccaggaacattacatcgtggtagaagttgaaggatatgctagtcacaagctttcagggcttcaaaag

SEQ ID NO: 111223 - DNA, 422 bp, Zea mays
  Clone ID: MRT4577_32926C.1
ggccgggcccgggaccgcccacacatacatccagaacctgcgactactacccacatggatatcctcgaagcccgatccgccctagcccactcctcagctattgccacgaacacaccagaatatggcaggatcaggcatctcctacctcactgccctggcactgaactgcgccgtgacggttgcgatccctgcgcaaatctaccgccatgatgggcttgcctcactcgctgagctgatcacggggctgcctctcccctccgctaagctaccgctcctccgtcgcctgctgcagctcctaaacgcgtcggacgtgttcaccgacgacaggcagagcaccgacaaggagaggtaacgtataagtcccggctcctacctcctggtggaaaggatccctcacgaggaccacatgaaccacacctctt

SEQ ID NO: 111224 - DNA, 304 bp, Zea mays
  Clone ID: MRT4577_32927C.1
gtcattcaatggggccgactgccgcccgcccaggatatgttttttgtcggcaccaacatccggtgtcgggggcgggggcgggcgcaagcaattcttgggactggtcttgttgaagtgcaccctcaccttcctgacatgtacggtatcctagcggtgcctgtaacgtgcaatctggactggatagactatggtttacaggaacatcaactggggtagcgcatgcataaacatgctagagggtgaatgtggcccattccaacgcctgcacactcaaggatctagggaggcgggtatccttcatgcc

SEQ ID NO: 111225 - DNA, 150 bp, Zea mays
  Clone ID: MRT4577_32928C.1
cggtctcgtggtctgacgcgtgggtaaaaaaaataataagactgcaaccaattctggaaaagagcaaaaaactacgctggcaaaaaaggatacacctgacaaggtttgcagagactgaaagaactcaacgagctgtttatggatattctg

SEQ ID NO: 111226 - DNA, 1685 bp, Zea mays
  Clone ID: MRT4577_32929C.1
cgccggttccgctacggagtagggtaggccggggggcacccgcgatggggccggacggcggaggggtgatcggggccgtggtctacggggcgctggcggtgctggcggtgcggctggtgctgtcgtacaagtcggcggcgcacgcgctgcggcgggcgtggcggtgggcggacgagcgggcgcaggcgtaccagcactacgaggtgccgcgcctcgccgcggacggcgcggagaacccgctgttccggaaggcggcggcgtacgtggcgtcgctgccgtcgctcgaggacgcggacgccgcctgcgtgctctcgtcggcggccaagagcaacggcttcgcgctgcgcctggggccgggccacgccgcgcgggatgcgttcctcggcgcccgcctcgcgtggaccagcgccggcgccgaccgcctcgtgctgcgcgtgcgccgccacgaccgcacccgcgtgctgcgcccctacctgcagcacctcgagtccgtcgccgacgagatggaggcgcgccgccgcgagctgcggctctacgccagcgccagcgccagcggagccggtccctcgccggcgccgcggtggacgtccgcgcccttcacccacccggccacgctcgacacggtggtcatggaccccgagctcaaggcgcgcgtccgcgccgacctggagagcttcctcaagggccgcggctactaccaccgcctcggccgcgtctggcgcaggagctacctgctctacggcgctcccggcacgggcaagtccacgttcgcagctgcgatggcgaggttcctgggatacgacgtctacgacatcgacctgtcccgcgccggcgtcggcgacgacctccgcgccctgcttctggacactaccccgcggtcgctcatcctcgtggaggacctcgaccgctacctgcgggacggcgagacggcggcggcgagcgtgctcggcttcatggacggggtctcctcgtgctgcggcgaggagcgcgtgatggtgttcaccatgagcggaggcaaggacggcgtggacccggcggtgctgcggccggggcggctcgacgtgcacatccacttcaccatgtgcgacttcgaggccttcaaggcgctggcgagcagctacctggggctcaaggaccacaagctgtacccgcaggtggaggaagggttccaggccggcgcccgcctcagcaccgccgagctcggcgagatcatgctcgccaaccgcgggtccccgagccgcgcgctccgcgccgtcatcggcgcgctgcagcacgtggcgccgtcaccgcagccgcagcggaccctcgccgcggcacggccgccgaggctgacgtcgagatggtcggggcacttcgatgaggccagcgccgcgacgtcggaggccagcgggggcgcgggtggtttcgccaaggacgcgccgatcagggagatcaagaagctgtacggtctgatcaagtaccggagccgcaaggacgccggcgtcgtgccggtggacgacagcgcggcgtcgcagaacgggcggggcagcgacgttagctacgagaaggaccggtgatgagtttatctgggctttgctctctctcctctcttttttttttgttcttcttcctgttttcacttttgatactgatttctaagtacttattcttgtttattcgaaacgtcggggctgtacattgtgagt

SEQ ID NO: 111227 - DNA, 227 bp, Zea mays
  Clone ID: MRT4577_3292C.1
ggcactcagcggttgcacctagcttgccgtaatcacccgcacgcacatcatcacggagggcttctatctgagcgccggcccatatctcttgtagatgacgcaaaatcaatcttctgttactcctactcttctccttctttctatcggggatactcatttcctgctatgcatgcacttctctatctctcactataatatataccatatataactttatgactcgcata

SEQ ID NO: 111228 - DNA, 1707 bp, Zea mays
  Clone ID: MRT4577_32930C.1
acgccgcctgcgtgctctcgtcggcggccaagagcaacggcttcgcgctgcgcctggggccaggccacgccgcgcgggacgcgttcctcggcgcgcgcctcgcgtggaccagcgccggcgccgaccgcctcgtgctgcgcgtgcgccgccacgaccgcacccgcgtgctgcgcccttacctgcagcacctcgagtccgtcgccgacgagatggaggcgcgccgccgcgagctgcggctctacgccagcaccagcgctagcggagccggtccctcgccggcgccgcggtggacgtccgcgcccttcacccacccggccacgctcgacacggtggtcatggaccccgagctcaaggcgcgcgtccgcgccgacctggagagcttcctcaagggccgcggctactaccaccgcctcggccgcgtctggcgcaggagctacctgctctacggcgctcccggcacgggcaagtccacgttcgccgctgcgatggcgaggttcctgggatacgacgtctacgacatggacctgtcccgcgccggcgtcggcgacgacctccgcgccctgcttctggacaccaccccgcggtcgctcatcctcgtggaggacctcgaccgctaccttcgcggcggcggggacggcgagacggcggcggcgaggacggcgcgcgtgctcggcttcatggacggggtctcctcgtgctgcggcgaggagcgcgtgatggtgttcaccatgagcggaggcaaggacggcgtggacccggcggtgctgcggccggggcggctcgacgtgcacatccacttcaccatgtgcgacttcgaggccttcaaggcgctggcgagcagctacctggggctcaaggaccacaagctgtacccgcaggtggaggaggggttccaggccggcgcccgcctcagccccgccgagctcggcgagatcatgctcgccaaccgcgggtccccgagccgcgcgctccgcaccgtcatcagcgcgctgcagcacgtggcgccgtcagcgccgccagctgcgcagccgcagcggaccctcgccgcggcacggccgccgagactgacgtcgagatggtcggggcacttcgacgaggccagcgggagcgcgggtggtttcgccaaggacgcaccgatcagggagatcaagaagctgtacggtctgatcaagtaccggagccgcaaggacgccggcgtcgtgccggtggacgacagcgcggcgtcgcagaacgggcggggcagcgacgttagctacgagaaggaccggtgatagtttatctgggctttgctctctctcctctttttttcttcttcttcctgttttcacttttgatactgatttctaagtacaaattcttgtttattcgaaacgtcggggctgtacattgtgagtaatctttgtagtggtgggtagggtgcttcttggtactacagaaaccgtgttcatacaccaagtacaggagccgcaaggacgccggcgtcgtgacggtgaatgacagcgcggcatcgccggacgggcgggacagcgacgttagccccgagaaggaccggtgattagttatctgtgttttctttttttttttcgttttcacttttgataatgggttctaaagtagtagtacaaattactgtttattcgacccgtgcgtggatgtacattatgcactgtaaaaaaaaaacccacgcgtacgagaacgagtgggcga

SEQ ID NO: 111229 - DNA, 1355 bp, Zea mays
  Clone ID: MRT4577_32932C.1
cggacgcgtggggccgaaacacacgaaccgacgtgaccagatcaaaagcaaggagggaggcagcaactgccaacggcgatgatggggcaggacggcgtcggcggaggggtgatcggggccctgctctacgccgcgctggcggtgctggcgctgcgtctggtgctgtcgtacaagtcggcggcgcacgcggtgcggcgggcgtggcggtgggcggacgagtgggcgcaggcgtaccagtactacgaggtgccgcgcctcgccgtcgacggcgcggagaacccgctgttccggaaggcggcggcgtacgtggcgtcgctgccgtcgctcgaggacgcggacgccgcctgcgtgctgtcgtcggcggccaagagcaacgacttcgcgctgcagctggggccgggccacaccgcgcgggacgcgttcctcggcgcgcgcctcgcgtggaccaacgccggcggcgacggccgcctcgtgctccgcgtgcgccgccacgaccgcacccgcgtgctgcggccctacctgcagcacctcgagtccgtcgccgacgagatggaggcgcgccgccgcgagctgcgggtccacgccaacgccggcggtggcgcgccgcggtgggcgtccgcgcccttcacgcacccggccacgctcgacacggtggccatggaccccgacctcaaggcccgcgtccgcgccgacctggagagcttcctcaagggccgcgcgtactaccaccgcctcggccgcgtctggcgcaggagctacctgctgtacggcgctcccggcacgggcaagtccacgttcgccgccgcgatggcgaggttcctggggtacgacgtctacgacgtggacctgtcccgcggcggctgcgacgacctccgcgccctgctcctggacaccgcgccgcggtcgctcatcctcgtggaggacctcgaccgctacctgcgcggcggggacggcgagacggcggcggcgaggaccgcgcgcgtgctcggcttcatggacgggctctcctcgtcatgcggcgaggagcgcgtgatggtgttcaccatgagcgggggcaaggacggcgtggacccggccgtgctgcggcccggccggctcgacgtgcacatccacttcaccatgtgcgacttcgagggattcaaggctctggcgagcaactacctggggctcaaggaccacaagctgtacccgcaggtggaggaggggttccacgccggcgcccgcctcagccccgccgagctcggcgagatcatgctcgccaaccgcgggtccgcgagccgcgcgctccgcaccgtcatcagcgcgctgcagcacgtggccccgtcaccgcctccgcagcggaccgtcaccgcggc

SEQ ID NO: 111230 - DNA, 432 bp, Zea mays
  Clone ID: MRT4577_32933C.1
gaggctgacatcgagatggtccgggcacctcgacgaggccagcgtcgcgaccgcgacgtccgaggccagcgcggcggggcagtcgccgcggggcgggggaggtttcgccaaggacgcgccgatcagggagatcaagaagctctacggtctgatcaagtacaggagccgcaaggacgccggcgtcgtgccggtggatgacagcgcggcatcgccggacgggcgggacagcgacgttagccccgagaaggaccggtgattagttatctgtgttttctttttttttttcgttttcacttttgataatgggttctaaagtagtagtacaaattactgtttattcgaaacgtgggtggatgtacattctgcactgtaaatctttgtagcactagaggccttctcattaactggagtaaaacatatcaaataaaacag

SEQ ID NO: 111231 - DNA, 378 bp, Zea mays
  Clone ID: MRT4577_32934C.1
ttgccgttggtaaaagacacaagagggaggagctaccacgggccaggtcagcacacgtagtaatgcatatgttgtcgagaaggagaatctagcaccgacgatccatggaatggacatttgttgactctggctgatgaatccgggggccgtggctctgtacatgctgttacacagagttctacatggagatggagttacaggtccgatcaaagttccggtttgtgtagcacgtactgatcgatgcagcagtttcttaagtaccagcagtaggcctgcctgcctgcctgcgtgcacacgtactgtgcgtttaatctagactagaagaggatgtacgtacagagaaagttccgataagattttgccgtgcctttcgcagat

SEQ ID NO: 111232 - DNA, 370 bp, Zea mays
  unsure (1)..(370): unsure at all n locations
  Clone ID: MRT4577_32935C.1
cccccccccccccccccctttgttnttcttggggggaaaaccgggggtttttccccccccgggggaataaaacagttttttggggggaggtattccccgcttaacctccccgccgggggaacctggttgggaaattaacaagagggttctgacccgaaaaaattgaccgcctttttgggccacacacttggcctggggaaaaaaaaacacactggcgggtttccttttctaaccctatttaactctggcttaggttcttggagggcagattttaatataggtattctctggtggagctccctgacggggccccttttaagaggagaccttgtttggggtaaggaagtgcttggaaaagttttggggagct

SEQ ID NO: 111233 - DNA, 663 bp, Zea mays
  Clone ID: MRT4577_32936C.1
cctgcgggatgctgccgcacagcgcgcaagcattaacgcctttgcccgttgcctgaataatgggtgaccaccggagatacggagcgtgagttgaccatgattcaatcagtaccgatggtcctgttgactgacaatcaatgagcccgtgtgcgcacaattgccccagttatgcgcccacgaactcattagggttatgcagcaggatccatggacgatagatgaactattgggaactctcccgccggttggtgaacaactaaaccgtgatgtcagtctcacggagacgaaagaataactggcgcttcggctggcagatctgtaagaggatcatgcctacacgaagtctaagcttgtgactgtacgtggtttctcaacgaaatgactgtgaaatcactgttgcacacaacataaaagcccttggcatacattgtcatttctgcagctggtaatgaatcaaataagtcacattcaatatgggccttgctaactgttgcgtatccagaatggaaaatggcgcctgcagctgcattaattaattacgcatctctccgggataggacacctgatattgtgcactctcattacattctgctctgatgactcattgtaatccagccctcgaatgcggcaagagccgttaactcactctgacggggttgtact

SEQ ID NO: 111234 - DNA, 351 bp, Zea mays
  Clone ID: MRT4577_32937C.1
tttctttggggcaggataaaacccacctccttatgttcatacccagaatgttatgtgccacacaaaacactgggaccaagaaagtttatacccaggggagttttttcaaacacacgtggaaaaaaacaaggttttttgaaggctggagctgggtttcagaagaggaaagcgcgatcattgtttccccacatttgccaggtgggttccaccatcaggtttttcccctttccaccctagtccaggttgggacggccccattttttcgccctcaaaaccacgggcatcccgcaggggggcctaaaaatggggggaataaattccccccgggaggaggcttcccatgtctatttt

SEQ ID NO: 111235 - DNA, 385 bp, Zea mays
  Clone ID: MRT4577_32938C.1
attcggctcgagggtaggcataatgtcagttgtatagtccttaaggctcccctgcggcaggtgtgtaaaggtgaccctatgggcatcacaaatgcattggaccgataccagcaacttggccatcttgtttgtgatacacatgaagacaagctcgtacctcttcttgctgaatcaaagaatgacgggggggccgccaaattcatttatgcaatgaaagaaggctattgtgtgacgcggctggatccttgccatatctcacagctgctcagggcgggtagctagctttataaaaatgaggactggaaggaccacctgacctatcactagtatacgaaggagagggtcctagatgttagggagacagcctccatggcattggaggcgt

SEQ ID NO: 111236 - DNA, 185 bp, Zea mays
  Clone ID: MRT4577_32939C.1
gtgccacttacatgcacttttttgagggaaaaatacaatgatacatttatcaaaggcagtgaaacagttaaccctatctatgcatcaaaactaccaagtggaactgatctttcgagcctacattcatcaaaccaaaaggctgacacgcatatcaaccacattttccacaagacctgccaaagggt

SEQ ID NO: 111237 - DNA, 575 bp, Zea mays
  unsure (1)..(575): unsure at all n locations
  Clone ID: MRT4577_3293C.1
cccatctccgcccccccccacacgttccagctcactcttaaccgctgcaacggatacacctcttcattatcaatcctggcggcgcgtcagaaggggcctccattaggtgagcatcactcaacctcccatgaagaagaacggcttcgtacctcacagccccgaagcttgtcaactagatgcaggtcgtttgcctgacaaccactacacctatctcgcctccaaccccttctctccaagngacaaggttgactacagtgatctgctggaccctgtcccatgccatctcattaagaaggcaagaacggcgaaacaacaggctcctggtatcatagacaccactaaccccctggctcatgagcccggcaccatccttggccactttactatcgacatcgtcgggaatgtcttccatggaagtaacttcatccagagtgctatcaaggctattgtcatgtggctctccctaggccctgcttacttgtactatagccagcaccccttgatctaccacaagttaacatgcaaagactcacatcagaccttgacagccaaatgaaatatgtcccatctgtgct

SEQ ID NO: 111238 - DNA, 458 bp, Zea mays
  Clone ID: MRT4577_32940C.1
cctttatctgggcactctatggccttggttaaataaaagtggtatgttgttgcaaaaaaaaaaaaaaaaaaaaaaaaaaaaaaaaaaaaaaaaaaaaaaaaaaaaaaaaaaaaaaaaaaaaaaaaaaaaaaaaaaaaaaaaaaaaaaaaaggggaaaaaaaaaaaaaaaaaaaaaaatttcccttgggccgaaacaaccttaggggaaaattttaaaaaattcaaaaaaactggggccctttaagacttcctttaaagggcccaaattcccctaaaaggaggcggaataaaaataaaatgcccgggttttaacaacgtgaaagtgggaaaacccttggggttcccaaattaaatggctttaaacaaaaacccctttttccaagggggtttaaagaaaaaaagccccccacagatgccctttccaaaatttggcaacccaaataggaaaagggaccccc

SEQ ID NO: 111239 - DNA, 741 bp, Zea mays
  Clone ID: MRT4577_32941C.1
aattcggcacgaggctcgcctcgttccccatttgctgcgtctccttgcccgcgccgccgctcgccgtttgcccctcgtctccgcaccgcgcgctgttgctgcggacgacgactcatgtgtcgggtattgccctcttggggccgtgggaatcagacgactagatctgtgcggatccgaccgattggggcgcggcgcgggcatccggaacttcacctcgcgtgcttacgctgacggcggcggccctctgtattttactgggttggagatccgtccatcccaacttgagtcgatttatgtctgatttcttttgttgctcgtgtaggcgaacggacggaaatttgggtggggagaaattttcgctttttaatggtcttagctatatagatatggatgtttgtcgtggtttgaattgcaccgtacacattacacatgacactgtcactgtaattctggtgagagagattcgtattgacgcatgtttttgaagaaagattgtggatgtaatgttaatgtgggatggaggtcacttcaagtatggcgagattcatattaacactgtcacttttaagcccagtgactttcttatttacactttcattgaagcttttatgttaatcattcatggtttgaaatgttcccatgcatatgccgctgttactgtaagactaatagtaacacttgtttcatgaagatggatactggatataatatactggtaacataacctgctacggattcggg

SEQ ID NO: 111240 - DNA, 406 bp, Zea mays
  unsure (1)..(406): unsure at all n locations
  Clone ID: MRT4577_32942C.1
cccacgcgtccgcggacgcgtgggctaaccctagacgtcgcccggccgccgccatggaccccgacggcgacccggccttccaccgcaacgaggccatctccgcggtccaggatgtcgaccagtactatggcgacgacgacgacttcgacgacctctacaacgacgtcaacgtcggggacggctttctccacgcctcccaccaggcgccgtcgccgctgtcgtcgtcaccttcgactcagcaggccccaccgtcgcagaagcaccagctccctccggcgtcccagcagctgccgccgccccagcagcatccacctgcccacgtnctcccgccaccgccgtcggaggccccaccggcgcagcagcaggtaagcatcccgggggtggccggccctgctcctggcagacc

SEQ ID NO: 111241 - DNA, 760 bp, Zea mays
  Clone ID: MRT4577_32943C.1
gttagtcatttactcagattcccatatttatcagacctgatagtctgtacttcagtccatcttgtgcagcaaaaatgacggctggctacattgttggctcactggtcggatcctttgccattgcatacctgtgtgacacatcgcctcctgacccgtatggcatgtctccgttagtgtcatcctcaatagatttatgtttgatatctgtgcttcaaccctgtagatttggatttgatctggatcagcctttgcgggcacataggtagcacccccaagactgtttctgagaaggagtggtggcaagccacagacaccaagttccaggcctggcctcgcactgctgggccaccggttgtcatgaaccccatcagccgccagaacttcatcgtcaagtccactgagtaggtttgggctggagaagctggttctgcgacttggtgccgccatgaagccagagttccttttctaaggtcttaatcaattgtaataaaacgaaatacagtcaggatttttttgtgatttttacttgatctgtgagcgaacactgggtctttcaccttgtcatccaatgggttctgctccttggtgaaatctcccaccagccagtaaagaactgggttgttttcataatatatgcttttgctacgcagcctctgctgttgtaaggaattgcattgttatcttatatcactgtatggtgatgtttaaaaaaaaaaaaaaaaaaaaaaaaaaaaaagtactctgcgttgttaccactgct

SEQ ID NO: 111242 - DNA, 1995 bp, Zea mays
  Clone ID: MRT4577_32944C.1
gcctcgttcccatttgctgcgtctccttgcccgcgccgccgctcgccgtttgcccctcgtctccgcaccgcgcgctgttggtaattcctccgccccctgctcccattggtttccgccggttcgctcccctcaccaggcatcgggggtcttctctgatctaatctctggtagctgcggacgacgactcatgtgtcgggtattgccctcttggggccgtgggaatcagacgactagatctgtgcggatccgaccgattggggcgcggcgcgggcatccggaacttcacctcgcgtgcttacgctgacggcggcggccctctgtattttactgggttggagatccgtccatcccaacttgagtcgatttatgtctgatttcttttgttgctcgtgtaggcgaacggacggaaatttgggtggggagaaattttcgctttttaatggtcttagctatatagatatggatggtttgtcgtggcacgagcggcaccgtacacattacacatgacattgtcactgtaattctggtgagagagattcgtattgacgcatgtttttgaagaaagattgtggatgtaatgttaatgtgggatggaggtcacttcaagtatggcgagattcatattaacactgtcacttttaagcccagtgactttcttatttacactttcattgaagcttttatgttaatcattcatggtttgaaatgttcccatgcatatgccgctgttactgtaagactaatagtaacacttgtttcatgaagatggatactggatataatatactggtaacataacctgctacggattcggggttcactcgtttgttgctggaaaaaaactgtttgtctttctgctaacaatgaaatgttatagcttccccgggcttttgtgttggcgatttatctgttgctaggctatatgttctgtttatttgtgttatttgtgaggaacagtctataggtttgccttgtctacaatgcatctgcatatgttagtcatttattcatgattccattatttatcagacctgatagtctgtacttcatcgaacttcctgcgggacgccccggcgacgccaggcagtgtgagatccgaaagaccggccgccgccggcccgggggggatcgccattcgccacaaagccatttgaaccccccacgtctcctcgcctcgttccccatttgctgcgtctccttgcccgcgccgccgctcgccgtttgcccctcgtctccgcaccgcgcgctgttgtccatccttgtgcagcaaaaatgacggctggctacattgttggctcactggtcggatcctttgccattgcatacctgtgtgacacaattgcatgaaggccgctaccgtttatctctgacaagaaggcatttggaggtagcacccccaagactgtttctgagaaggagtggtggcaagccacagacaccaagttccaggcctggcctcgcactgctgggccaccggttgtcatgaaccccatcagccgccagaacttcatcgtcaagtccactgagtaggtttgggctggagaagctggttctgcgacttggtgccgccatgaagccagagttccttttctaaggtcttaatcaattgtaataaaacgaaatacagtcaggatttttttgtgatttttacttgatctgtgagcgaacactgggtctttcaccttgtcatccaatgggttctgctccttggtgaaatctcccaccagccagtaaagaactgggttgttttcataatatatgcttttgctacgcagcctctgctgttgtaaggaattgcattgttatcttatatcactgtatggtgatgtttaactagtttgttgatgtgccgcttgtggttgtggtttcctgtaggctgttatgccaatctaactcttggctcatttagacctaacctggtcaaattcttatgaatcaaacccacggtcatctctgacagccagctcaaaaaaagaaaaaattaataaaaaaaaa

SEQ ID NO: 111243 - DNA, 442 bp, Zea mays
  Clone ID: MRT4577_32945C.1
ttaagcaggtggtaacaacgcagagtacgcgggtaagtgcccgagactggtaagacaaggggtattcagacaatcaagaaaccacggtgcggctgaggcctgaggcagtcctctcaaaaaaaaaaaaaaaaaaaaaaaaaaaaaaaaaaaaaaaaaaaggcaaaaaaaaaaaaaaaaaagaaaaaaaaaagggtctctgggggtgtaaccacagcttaagggcaaaatccagaaaactgggggccgttacaagaggatccaagttcggtaccaaacttggagaaaaaatggtaatagatgtttcctgggtgaaattgttagttgttgaaaatttcaaacaaaataaaaggcggaagaaaaaaaggaaaagactggggggcctaatgagggaggtaattaaaattaattgtgttggggtaattgactgttttcaatacgaaaa

SEQ ID NO: 111244 - DNA, 198 bp, Zea mays
  Clone ID: MRT4577_32946C.1
gaacgcaaagggtgtacacatatggaaacgcaaacgcagcggacaatatagaaaggcgaggggagggtccacaataagattggcgaaaggggcacacgctgaaaatggccaacatgtctgaaacagaagatggcaaaacaccatggaaaaacacaaaaaaatgcccgagggctaaagcttaaaatgcaaactgggaga

SEQ ID NO: 111245 - DNA, 137 bp, Zea mays
  Clone ID: MRT4577_32947C.1
gatgcggtggacgccttcttaaccgcagtggccaccaaccagccacccaagatctttgtggcacacagcaagtttgtcattcttagtgcacgtaagcttgtgttcattggggacacactgtcacggcaggcaaaggc

SEQ ID NO: 111246 - DNA, 187 bp, Zea mays
  unsure (1)..(187): unsure at all n locations
  Clone ID: MRT4577_32948C.1
gtactaccctcttagtttaatcatttaaataatcgcatgataataaacttgcnaggattcccctattggcggggagccaacccctatcagcccagcttgataatcttgcgtcctcaccgccccaattgtattctctagatgcgtcctcagctacttactcagcccaagttctctgtaaagagactcc

SEQ ID NO: 111247 - DNA, 598 bp, Zea mays
  Clone ID: MRT4577_32949C.1
tcgagcggccgcccgggcaggtgaaaaaagtaaaaaaaaaaacaaaaaaaaaaaaaaaaagaaaaaaaaaaaaaaaataaaaaataaaaaaaaaatcacactaaaaaacaaattcataaaaatttccttaaaactaaaaaaacacataaaacatacatttttataacccaattaaacacctataaaaaaataaaaattaaaatttttttccccttccccttccccccctttggggctgtttttttccctttttcttccccccctttgggccccttgcaatttttttttaatttccccatttcccctttttgggaatttttttcaattcctctgccctccttttaaaaaccccttctttgtaaaaaccctgcgttcccccaattttttcctttttcacaattcccctttttcccacttgcataataaccaaaaaacttcccaccattttattttccaaaaatttggatttcttaatttgctttttccccccccttttcggctttttttatcccccgtgttttttggggtttccctccagggttcccctttttttttttttccccttatcccccccttttttgtttttttcccttttttt

SEQ ID NO: 111248 - DNA, 691 bp, Zea mays
  Clone ID: MRT4577_3294C.1
atctccgcgctccgctgccacacgtgactcatccccctgtgctcacctctctcgctctagttctcctggcggcgacgagctgcccgagcgccaccacccttgactaggtcgtcgctgacctcttccccggccacgatggtacatctgggccctactgaactgactaggcagcaataatagacactatgtggctgcttctcctacttcagggaactggaactccatgcagtgacagtgaaggtcaagaatgattaggagatccttgctacgctccactcagaagaccactacctcaacatgaggctcgagaacacccgctgatgcgaccactaccactagtcgcagatgcttttcctgcggaactgcttcataagaagatcaggggtgcgatacgggatgctcccggacgacgtggtgtacatccacatcctccacgactgcgccataagggagacgagcggatgttgatcctgatgcgcaaccgatccctcacctgactgattgctgcttcatccctgattgtacataagcatgcatgacacgaagagcgttacacagaggcccccgattagtactttgctgctcggctgacatatatatgccagactggatgatgacctgaatcacctgatatattattgccatacaatatgcgaaggcctggcatggtgttgctatatgattactatgc

SEQ ID NO: 111249 - DNA, 274 bp, Zea mays
  Clone ID: MRT4577_32950C.1
gtgctgcacgtatactcttctataggtacctaatcaattcactggccgcgttacacgtcggactggaaaccctgcgtacccactaatcgcttgacacatcccttcgcagtgcgtatacaaaggccgaccgatcgccttcaacagttgccacctgatgcaatggaccgccctgacgccataagccggcgtgtgtggtaccgcacggccgtcactgccaggcctaccccgtctttcgttttcttcttttgcacgtcgcggttccgtaacttaatgg

SEQ ID NO: 111250 - DNA, 344 bp, Zea mays
  Clone ID: MRT4577_32951C.1
tgcacgcgcgcgtgagctcggtatgcgtcgtggggttcttctatggatttttttgtcaggaggagagagaaccgggagggccattttaggatcggttccctgcgaccagagggaaggggtattcccccccgatggagtacgattgacaggcggtctgatatgggacctccaatgctccgagagagattaacagcggcgtgtactgatgttcctcaagcgtcacaagatgtgagtggtccaggcgacgctaggggtcggtctgatggggacgtactggcctggggcggactgcggtgaatctcatttatagggttggccttcgcccgacctggacttgcagcatg

SEQ ID NO: 111251 - DNA, 307 bp, Zea mays
  Clone ID: MRT4577_32952C.1
gtacaaaccacaaaccagccatctgcatgctaatccagctggaaaacagactgatcatgcttccgcataaagtttaagaaagaaaacctgatcctacagggactagtcctagctatgcatgaccactcgaacactcgtccaatacgccacattttctacaggggtacacaaataaaacacgctgctgcaaacacaaacggcacagacaaccctcgtttttatcttcttagctcttctcacatgacgaggagaagcgaaggctacattactggaaatgtgtagtacccatggcaagtttattttccac

SEQ ID NO: 111252 - DNA, 625 bp, Zea mays
  unsure (1)..(625): unsure at all n locations
  Clone ID: MRT4577_32953C.1
ggtacccccgggttcggccgggccgggaccagccggtgttggtttcagcttgtattcccactctgtcgcacagcgtcgcccgtcgccgctgagatcctaggaagaaatggagctctctcgcaagctcttcacggccgtcctcctcgtcatgctgctgctgctgtccgcagaggtcgggccggtggcggtggcggaggcgcggacgtgccagtcgcagagccacaggttccggggcccctgcctccgccggtccaactgcgccaacgtctgcaggaccgaggggttccccggcggcaggtgccgcggcttccgccgccgctgcttctgcaccacgcactgccactgattcgctcgcccagcggccggctggcgtcgccgtcgatcgcgtcgcgaccagtccatggctccatgcatgaataacaagggtgtgcgcggtttgtgttgtgatgccaaattgtatcctcgtcgtgtgttgagcagcggcgtgctgttgtacgtacgtctgcctctgttccatgtttcgggattttccatagcaaatgcatgcgtcgatcgagatctaaaacgaatnaaatacaaaaaaaaagaggtcctaacagttccgccagctagcatggggtgagcc

SEQ ID NO: 111253 - DNA, 264 bp, Zea mays
  Clone ID: MRT4577_32954C.1
gataaaaaatatatcaaatataattgaattatagtatacaaagggagcggtgaatggttggaaaccttctaaatgtaggagtatcttttgaggtaaagtagtaaaatataatagaaagtacagataggaggagaaatatgaggggaatggttggagatggtctcacaccacagacaggcaaattaggatttaggcaaccatcacattcagacaggagggaaagctaagcatgaaatctggtaccaaaaaacagtaggccggata

SEQ ID NO: 111254 - DNA, 1125 bp, Zea mays
  Clone ID: MRT4577_32955C.1
gggtacccccgcgtccgcctgggcaagcgtctgttcccacactcggacccgccggtgttggtttcagcttgtattcccactctgtcgcacagcgtcgcccgtcgccgctgagatcctaggaagaaatggagctctctcgcaagctcttcacggccgtcctcctcgtcatgctgctgctgctgtccgcagaggtcgggccggtggcggtggcggaggcgcggacgtgccagtcgcagagccacaggttccggggcccctgcctccgccggtccaactgcgccaacgtctgcaggaccgaggggttccccggcggcaggtgccgcggcttccgccgccgctgcttctgcaccacgcactgccactgattcgctcgctcgcccagcggccggctggcgtcgccgtcgatcgcgcgctcgcgaccagtccatggctccatgcatgaataacaagggtgtgcgcggtttgtgatgccaaattgtatcctcgtcgtgtgttgaagcgttcgatcgtcggtctagtagtgtgcctgtgagcagcggcgtgctgttgtacgtacgtctgcctctgttccatgtttcgggattttccatagcaaatgcatgcgtcgagatctacatctaaaatttttttaaaaaaaaaaaaaaccagcggccggctggcgtcgccgtcgatcgcgtcgcgaccagtccatggctccatgcatgaataacaagggtgtgcgcggtttgtgatgccaaattgtatcctcgtcgtgtgttgaagcgttcgatcgtcggtctagtagtgtgcctgtgagcagcggcgtgctgttgtacgtacgtctgcctctgttccatgtttcgggattttccatagcaaatgcatgcgtcgagatctacatctaaaaaaaaaaaaaaaaaaaaaaaccctaaagacggctggcgtcgccgtcgatcgcgtcgcgaccagcccatggctccatgcatgaataacaagggtgtgcgcggtttgtgatgccaaattgtatcctcgtcgtgtgttgaagcgttcgatcgtcggtctagtagtgtgcctgtgaacagcggcgtgctgttgtacgtacgtctgcctctgttcatgtttggggattttccatacaaaagcctg

SEQ ID NO: 111255 - DNA, 541 bp, Zea mays
  unsure (1)..(541): unsure at all n locations
  Clone ID: MRT4577_32956C.1
cgtccgggctggtcctcctcctttccccgggccatcctcgaggcatcgccggggccgcaacttcgttcaggaggaagcccgctcccggccccgatccgatggtcaacaggaacctcccgcggggtatcatcaaggagacgcagggactgttcagcgagccagcgccggggatctgggcggcgacctcggaggagaacatgcgctacttcaacgttctgatccttgggccggcgcagtggccctatgaaggtggagtttttaagcttgaactgtttttacctgtggattatcccatggttgcgccaatggttaggtttctgaccacgatttttcatccgatcgttggcatgcttggtnggatctgcctggacattctgagggccaaatggngccctgcacttgngattcggacagttcttgtgcgtctgcaggctctactgngtgctccaaatccagatgaccctctctccgatcactttgcatcgcactgggaatccactggggtagcagctgttggatcagctccggtgtgggctcgcct

SEQ ID NO: 111256 - DNA, 1691 bp, Zea mays
  unsure (1)..(1691): unsure at all n locations
  Clone ID: MRT4577_32957C.1
naggcnncggccgggnaaaaaaaaaaaaaaaagtggtttcaagcccatcatctcatgcgattgaaccagttgcgccgaaatttgctcatgctgatccaggctaaacggtccagtcaggtgagctcagcggctcagcccatgtaggcagtcagcctctcaggttgggagttgggactcaggagtttcaccagatttaaagctccgtaagcatatgctgctgattcgccggtgatcccctccctccttcgccgtcgccgtcgccgtcgccgtcgcaccagcttggccgccgcctctggatcgccgctggactcgcttccctgacccagaagctacgatgaattacatcatcggcgcattcaagccgccctgcgacatcttcgtcacattcgccgatgagagaacccggaagcaggtccagatcaagaaggacaacgggaagactgtcatggtgccgaccttccagacccttgagaccatagccggagaggtgtcgatcgctccagtcccaggtaaaaggcttgaacacacgggtgtgaagattgaactgctgggtcagatagagctgtattttgacagaggcaacttctacgacttcacttcaatagtgcgtgaattagatgtccctggtgaaatatatgaaagaaagacttatccatttgagttttctactgttgaaatgccatatgagtcatataatgggacaaatgtcagattgaggtacatactgaaagtaacaattggcagaaattatgttggcagcattgtggaatcgcgggacttctgtgtaagaaactactctctagttcccacaatcaacaatagcatcaagatggaagttggcattgaagattgcttgcatattgaatttgagtacagcaaaagcaagtatcatctcaaagatgtcatcataggaaagatatattttcttctggtcagaataaagataaagaacatggagcttgagattcgtcggcgtgaatctacagggtctggtcctaacacatacgttgagactgagacactagcgaaatttgagcttatggatggcgccccagttagaggagaatcgattccggtgagactattcttgacgccgtatgagctcaccccaactcatcgcaacataaacaacaagtttagtgtcaagtactacctaaacctagtcattgttgatgaggaagaccggaggtatttcaagcaacatgagatcacaatgtatcgccttctagaaaccccgcaatcttcataggctcctttccttgctttctatgagttggaaccagagctagaggcattttggtttaaccttgcacgaggacgccaaagttggtggccttacttttggtcccgccttgtacataactctcccgatggagcaatgcagttcttaggtaagagacataaaaatgcagttctaccatatggtgttgctttgttactgcctttgtttgaagctactcaggataaagtcatggaaatgtttgtcttaggtaagagacataaaaatgcagttctaccatatggtgttgctttgttactgcctttgtttgaatctactcgggataaagtcatggaaatgtttgtatcaacgtgccttccccttgtttctttcttgtccttgctggacttgtaaagctttggatgattctcccatgtgtatgatgatgatattttcaaaaaaaaaaaaaaaa

SEQ ID NO: 111257 - DNA, 1503 bp, Zea mays
  Clone ID: MRT4577_32958C.1
gggcatccgccgatgagagaacccggaagcaggtccagatcaagaaggacaacgggaagactgtcatggtgccggccttccagacccttgagaccatagccggagaggtgtcgatcgctccagtcccaggtaaaaggcttgaacacacgggtgtgaagattgagctgctgggtcagataggtgccctagtgcgatctagggagccatataagtgtggcagtcgtccagtcgatccagttcgttgaatgaactgtttgttgagaaacgatttgtagaagtgtattcacagtcagagttttgttcaatttccattcatggtgaacccttgggctactgacaaattgcaaatatttggaagatgaagcaagagcaactgctgagaactgatccttgttctccaaccataagatataatgctgctcttcgacactttatatctcttgataggttctaacaaattttgtgtgccattgtttgtactacagagctgtattttgacagaggcaacttctacgacttcacttcaatagtgcgtgaattagatgttcctggtgaaatatatgaaagaaagacttatccatttgagttttctactgttgaaatgccatatgagtcatataatgggacaaatgtcagattgaggtacatactgaaagtaacaattggcagaaattatgttggcagcattgtggaatcgcgggacttctgtgtaagaaactactctctagttcccacaatcaacaacagcatcaagatggaagttggcattgaagattgcttgcatattgaatttgagtacagcaaaagcaagtatcatctcaaagatgtcatcataggaaagatatattttcttctggtcagaataaagataaagaacatggagcttgagattcgtcggcgtgaatctacagggtctggtcctaacacatacgttgagactgagacactagcgaaatttgagcttatggatggcgccccagttagaggagaatcgattccggtgagactattcttgacgccgtatgagcttaccccaactcatcgcaacataaacaacaagtttagtgtcaaatactacctaaacctagtcattgttgacgaggaagaccggaggtatttcaagcaacatgagatcacaatgtatcgccttctagaaaccccacaatcttcataggctcctttccttgctttctatgagttggaaccagagctagaggcattttggtttaaccttgcacgaggacgccaaagttggtggccttacttttggtcccgccttgtacataactctcccgagggagcaatgcagttcttaggtaagagacataaaaatgcagttctaccatatggtgttgctttgttactgcctttgtttgaatctactcgggataaagtcatggaaatgtttgtatcaacgtgccttcaccttgtttctttcttgtccttgctggacttgtaaagctttggatgattctccatgtgtatgatgatgatatttgcgtc

SEQ ID NO: 111258 - DNA, 349 bp, Zea mays
  Clone ID: MRT4577_32959C.1
cattaacgtcaaacatgcctggtattttatagaaccagaatattaaggaaaaaacacggaaagacgagcatcttcagttcaaagtaagaccgttctagcatgggtgcccatataccaagggcaagagtatgtttcccgaagccggacctagaattttgtggaccggctgtcccataaggactaaaaagtttgtataagactggacggactttggggtataaaaaggaagggcctccacgaccacccaggaactggtcaactccgccttgatgtgtatcccagcgccccaaagtcggaattacaccgggttctgaaccgacggcttgaccctgttggtgaccttcgtcca

SEQ ID NO: 111259 - DNA, 858 bp, Zea mays
  Clone ID: MRT4577_3295C.1
gtacctgatccctgatacatggccccgtcccaaccgtttgcaaccctaatcgaatagctcgtctcgtctgaccctttggctagccgccctcatcccctcacgcccaagccgccgccatcctaccgttccctcccggcgctcgcctagtagcatcacccggtggggccgacaacggaaggctgtggcgccgtgcggggctgcgccaggcgacaagatgtacaagatggtcaactccatctacttcgatgctgccgactcctgccgctccttcttcaacgacggtggtgtcgcggcaagaggcgtcttcaactattagggggtccgaggtcgcgatctgtagcttcggtcaggcctccacggaccacttatccttcgatgcaggctcgacacccaccacgacgtccaactccatcctgaccgcctcgaagtcaaagccacccgatgagatacccagcaagctgctgcggtcggcgttctcggcttccgccccacctccaccttcaacgactcggcaccccaaagccatgaaggcccgcattctcgtcagaggcttcggcatccgcctgcgcctgttgacgctcagtgtgcccaagccgttggtggatttcagcgacaagcccttgatcatgcactaggttagcacgatcgatccttatctggtacaaatttcagttccttatttaattcattagatacatcgtagggggaaccaggaagttcgtttttaggaattggccatggttgaccaatctgagttgttacagtgcaagatgtaatgcaaatgtaatttatggtctccaaataatgcttttataaggtggatccatatgaatggattcccacagaaatattcatctc

SEQ ID NO: 111260 - DNA, 357 bp, Zea mays
  Clone ID: MRT4577_32960C.1
gttcggcgaacagaccaaacaattaagcaacagattaaatacagggcagaagtatagagatccaaaatctgcaatccccccaatgcgtcctgttctttctgcacaccagttttacagcaggatacctgtggttaaacaatctatatatatactgcaccagggtacgtggtttcctgaagatgcttttaggccatccagtttatctttgtttaaggacgaaaccagaccccctgtgccactgtattccctctcgactaagcatatattcctctgaaccgaatctatgtagcaattatgttgtgcgctatctgtttccctttgcagggtccatcaggccatcaccggtcacttaaaagc

SEQ ID NO: 111261 - DNA, 437 bp, Zea mays
  Clone ID: MRT4577_32961C.1
ttccattcgtcatcgtagagggcgtcatatactgcaagagctgcaaggggaagggctacaacaccggcatagacgcgtcgccactgcaaggggccacggcgatgatggtgtgctacgggcggaaggtggtgaacgcgacggggacggtgaccgacgccaacggctacttcctcatcatgttctacgacatggccagcttcagctccaagacctgcaagatgtacctggtctcgtcgccgacgccgcagtgcagcaagcccttctacccgcccaaccagtggatcgggctctccctggtcagggagaccaggacggtcccgccggcggggctgcagggcatctacacccccaccagcgttctcttctacgcccccgccgtcaaaggccagtgcccctactgatcaccacatgacacgacacggcctcttccgacaccg

SEQ ID NO: 111262 - DNA, 430 bp, Zea mays
  Clone ID: MRT4577_32962C.1
aatgcattgaaaacaattgaggaactaacaagaaaagagtcagaaaaagtggacagggcagtgctgaaggaactgagtgaaaaactggaactggcagagaaggctctggcttccaaacagctgcaaatggatgaaatgaagcaaaccattgccaagcaggaagaggacctggaaaccatgaccatcctcagggctcagatggaagtttactgttctgattttcatgctgaaagagcagcgagagagaaaattcatgaggaaaaggagcaactggcattgcagctggcagccctgctgaaagagaatgatgctttcgaagacggaggcaggcagtccttgatggagatgcagagtcgtcatggggcgagaacaagtgactctgaccagcaggcttaccttgctcaaagaggaactgaggacagggactggc

SEQ ID NO: 111263 - DNA, 378 bp, Zea mays
  Clone ID: MRT4577_32963C.1
acggacacttttttttttatttttttttttactagggaatttgatgttgtttttgctgttaacattgcacctgaagcctccaaagcagcgacgtatccttgtatgaaaaaaagaaggaggcgtacctgaacctacatttgttcgaaatcctgttatatggtatgcaaaatgcacaatactgcctgaggaaaagaaaccccatgcgcccaaccactccttttacgtcttataaagaaaccgtttatggtctcgagtactctgcacccagcggtaaaaccgaacttttacaattgtgtggatatgcatacaaactttctgcctgccccatacacctttttacagcgcttgataacaccatttgcatgaggcatgataaca

SEQ ID NO: 111264 - DNA, 291 bp, Zea mays
  unsure (1)..(291): unsure at all n locations
  Clone ID: MRT4577_32964C.1
cngacccctaggcngacacttgggtttttattcattagtttgtcccttgatatccgatggttttaagaaaatggtgtgttaatctgcttttccacaggcttaatgctatctggacgaggtccttttatgaatcttgatttggatgctcagctctttcatacgtctactcctaatcaaaatcccatcacatttcatgttattggtagacctcttgaaaactctggtgtttaatcagtatgtcactgcggataacgctgtcaaaagtaaaaaatacacaatgtttaaagaaat

SEQ ID NO: 111265 - DNA, 2299 bp, Zea mays
  unsure (1)..(2299): unsure at all n locations
  Clone ID: MRT4577_32965C.1
agacaccactgcgccttggccgctagagccaccagaagagcttgcagttactgagagtgtgtgtgagagagaggatgggtggcagcggcagggctgctctgctgctggccctggtggtggtggccgtaagcctggccgtggagatccaggccgacgccgggtacggttacggcggtggttacaccccgacgccggcgccgggcactcccgaccctgaagcccgagatgcctcccaccaaggggccgaagtcggacaagccgaccatggtgcacatgccggccaaggagcacggtcccatgccggagaagtcgtccaaggagcacaagccgacgccgcccacgtacaccattggtaccctcgaggccggccgggccgcgtcagcggccggcgcgtttctcctcgccctaaactaaaaaaaggtaaccgtccccgaagcccaaagccaaaaattcccccaccccaaggccgcatcctcctgcagcctgctcgaaaccctccttcctcctcctgaattcgtcaaccggtctcccaaatcggagcggcaatcggattgttgggtctcgagactgagctgtgctccagtccgtgagctattcgttgatttttccagcgtgaaggcgccgatttttgggccgttggctgtggtggccggttcggcgtctctggatccggctggcttcccgcgatagatcgggccattggagcagcacaatacttcggattcttgaggtgtccgtagctgcactcgcggtgaccttttttgaggaagccggttgaattcgtagacctgaagatttattagctggcccacgccattttcggcaataaaatattcggctgtttcatagcaatttcagagtccttctcaatcttctgaagaagcgagcagagacggcttttgaaccgggcgatgcaggccaaggctcggatccacgctgacccggtccatgagtttgaccaattcgactgcttgcacgattctcttgtgctgctgatcctgaacaagctcgaacaagctcgaggacgtgcgttcactcggcaggtgctctgccgtgtccaagcgattcagtggcctggttctcctcgtccatgatgtgcgtgtcaagatcgaccgcgttgtgaccatggacggcgactccgccgatgacgctctgaacctgtcgtcaccgaagccccacaacatcatctcgcatctattcaagatgatgctggtcgcgatcgcccagccctttcatgacatgcggagccccagtagcgcagggcggctgctgttccctcagctctctcagcattcaccggtgcaggtgctgaagaacttctcccatgttcgcaatcttcaggtagagctcccctccggagatgttgcagtcgaggagggggttctgctgaagtggcgggctgaatatggcagcacacttcagagctgcgtgatccttggtggaaccttggttgatcgcaaggccgctggcagtgggcatgagccatcaccggatgacaagggaagcatgccagaatctttctataccaatggtgggctgaaactccgtgtcgtatggactatcagctgtttgattgccgcgtcgacaaggcactatcttctccggtcgatcatcaacgaccatccgacgctgaggagcctggtcttggcagatgccgagggacagggcgcactctccatgggggcagagcagctgaatgatttcagggaacaccaattgtcagcctcaccatgttctaacaggacgcaggtgccggcatgcaacatgaagctgaagtacgctcagtacctcgaattgcctggtggcttggcactgcaaggtgcaaccttgcttgtcaccaagcctgccagcgatggtcatggcaatcgcaaggaagttgaagcctttgtttcaagcgcgttcgatggacccttgaggtttgctgcgaaggcgctgatgaagaggcgcacctatctcctggagatgaatgggttctagagaccttgtttttttggtgcttcttatgaggaactcctgtctgtctggtctttgtatatacactatagtcatcgaagcggatggacatgatatcagattaatgcctaaagtaagcatgcgtagagaattgagatgtctcgtgcacggtggcagtttgtgcctactaaaaacacgtgtagcgcgaagtatgtgcgtgtttccatttctcaatggaagcgctgcctactaatgtatgttggtcatccctgagaaagaagctgctctctttcacttgcctgaatatacgatataccccagttctnnnnnnnnnnnnnnnnaaaaa

SEQ ID NO: 111266 - DNA, 435 bp, Zea mays
  Clone ID: MRT4577_32966C.1
cttgccgggtaaacatgtggatatagggggtgtagactcgccccctctgacgcatatataggtcaccgtgaacccctgtgccaatccagtagccatggcgtgcagagatggaagggagagagaggaattggcctgccactcaaatcgttcgctgccggtgtgtcttcggcctcgagtgaggccacgaatcatctaaagatcatccttagtaccagaaatctcaagtcccaggtcaagaacaggtaccacaggatgaggtgcatggaggatgccgtgatgtgttcgtgagatgtctaggccgtcgtcgcccagtaaactttgggttgttggatcgttgtctcctcacgatgtaattatttatttattttgtacagaactcctattatataataaagttgtgacattcgtttcaaaaaaaaaaaaaaaaaagcggcc

SEQ ID NO: 111267 - DNA, 299 bp, Zea mays
  unsure (1)..(299): unsure at all n locations
  Clone ID: MRT4577_32967C.1
aaaagagttcaggntctggttcgtgggagagagggaagagatggnggtttcgcccgatgagaaccgttgnttcgttggcgggctcgactgggtcaccgacgaccactccctcaacaacgccttcagtatctaaggagaggtcctcgagtcgaatatcatccttggatcgggagacggagaggtgccgcggcttcggcttcgtcaccttctccacggaggacgcgatgagcagcgcaatcgagggcatgaacggtttggagctcgacgcgcgcaccatcaccgttaacgaggtttttttt

SEQ ID NO: 111268 - DNA, 455 bp, Zea mays
  Clone ID: MRT4577_32968C.1
actcactcacgcgctatgcatgaccaggattatctgaacagggagatccaggagctgggcgataccattcctggtggggagtcagaggatcaccaagaacgtgttagaaccctacatgatgataatttcattcatcacactctagttaatccagctgatcgttatgccacccataatgagctacattcacctgtacattatccacacgctgaggaatttgaggatgactatgaaatctaacaactctctcaggatcattagaagaacatgaacaacaatgatcgacctcacgcatatattgcccatatagcggaacaatccattgctcaattccaagtatcatcctaagaacatgcaaacttgaataggccatcaataccagccattaacaaactcatgaagcttactctgctcatacattttctcttcaataataatcttcagcaggaatttct

SEQ ID NO: 111269 - DNA, 411 bp, Zea mays
  Clone ID: MRT4577_32969C.1
gccgaaaaaaaaaaaaaaaaaaaaaaaaaaaaaaaaaaaaaaaaaaaaaaagaaaaaacaaaaaaaaaagaaaaaaaaattaaaaacgcgatgcatgcgacaaaaataaactaatactatagggtaaccaaaaataaaattaacatggccgtagcatttacaactgttttgattgggaaaaaccctggacgtgggcgccgggctgggggggaatctgctagcactatccccactttcagcccagctgtgcgtaaatattcgaagatggcccccaacctgagtcgcctcttggccaacaggttcgcgcactcctcgaatggttgaatgggaacgcccccttgttgcgttcgcattaaggcgcggtggcttgtgagaggttccctcgcaccggggcgcgttacactgtggcag

SEQ ID NO: 111270 - DNA, 454 bp, Zea mays
  Clone ID: MRT4577_3296C.1
ccggccggagccgccctcatcccctcacgcccaagccgccgccatcctaccgttccctcccggcgctcgcctagtagcatcacccggtggggccgacgacggaaggctgtggcgccgtgcggggctgcgccaggcgataagatgtacaagatggtcaactccatctacttcgatgccgccgactcctgccgctccttcttcaacgacggtggtgtcgcggcaagaggcgtcttcaactattaggggggcttctccccgaggacgtcctcggaggagtggtccgaggtcgcgatctgtagcttcggtcaggcctccacggaccacttatccttcgatgcaggctcgacacccaccacgacgtccaactccatcctgaccgcctcgaagtcaaagccacccgatgagatacccagcaagctgctgcggtcggcgttctcggcttccgccccacctc

SEQ ID NO: 111271 - DNA, 230 bp, Zea mays
  Clone ID: MRT4577_32970C.1
ttcgactcgaccgtcgccgatccagttcgctttgcgttaccgagagctcgtaggtctccgtccctgcgtgatgcgagagcatggacacccaggtgaagcttgctgttgtggtgaaggtgatgggcaggaccgagttcaggggtcaggtgacccagggcagagtgaagatcttggattaccagaaccgtctcatcatgaggaacgtcaagggctctgtacgtgagggtgac

SEQ ID NO: 111272 - DNA, 241 bp, Zea mays
  Clone ID: MRT4577_32971C.1
ctgccacaggatggcgttgactgcatttgccccagtcctcgaattgcaccacccgtactggcacttgagctccgcgcaccatgtcccgaccggcacgttcggatcacacagttaagtaccggatgccttgtgggaaccgaccccgcgacttagggatggaccgagggaaggagacggggacaatgccggcgcagactcggcatgtgatgaacatgggatggcaaggaaaaatgcgtcggga

SEQ ID NO: 111273 - DNA, 549 bp, Zea mays
  Clone ID: MRT4577_32972C.1
ggaggcctggtggtaaattgtttatcaagatcgctagagcagttaaatttactcctattatcttctgggatagatttgggtaacttcatgcaaaaatttactcatccaggaaaatttttctaccattttgaacttctggtagtcttgacttcatcacttcttatgaaccacatcattatattaatttgtatagagtccatgtcatgcttcccagcaggatcaaggtcgttgtcgtctccaggtccatcaaatgcgacaaggtcgagcgcacgcaattcagctccgaagtcatctcctttcaacagaaagatgcaagtaacaccaagtcacttgcctttgatggttgatacatttcactgtatatcattgcacgacagatccatttagtacctttttctgagttaaactacttcaaacattgctgaagactacaaccagttgttgtaattgaagcgggtcaagacatagcatttgcaaagatttagttcattctcatcactctgcaatattcgggttctctattatgtgtaatctcatatcaagattaat

SEQ ID NO: 111274 - DNA, 440 bp, Zea mays
  Clone ID: MRT4577_32973C.1
cacacgacgtcgctgctccgcatggccaacgccaatggctcgtccaccggtgcaggccatagcgacctcgtcagggccatttcgcacgagcagcaccaggcgttcatggcctacgtgccccgggccgcaccgggcggggtgaatgtgcaccaccagcagcacttccaccaataccccgccggcttgatcccagcgccggtggcactgccggttcacgcaccggtgtcgtgaccgacgtgtccgtactccgcccagatcgcggtgccgtcgtctgcgccaccactcatcggatgtccagaccaccgtctgcactccctggcgcctaccggatgctaccagctggactattctccatatggcaacgctgctgcgccttcgcagcatcacacatgatcgaaaggggtcctgctgactggggaacgcacagcaatgcgctcatg

SEQ ID NO: 111275 - DNA, 421 bp, Zea mays
  Clone ID: MRT4577_32974C.1
cgcgttccattcgctgtcctagggcacgctcatctctctgtcggaccaggacaagaacgctctgatgcagtaccacgtgttgtacgccgccatccccatgtcgtaggtcgacaccgacagcaacccggtccgcactcttttccgacagtgcctcgccgggggagttcccactcaacgtcatctactacgagggccagcaggtcaacttcaccactggcgtcgtcatcgacagcgtcgacaacttcctctactcggtccacagcctcggcgtctaccaggtcaacaaggtgctgctccccatgaagatcttcatcgccgatgatgctcccgctcccgcgccgatcgcgccggccaagaagaagggcaagacgcctgcggacgttaacgattggaccgacgcggtggaggcgttccctgacgc

SEQ ID NO: 111276 - DNA, 828 bp, Zea mays
  Clone ID: MRT4577_32975C.1
agtattctactgtgcctgcgtcccgacaagcgaaaagaagagacgggggagggtgggagaacggataccgaaagggggaggagagtgagcagccagagaacagggaggtagagaggaggaggaggaggtagaaggcgaaagaaggggaaccaaatcttggacgggaacacatagatttctttggtggaggaaggaggagggcaacaagaggaggttacaggtagcccaatagatctactgctgttgagggagttgatgcaaagctgagttgctgcgcgttggctttctttagagatggcttcagctggtgttgccccttctgggtacaagaacagcagcagcaccagcattggtgccgaaaagttgcaagatcacatgaacgagctaaagattagagatgataaggaagttgaagcaaccataattaatgggaaagggaccgaaactgggcacataattgtcaccactactggtggcaagaatggtcaaccaaaacagacagtgagctacatggctgagcgcattgtaggtcaaggttcttttgggattgtcttccaggccaagtgtttggaaacgggtgagactgttgccataaagaaggttcttcaagacaagcgttacaagaaccgcgaactgcagaccatgcgcctccttgaccaccctaatgttgttgctttgaagcattgcttcttttcaacaactgagaaggatgagctttatctaaatttggtccttgagtatgttccggagacagttcatcgagttgtgaaacatcacaacaagatgcaccaacgcatgccacttatttatgtgaagctttatatgtac

SEQ ID NO: 111277 - DNA, 2573 bp, Zea mays
  Clone ID: MRT4577_32976C.1
gcgtccgaccacacgtccgcccacgcgtccgcccacgcgtccgcccacgcgtccgcggacgcgtggagctaccattaattcatactgctctataacaaattacaggaccctccggccggggcgggcgtggtggtggtgggtgctttgactgcaggcctcggcacggtaggcacaaatcattttggccgctgcgtcgcgttgggagcagtattctactgtgcctgcgtcccgacaagcgaaaagaagagacgggggagggtgggagaacggggctctaataagctgtcctgctgtggtggctcttgttcaaccattctttgatgagcttcgcaaccttatacgcgccttataaatcgtcgttttttgccagatcttagcaatttcaagcctcacgaagttactcgagtccattcagacatccgaaaggggtaggagagtgagcagccagagaacagggaggtagagaggaggaggaggaggtagaaggcgaaagaaggggaaccaaatcttggacgggaacacatagatttctttggtggaggaaggaggagggcaacaagaggaggttacaggtagcccaatagatctactgctgttgagggagttgatgcaaagctgagttgctgcgcgttggctttctttagagatggcttcagctggtgttgccccttctgggtacaagaacagcagcagcaccagcattggtgccgaaaagttgcaagatcacatgaacgagctaaagattagagatgataaggaagttgaagcaaccataattaatgggaaagggaccgaaactgggcacataattgtcaccactactggtggcaagaatggtcaaccaaaacagacagtgagctacatggctgagcgcattgtaggtcaaggttcttttgggattgtcttccaggccaagtgtttggaaacgggtgagactgttgccataaagaaggttcttcaggacaagcgttacaagaaccgcgagttgcagaccatgcgccttcttgaccaccctaatgttgttgctttgaagcattgcttcttttcaactactgagaaggatgagctttatctgaacttggtccttgagtatgtgccggagacagttcatcgagttgtgaagcatcacaacaagatgaaccaacgcatgccacttatttatgtgaagctgtatatgtaccagatatgtagggcattggcttacattcatggcactatcggtgtctgccacagagatattaagccacaaaaccttctggtgaacccacacacccaccagcttaaactatgtgactttggcagtgcaaaagttctggtcaagggggaaccaaacatatcgtacatctgctcgcgatactatagggctccagagctcatatttggtgccactgagtataccacagcgattgacatttggtctgctggatgtgttcttgctgagcttatgctagggcagcctttgtttccgggtgaaagtggtgtggaccaactcgtcgaaatcatcaaggtcctcggtacgccaacaagggaagaaattaaatgcatgaacccaaattacacagagtttaagttcccacaaatcaaagcacacccatggcacaaggtattccacaaaaggatgccgccagaagctgttgatctggtctctcggctactccagtactccccaaatctgagatgcactgctgtggaggcacttgttcacccattctttgatgagcttcgagatcctaatactcgccttccaaatggccgctttttgccaccacttttcaatttcaagcctcacgaacttaaaggagtcccatcagacattgtcgcgaaattgattccagaacatgcaaagaagcaatgctcctatgttggattgtgaaatgaccgcgccttgagactggaacctgtggttgcaattgtgcatttcccctgggatgtttgatgatctgaggcatgcgagcctgtcgttgaagatgcaaggttacctacttgtacgacaatgtgacctgtgtagctgagtagtctaatgttgcagtgacatgtaatggcgccccccgtcctactaactgatgcttactggagattgccatagctgatcttgtaatttgttatagggcagtatgaatatatttatggtagcttgaatctatttgtggattcacttcgtttttccatgtttccttgtctccagacctggacttggactgctattgatttttgtttcagaattcctagctacctgttgcctaaaaaaaaaagtgcctcccagcttgctcctgtcgattatttgcacactggcgatggtacctgttcttgattgttgctgaaaaaccttttggttgagatgtagtatattgttatagtaacatgtaacggcaccccccttcctactaacaaatgcttactcgagattgccatagctgatcttgtaatttgttatagggcagtatgaatatatttatggtagcttgaatctatgtatggattcacttcgtttttccatgtttccttgtctccagacctggacttggattgctattgatttttgtttcagaattcccaaaaaccactccctattt

SEQ ID NO: 111278 - DNA, 287 bp, Zea mays
  Clone ID: MRT4577_32977C.1
ccccctgacacgctcgccgtaacgccgtggagagataccaggggcgcacgtgtgatcgctgacgtgcactacccgtgagtccgtcgtcctgaacccttgtgcttgcagcgtgtgacgctgtctcagcgtgctttatagaggcacgtagtctctggtagggcagacgctctctcgctctggtgggcaacgaggtgttctggggaaagccttatctctgttgtgcctggtatgcgacctgcttatagaacggaaaacttacacgctgaattgaactccgtgaacctcgt

SEQ ID NO: 111279 - DNA, 717 bp, Zea mays
  Clone ID: MRT4577_32978C.1
cctcgaggccggccgggaaccttattccactatctatccttctatcgccattgcaaagagcaggtattcggcaaaagggaacgatgctgctcctgagctcccccttctagtccgtgcctccgccgaaagccgcgacgcactcgctaggggctcgcctgtcgctgcattctcaagagcttcgagatcctaatactcgccttccaaatggccgcgttttgccccccgttttcaatttcaagcctcacgaattgaaaggagtcccagcagacattgttgcgaaattggttccagaacatgcgaagaagcaatgctcttatgttggatcgtgaaatgaccgtgccttgggactggaacctgaggtcgcaatcgtgcatttcccctgggatgttggatgatcttgaggcatgcgagcctgtcgttgaaaatgcaaggttacctacttgtacgacgtacgccaatgcgacctgtgtagctgtgagtagtctaatgttgcagtgacatgtaatggcgcacccccgtcctactaacagatgcttactggagattgccatagctgatcttgtaatttgttatagggcagtatgaatatatttatggtagcttgaatctatttgtggattcacttcgtttttcaaaaaaaaaaaaaaaaaaaaaaaaaaaaaaaaaaaaaaaaaaaaaaaaaaaaaaaaaaaaaaaaaacctccagggggggcccag

SEQ ID NO: 111280 - DNA, 601 bp, Zea mays
  Clone ID: MRT4577_32979C.1
gacgcccgcggtatcggtccggaattcccgggtcgaccacgcgtccgagagcttaaaaacctgatctaataatcagcccccaggcacgcttcttcccgaactaagtaaacttggttttcccgcctcgctccagagagatctaagccgacacatcagtttgaagtccaaaacaggaacacatctcccagagccaaacctcaatagcgctcgacgaattcgcaatgttagtggccatagaaagaatgaaacagaaaaggaatctgggcttaagccaaccctacgacagattctaaatgcatcacggagaaatgtcaactgggaacaggtcattcagcaagtaaccaagaaaaagcaagagctgggcaaaggcttacccaggtttggcatagaaatggtacctttggttcaaaatgaacaggaagtcttggatttagatgaagagcctgatctgtccagtctggaaggattccagtgggaaggagtttccattccctcatcctctggcttggcaagaaagcgaagtctttctgaaagcagcgtgggcatggacagggctcctgtgtatagcttgtttactggggagggtgctgcggaagaaaat

SEQ ID NO: 111281 - DNA, 456 bp, Zea mays
  Clone ID: MRT4577_3297C.1
cccacacccgtccggaaggggcacctgaggatttaggtaagtttttggcaccggggggggaagtcaacatgggggatcctgaaggtggaactccgttgaattgggttgttgaccggggccatttaagtgttgtgggggttttggcaaaactaaatgcggccctgattgccaaggccaccgaagggcaaacggaactccactccgctgttgttggggaaagagaaaacatttaaaaattgctggtgaagcatcatgcctcctttaaaatcagggatgaggttgggaccacggaacaggacttgtgccttccaagttgtgttttattgaaccggccaaattgacatccaaaatgctccttatcattagcgtgcctttaagttgtgcccgaccttggccaatggtgtttttatttatgggggacatatggtgtgccttgtgtgaatggccgttcttggt

SEQ ID NO: 111282 - DNA, 1047 bp, Zea mays
  Clone ID: MRT4577_32980C.1
cctcgaggccggccgggaacgacgttgcatgtcagaagtcagaatagctcgttcgtccgtcaccaactcgccatagaacgctatcccatcttctcacacaaaaatatccgcgcgaccccgacctcccccctcccactccgggcagcaagcagcagccagcaggcatggggatacctgtggtggttcccgtcgcggcggcctactcgtgctcctcctccctcgccgcgccaccgagggccgccgccgccgcggcgagggcgccgagccgcgcgcacgtcgcggcggccgggatgtcctccagggcgtcctccttcgtcgggggcagcggaggcgacctctcggcggtggccgcgtcggtagccgcgcggcccaggagggcgggctccgggggaggcggcgcgctcgggtgcaagtgcctcttcgggctcggcgtgccggagctcgccgtcatcgccggtgtcgccgcgctcgtgttcgggcccaagcagctccccgagatcggccgcagcatcggcaagaccgtcaagagcttccagcaggcggctaaggagtttgaaactgaactgaagaaagagcctggggaaggcggcgatcagcccccacctgcaactcccacagctgtaagtggcggggaggagaaggggcttgaggcatctagtagcaaggagagcgcgtgaggatcaggatctatctagtgttgtttatgaaaattgtattctgggcttctcgagttagcagttcatatccttttaaccgcatcgcggtttcaggccatgtagcgatattgtttgtagtttgtaccgggaataacatatttggttgagcttctacgtattgaagaaacaacttatctgtgaaaaaaaaaaaaaaaaaaaaaaaaaaaaaaaaaaaaaaaaaaaaaaaaaaaaaaaaaaaaataaaaaaaaaaaaaaaaaaaaaaaaaaaaaaaaaaaaggggggggccgtttaaaagaaccaaagtttacttccgcgtgcatgcaacgtaaaagctttttaatagggccccaaaaattaaattaatgggcc

SEQ ID NO: 111283 - DNA, 2029 bp, Zea mays
  Clone ID: MRT4577_32981C.1
attctgcagctgtgcctgcgtcccgacaagcggaaagaagaggcgggggagggagggaggtagaaaggggggaggaaaggagagcgagagcagccagagacacagggagggaggtagagagggagtcggagcctcggaggggagggagagggcgaagagtagggggaaccaaatcttgaagggtaaacggagagttctttcgtggaggaggaaggggggggacagcaggaggagggtagaggtagctcaatagatctactgctgtcgggggagttaatgcaaagctgagttgctgcacgttggctttcttcagagatggcttcagctggtgtagccccatctgggtacaaaaacagcagcagcactagcattggtgccgagaagttgcaagatcagatgaacgagctaaagattagagatgataaggaagttgaagcaaccataattaatgggaaagggactgaaactgggcacataattgtcaccactactggtggcaagaatggtcaaccaaaacagacagtgagctacatggctgagcgcattgtaggtcaaggttcttttgggattgtcttccaggctaagtgtttggagacgggtgagactgttgccataaagaaggttcttcaggataagcgttacaagaaccgcgagttgcagaccatgcgccttcttgaccaccctaatgttgttgctttgaagcattgcttcttttcactaccgagaaggatgagctttatctgaacttggtccttgagtatgtgccggagacagttcatcgagttgtgaagcatcacaacagatgaaccaacgcatgccacttatttatgtgaagctgtatatgtaccagatatgtagggcattggcttacattcatggtactatcggtgtctgccacagagatattaagccacaaaatcttctggtgaacccacacacccaccagcttaaactatgtgactttggtagtgcaaaagttctggtcaagggggaaccaaacatatcgtacatctgctcccgatactatagggctcccgagctcatatttggtgctactgagtataccacagcgattgacatttggtctgctggatgtgttcttgctgagcttatgctagggcagcctctgtttccgggtgaaagtggcgtggaccaacttgttgaaatcatcaaggtccttggtactccaacaagggaagaaattaaatgcatgaacccgaattacacagagtttaagttcccacaaatcaaagctcacccatggcacaaggtgtaattttttctacattttttataatgttctaaaaaaactgttgctaccggtttactaactgcctttttggatattttatctttcaggtattcaacaaaaggatgccgccagaagctgttgatctggtctctcggctactccagtactccccaaatctgagatgcactgctgtggaggcgcttgtccacccattctttgacgagcttcgagatcctaatactcgtcttccaaatggccgctttttgccaccccttttcaacttcaagcctcacgaattgaaaggagtcccagcagacattgttgcgaaattggttccagaacatgcaaagaagcaatgctcttatgttggattgtgaaatgaccgcgccttgagactggaacctgtggttgcaattgtgaatttcccctgggatgtttgacgatctgaggcatgcgagcctgttgttgaagatgcaaggttacgtacttgtacgacaatgtgacctgtgtagctgagtagtctatgtcgcagtgacatgtaacggcaccccccttcctactaactgacgcttactcgagattgccatagttgatcttgtaatttgttatagagcagtatgaatgtatttatggtagcttgaatctatgtatggattcacttcgtttttccatgtttccttgtctccagacccagattgctaccgtattgtttcagaattcctagctacctgttgcctattgagtattgactaccagcttgcacttgtctgttattgc

SEQ ID NO: 111284 - DNA, 400 bp, Zea mays
  Clone ID: MRT4577_32982C.1
aaaaattcagcggggaggagccctgcagcctgtatggaaagctttacaatgggggtgaccggtattcttcacaaccaggcccacaaaggcaatctgaaaacacatgccccgatgcccccctggggttgggtagaggcccgaatggcccgcttatatagcatccgaaagacaaggcacccacacccccattccccttggctaacaaaagccatttggaaggcagggcactcgactaacaaccgagggaacccccggctccctgttttgcccatggcaaccccatcatatggcaacaacaaggaaagtgccaaacaaggaaaccttcccccccggcttgaatgggggaagacccctggggggacaggttccacacgcggaaggcatcacccaacccacaact

SEQ ID NO: 111285 - DNA, 242 bp, Zea mays
  Clone ID: MRT4577_32983C.1
gatcaacaaagcggcagagcgtattgaggctcgacaaacacaacagcatgcagatggttatcgctcttgatgcgcgcctgtctctgtacgctggcagctcctgtgacatgcatatgccaatgctcacaagctgctatagctgccttttctcccccatacgcttccattaactatagctccagtatgtgaaaacccagcttttcaaccatataggcttcaacaagcaatcgttgcaagcaaca

SEQ ID NO: 111286 - DNA, 340 bp, Zea mays
  unsure (1)..(340): unsure at all n locations
  Clone ID: MRT4577_32984C.1
ggangcaggacatgcgtggaataacatagggtgcttacaaataggtcttacaaatattacaaggtactaggttccattggaggtctgatgggctatccacatctgggctggaattccttggctcaaaggaaccataggaggatggtcacttggttgggcaactaaaggtggatcatgggtatgactaggccaattagaatcttggataataaaatcatcactcccatcttgggtgacccaattatgaatggtacaacacggatcaacaatattggctttgggtggaaaaggggaggaaggggatatcatctaaaatctctaatattctcttcaatggccc

SEQ ID NO: 111287 - DNA, 178 bp, Zea mays
  Clone ID: MRT4577_32985C.1
gccggccgggtcgggatcaacctacgttgatacttccattctcttccttccatcctctttacctcgtctctcgcttcctcgctggttcctcctccctcgaacgaacgcgacatcgcacgcttccggagctagtgctctgccgagatgacaaacgcgagatcatgtgtatgtgtgaatg

SEQ ID NO: 111288 - DNA, 350 bp, Zea mays
  Clone ID: MRT4577_32986C.1
agacatacacacccacaaaaaaattagggagcaaacacgggacaacaagaaaaaacaacaggactgacagggacacgagagcagaaaggggacgcaaaaaccccgagggggaagcaagctagctaggaggggggggcggatccatccagggtattgggaccaaaacggggggggcaggggggggcacacccacgaaccacgaagctgctaagcgcgttgcaaaaaacaatgcaggataaatctactcccactctcggggggcacgaaaggacacaccacgaacgaagctcgctaggggggggacaacgggaggaaggccgcggaaaaaagcaaagggggaccgaaggatc

SEQ ID NO: 111289 - DNA, 300 bp, Zea mays
  Clone ID: MRT4577_32987C.1
attttgctattgcttgcatggaacaagacaatacagatttgctcctaaaacgaagagaattttgactctccagaaagctaatagctggttcaactgcagggaaaattgaacattactaatttgaatggagaacacatggtgtgagtccaaagaaggtgttttcctgaagagctgtctattttctcagtcatgtgtaacctctagagtcactgatacacagaatataatcttatatatacctcagtttgcatatttttgtactatttagaatgtagccctttttgtactgatataatttag

SEQ ID NO: 111290 - DNA, 244 bp, Zea mays
  Clone ID: MRT4577_32988C.1
ctgccctgttgcaatgcctgcatggtctgaaaggacctcggctcatgcgtgactgccatgtgcattagctgcaggggacgttcagggtatatatcctttgatcagctccatccgatgttccccatgcatgatggtttcgttttgtccgcttacttctggcatgccagcgtagtgctcatcaagtacttgactctcatacaccctcatggatacattgaactaattccaatacctgcctgatcac

SEQ ID NO: 111291 - DNA, 388 bp, Zea mays
  Clone ID: MRT4577_32989C.1
aaccactacctccgtcgcaggcgcaggccgcgcagtgcagggaatcatggccacgctctaccagcaccacctcctccccctgcagcgtctccccaactccccccgccgaccgcctcctcgcctccgcctccccacgaagccatcgaggcaccacaatcggcagctacgaccccgcgcggcagccagcacaacggccacagtgtctgcgatggaggacttccgccggtggctcgcctctcatggcgcgggcgatggaggaaaagccattccagccgccgtgccggagggtctcggcctcgtggcggcgcgcgatctgccccgcggggaggtggtcgcggaggtgcctaagaagctctggatggacgccgacgccgtcgcgggcttcgac

SEQ ID NO: 111292 - DNA, 155 bp, Zea mays
  Clone ID: MRT4577_3298C.1
caggttttcaaaataggagctcgagggccgctttttcttttttttttttgcttcaaactttccacgacccaataattccacatgataacgactggcatgctggcaaccaacgctgtactaccatggaaactaccaaccaacacaaagaagttaaa

SEQ ID NO: 111293 - DNA, 118 bp, Zea mays
  Clone ID: MRT4577_32990C.1
agttcacctgcggcgtccgtgtccgaatggcacccttgaaaggtgagtaagaatttgtcccggctacttctacaagagtcaatggacaatgggggcaatctgttgtgccatgtgaggg

SEQ ID NO: 111294 - DNA, 1784 bp, Zea mays
  Clone ID: MRT4577_32991C.1
actagtttctttcttttgtgcgcgcatccactccaccaccacctgcccccgaccaccgaaaaaaggtccaagaattcgaggacacctcctcctcctcctcctccacgatggccatgccaagatccttccccaaaccgtagcctttgtttgttcccccaaaaggaaggatttcattccttgccgttccatcgttccgacttgccgtcaagcaaatgcgaagcgtctcgcctgtgatcttcttgcaccttgccgagctgtgcgactgactggttgatccaggctgtacatacatagggtcaattaatgagcggcgccaattcttcgttgccgatgccgccaccggcgcccgctgcgtcggcgctcgacaacgtggaggccaagataagccccagcatcgtcttcgtcgtggccatcctggcgatcgtcttcttcgtctgcggcctgctgcacctgctggtgcgccacctgctgcggctgcggcgccggcgccgccgcgcgcgggaggacgcggacagcgtcacggcgttccagggccagctgcagcagctcttccacctgcacgacgccggcgtggaccaggccttcatcgacgcgctcccggtcttcctctaccgcaacgtcgtcggggccgcgccgggcggcaaggatccgttcgactgcgccgtgtgcctgtgcgagttctcgcccgacgaccggctccggctgctgccccagtgcagccacgcgttccacctcgagtgcatcgacacgtggctgctgtcccactccacctgcccgctctgccgccggaacctcctcgctgatctctcgccggcgtcgtccagccccgtcgtggtggtgcagctcgggtccgggagcgcccgcgacatggccgcgtcggcgggtggtgccacccacgacgatgccgacggcggcgagccaagcgaccgggccacgccggcgcaggagatggtcgaggtgaagctggggaagttcgtgtgcgtcgaaggcaacagtgacagcgcgagcgccaccgccacggacgcagcaggcaccagcggcgacggcgacggcggtgccagtgcagaggaaggtctcgggcagagaaggtgccactccatggggtcctacgagtacgtcatggacgaccgcgcctcgctccgcgtggcgatcaagccggagcccaagaagaagcccgcggcctccaagtcgcgccgccgaggcgccatgtcggagtgcgagttgggcgcgtccaagcgcggggagacctcgctccgcctgccattcccagcaacggtgcccaagcagcagcagcagtccgactccgacgcgaccatggcgaagctcgccaaggacagcttctcggtgtcgaagatctggatggtgccgtcgtccaaggaagaccccgacgcggccggcgagaggcgcacggtgtcgttccggtggccggtgaggagcaaggacgagggagacggcaggaaccggaagagcgggagcgaggccgactgggacgtggaggccgggagcggcggcggcggcaacagcgccgcgtcgtcgctggcggaggagaggccctccttcgccaggaggaccctgctctgggtcgtcggaggccggcaacagagcagagtcgggagctgttcatgatcggcgcaccactgtttgaagacacacaaaacacacacaaaacaaaggcaaaggaattcttttgtgctcttttggcacattggtaagtgcgagtagtgattgcaatagctagaaatttgtaaaacaggaaagactctgaaaaaatttctttctttcgc

SEQ ID NO: 111295 - DNA, 1457 bp, Zea mays
  unsure (1)..(1457): unsure at all n locations
  Clone ID: MRT4577_32992C.1
cctcaggcggcggggatggttgtccaggctgtacatacatagggtcaattaatgagcggcgccaattcttcgttgccgatgccgccaccggcgcccgctgcgtcggcgctcgacaacgtggaggccaagataagccccagcatcgtcttcgtcgtggccatcctggcgatcgtcttcttcgtctgcggcctgctgcacctgctggtgcgccacctgctgcggctgcggcgccggcgccgccgcgcgcgggaggacgcggacagcgtcacggcgttccagggccagctgcagcagctcttccacctgcacgacgccggcgtggaccaggccttcatcgacgcgctcccggtcttcctctaccgcaacgtcgtcggggccgcgccgggcggcaaggacccgttcgactgcgccgtctgcctgtgcgagttctcgcccgacgaccagctccgcctgctgtcccactccacctgcccgctctgccgccggagcctcctcgccgacctctcgcccacgtgcagccccgtcgtgatggtgctcgagtccgagagcgcccgcgacatggccgcgtccgcggctcgggccgtgggcgccgagcccagcgccgggcccggggccacgctgccgcgggaccaaggagcggacgaggtggtcgaggtgaagctggggaagttcatgtgcgtcgaaggcagcaccgccaacgccaacgccaaggcggcggacggagcaggcaccagcggcgacggcgacgtcgacgtcgacgccagtgccaaggaaggtctcggtctcgggcagagacggtgccactccatggggtcctacgagtacgtcatggacgaccacgcctcgctccgcgtggcgatcaagccgcccaagaagaagcccgcggcctccaagtcgcgccgccgcggcgccatgtcggagtgcgagttcggcgcgtccaagcgcggggagacctcgctccgcctgccattcccagcaacggcgcacaagcagcagcagcaggccgacgcgaccatggcgaagctcgccaaggacagcttctccgtgtcgaagacctggatggtgccgccgaccaagaaggatcccgccggcganaggcgcgcggtgtcgttccggtggccggtgagcggcagggacgagggagaaggcaaggacaggaggagcgggagcgaggctgagtgggacgtggaggccgggagctgcggcagcgtgtcgtcgctggcggaggagaggccgtccttcgcgcggaggaccctgctctgggtcgtcggaggccggcagcagagccgagtcggcagctgttcgtgatcagcgcacggttgctcgaagatttaaaaaaaaaagaaggcagagaaatacttttgtgctctttcggcagattggtagtagcgagtagcggttgcaatagctagagatttgcagaacccgaaagctctgaaaaattctttctttcttcc

SEQ ID NO: 111296 - DNA, 1162 bp, Zea mays
  unsure (1)..(1162): unsure at all n locations
  Clone ID: MRT4577_32993C.1
cggaaaatcgcgtcccttttcccgccacctccccttccccgcgccgccgtatcccttccctccctcgccgcgccccatctccaccgagcgaaagaagcacacacgagaggcgacggggagaatccctcggtgccagtggcaggcgaatccctcggcggccggcgaaggcgacgacgacgcaggttattcttcttcagcgcggaagatcgatccagtcctcgtctgaaatgggggatgagagggtcgatgccatggagattgatgggcagcagcgggaagaagtcgcggccgctgtgccggacggcttcaacgccgactacctccgaatctactacggaaagctcttcccatatgttgatttcttcaagtggcttgcatacggaaatgatgcaaagcatcctggatgtgaccagtcatacattgggcgtcgggagctttcgtttacactggagaatgacatctatctgcggtttcagtcctttgatagtgcagctgaactagagacttctatcaaggagaagtgccctttcaagattgatattggacctgtctacagcgtagatcctgcaaagcgacatgcctatgcccagtctggtaataatgtctttgtaccagtggaaagggaacttatttttgatatagatatatctgattatgatgatgttcgctactgctgctctggagctgatgtctggagactgctggcctttgatgacaattgttatcaaaattttggatacttctcttagagatgattttggtttcagtcacatactatgggtatacagtggacgtcgtggtgtccattgctgggtctgtgatagcagagcaagaaagctcagcaatgaacaaagggctgcaattgctgactactttcgagtctacaagggtggtgaaaatgcactgaagaaagagagatgtcggaagatactcgatctcatccctgatgaaagtgttgctagtgaggtccatgacaagtggcagggaaatagacgatcttctatttcaaaagaagatgtcaatgcgaccagatgggagcaattgaagatgactntacagtctggaaaaaaggctcaggggcttcgtagatgtgtggaagagattgtcttctcatacacataccctagacttgacatggaggtatcaaagcacatgaatcatt

SEQ ID NO: 111297 - DNA, 1976 bp, Zea mays
  Clone ID: MRT4577_32994C.1
ccggccggggccgttctcctacatcccttttccctctctgcccctgcgaacggggcgccaccacctaccagttatctccctccgctgcgcagcccctctgttagaccgtcgttgccgccctactccaggtgggtaggtcttcttcaggcccttcgccggcgacaaacaccaccaggggacctcgccggcgcaggggagggggcaccgtcgccaggagcaaagagccagcagccgggaaccagagccgccgccacttctagagctcaatcgatcagcgactcagattttcatctgaggatgggtagggactatgaccctatggagattgacgaccagaagcagcaacagctagaagtcaccgctgcggtgccagaagggttcaacactgactatctccgtgtctactacggaaagctcttcccatatggtgatttcttcaaatggctttgctatggaaatgatggaaagcaccctggatgtgatcaatcatatgttggacgtcgagagttttcgtttacactggagaatgacatttacttgcgcttccaatcctttgatactgctactgaattagagagttctatcaaggagaagtgccctttcaagattgatattggacctgtctacagcgtagatccttcaaagcgtcacgcttacgcccaatctggcaataatgtctttgtaccagtcgagagggaactaatttttgacattgatatatctgattatgatgatgttcgctactgctgctctggagctgatgtctgcagagactgctggcccttgatgacaattgctatcaaaattttggatacttctcttagagatgattttggtttcagtcacatactatgggtatacagtggacgtcgtggtgtccattgctgggtctgtgatagcagagcaagaaagctcagcaatgaacaaagggctgcaattgctgactactttcgagtctacaagggtggtgaaaatgcactgaagaaagtatccttggctggacctgttctccatcccttccttgcccggtcatacatggatgttcttaaaaccttctttgaagataggttgctccttaaccaacaactctttgcatcagaggagagatgtcggaagatactcgatctcatccctgatgaaagtgttgctagtgaggtccatgacaagtggcagggaaatagacgatcttctatttcaaaagaagatgtcaatgcgaccagatgggagcaattgaagatgactttacagtctggaaaaaaggctcaggggcttcgtagatgtgtggaagagattgtcttctcatacacataccctagacttgacatggaggtatcaaagcacatgaatcatttactaaaagctcccttttgtatacatccaaagacaggccgtgtttgtgttccgattgaccccagtaactgtgatgattttgatcctgcggctgttccgactctatcacagcttttaggagagctgaatgctactggttttcagacagatcctgaaaataattgggaaagaacgtcccttgggaaatccatcagttttttcagaacttccttcctgcacccattgctgaaagcatgcaaggaggaactggaaagtgcatatagcgcgaagcttcagcagtccaagaattccttggactggtaaaatctacgcatgtttctgcctctgttttatcatcagcccccgttcggccctccctgagcatccaacgggtaacatggacctggtgctaggtggaatatctatgacgctgccaacccgtgttgcatgcctgggatgcatgcaaccatgtcagtttgaagttgcgtcttaggattcatgttaacatggaacaagtccgagtacatgctttgtggtatttttacctttggattagtttattaggttgaagggttataatgacggtcaaacactcgaaaatggatgcatggaaaactgactcggtcatttcgacaaaccacccacac

SEQ ID NO: 111298 - DNA, 111 bp, Zea mays
  Clone ID: MRT4577_32995C.1
ggcacacgagaaactctctgtgcctgtcacgtgcaaaatccgtgtcttcccggagattgacaagaccgtgaggtacgcccagatgctgcagaaggccggctgccagttgct

SEQ ID NO: 111299 - DNA, 407 bp, Zea mays
  Clone ID: MRT4577_32996C.1
ggatagtagtaagcggggatacattagggtactcgatattacacaaaataacaaagcaggtacaaagtacatacaagccaacgccaacactagatggggatatattattttacagcttcttccaaatatagaagatccacgagaggcttaagaaagcatccaacgggatgtgctcaaatccatggccatccatgaataccggaaggacacccaccctctttatttatgacatcatcacgccaagccacgcaagggacccacacacatacatatatggatggaaatatatatgtatagtccaagggcaatcttacgggtagacttcgaaggcaacacgagctccaaattccttcaggatcttggattccctgaaccctgctttggtgaagagctcgctccattttttt

SEQ ID NO: 111300 - DNA, 1447 bp, Zea mays
  Clone ID: MRT4577_32997C.1
aagcacaagcacactagcaatggcttctgaggttgtgcgccctagcgacgccgagctactaaaggcacaagccgacatatggcggctcagcctctcctacctcacgcccctgtcactgaggtgcgccgtggagcttggcatccctacggcgatctaccgccatggcggggctgcctcagccgctgagctggtcacggcgctgtctctcccctccactaagctgccgttcctccgccgcctgctgcggctcctcgccgcgtcgggcgtgttcaccgtcgacaagcagagcacggaggagcggtaccgcatcagccccgtgtcctacctcctggtggacggcatccctcacgaggaccacatgaaccacaccgctctggtgctcacctgcacctcgacgcgctacatcgaggcggggatagggctggcggagtggttcaagagggacgtggtcacgtcaccgttcgaggagctgcacggggcgactctgttccacgagagcatgggcagcctcgacgcagatttccacgacatggcgagcgaggccttggacgcccacgacaacttcggcatcgagatagctatgcgggagttcagggacttgttcgaggggatccagtccatgacctactgctgcggtaacttcggtgatgacaagggtgccagggccattgtcaaagccttcccacacataaaatgcactgtgctggcccctcccaagatcattgccaccaaaccggccgatggagcgatgataaactatgtcgaaggtgacatgttcagtttcattccacctgctcaaactgtcgtgctaaagcttgtgctgcaccacctgaccgatgaggagtgcgtcaagctcctggctcaatgccggaaggcgattccttcacggaaggatggcgggaaagttataatcggtgatattatgattgaccactctgggcctatgctggaaactcacctcctgatggacatcggcatgatgaccatgacaaaaggacggcagagagatgaaaaagaatggagcgagctcttcaccaaagcagggttcagcgaatacaagatcctgaaggaatttggagctcgtgttgccttcgaagtctatccgtgagattgcacctggactatacatatatatatttacatacatatatgtatgtgtgtgggtgcgttgcgtggcttggcgtgatgatgtcataaataaagagggtgggtgtgcttgcagtattcatggatggccatggatctgagcacatgacgttggatgctttcttaaggctatcgtggatcttctatatttggaagaagctggcaaataatatatcgccatctagtgttggcgttggcttgtatgtactttgtacctgctttgttattttgtgtaatatcgagtaacctaatgtatacttgcttactattatcactaccgaaatccgtctctttgccgagt

SEQ ID NO: 111301 - DNA, 1453 bp, Zea mays
  Clone ID: MRT4577_32998C.1
ccgcaccgcacacacatacacaagcacaagcactctagcaatggcttctgaggttgtccgccctagcgacgccgagctactgcaggcacaagccgacatatggcggctcagcctctcctacctcacgcccctgtcactgaagtgcgccgtggtgcttggcatccctgcggcaatctaccgccatggcggggctgcctcagccgctgagctgatcacggcgctgtctctcccctccgctaagctaccgttcctccgccgcctgctgcggctcctagccgcgtcgggcgtgttcaccgtcgacaggcagagcacggacgaggagaggtattgcatcagccccgtctcctacctcctggtggaaggcatccctcacgaggaccacatgaaccacacctctttcgtgctcacctgcacctcgtcgcgctacatcgagccggcaatagggctggccgagtggttcaggaaggacacggccacgtcaccgttcgaggagctgcacggggcgactctgttccacgagagcatgggcagcctcgacgcagatttccacgacatggcgagcgacgccttggacacccacgacaacttcggcgtcgagatggcgctgcgggagttcagggacttgttcgaggggatccagtccatgacctactgctgcggtaacttcggtgatgacaagggtgccagggccattgccaaggccttcccacacataaaatgcactgtgctggcccctcccaagatcattgccgccaaaccggctgatggagtgaagataaactatgtccaaggtgacatgttcagtttcattccacctgctcaaactgtcgtgctaaagcttgtgctgcaccacctgaccgatgaggagtgcgtcaagctcctggctcaatgccggaaggcgattccttcgcggaaggacggcgggaaagttataatcggtgacattatgattgaccactctgggcctatgctggaaactcacctcctgatggacatcggcatgatgaccatgacaaaaggacggcagcgcgatgaaaaagaatggagcgagctcttcaccaaagcagggttcagcgaatacaagatcctcaaggaatttggagctcgtgttgccttcgaagtgtatccgtgagattgcacctggactatacatatatatttacatacatatatatatgtatgtgtgtgggtgcattgcgtggcttggcgtgatgatgtcataaataaagagggtgggtgtgcttgcggtattcatggatggccatggatctgagcacatgacgttggatgctttcttaaggctctcgtggatcttctatatttggaagaagctggcaaataattatatcgccatctagtgttggcgttggcttgtatgtactttgtacctgctttgttattttgtgtaatatcgagtaacctaatgtatagttgcttactactatcactaccg

SEQ ID NO: 111302 - DNA, 502 bp, Zea mays
  Clone ID: MRT4577_32999C.1
tatcttttgtttttttttttttaagagggccacctattattttacaactggggcccaatatagaaaatccacgaggggcgtaagaaagcttccaacgccatgggctcaaatccatggccatccatgaataccgcaagcacacccaccctttttatttatgacataatcacgccaagccacgcaaggcccccacacacatacatatatgtatggaaatatatatgtatagtccaggtgcaatctcacggatagacttcgaaggcaacaacagctccaaattcctttaggatcttgtattccctgaaccctgctttggtgaaaagctcgctccattctttttcatatctctgccgtccttttgtcatggacatcatgcccatgtccatcaggaagtgagtttccagcatacgcccaaagcgggaaatataaaatcaccgcatataactttcccgccctcctttccggaagggaatcggcttccggcattgaaccacgagcttga

SEQ ID NO: 111303 - DNA, 685 bp, Zea mays
  Clone ID: MRT4577_3299C.1
tttatattaaagagatgaaggaaatggttccttactgacacttacaaacaaccactctaaatctgctagaagatcagaggggttacaacacttgaaaaaaaaagatatccagagcaagctaggataccaacccaataaagaagtagctgtttgataattaccatagttgttaaggcggcaaggcgaggtgaccaaccccctttttaccttttaagcgataagacgtaagacaaggcgacaccttagtaatatataaaagtaggtaataaaaatagaatatagtctcaaatagatagtcatcgtcaaactcatcatgaaaatgtaggatgctcttctccatcttcctcctcgttcgcctcatcagtcatcactatcactcacattcatcatttaaaaagcaaaacaaattgctggactgctagtaaggggcaatacttctattgttcgcaggcagagagagcagacagcaaagaggtgagagcagagagagcagaaagggtgagagcggaacgcccacagccctagcccaaacaacgcagcacggctgaacgttgcagcctgcagtcctgcatcccaacattaataggttataccagcccaattgctgaaagctaaagtctgcaccccaattgccaaaagccaaacaaagaaacactaaaccacataacccttgatgcctaaggcg

SEQ ID NO: 111304 - DNA, 4447 bp, Zea mays
  unsure (1)..(4447): unsure at all n locations
  Clone ID: MRT4577_329C.1
gaactgcattggttactcttctctctggctgggcatgcaaaggtcgtctggaggacacgtccaaccctggaaagttcgtatgcttggcatcaggagcggtcagttgtgcgtcagatggaaatggtttcaaaacatgccagtcactctgtccatgttatgtaagtagcaatggagctttttcaaaaccagttaagagagcaagtcaaggagaatctagcacaaatactgacagaaatcatagctcacacgatgctgctactgaagcatcgccatgtaacaacagagcctgttacattcccaggttaagagtagaaagtagctaccttggtgttcattcatctacccctacaaaatcctttcgccctctgtctttcaattatgttgcaccttcattatattcaagccttttctcatgggacacagatacactagtatctggcccagataacatttctaagccaattgataccatattcaaattccacaaggcaattcgcaaggatttagagtttttggatttggaatctggaaagcttattgacggggatgagtcttgccttagccaattcattggaaggtttcgtttactgtggggtctatatagagcacacagcaatgctgaagatgagattgtatttcctgctcttgaatcgaaggaggcattgcacaatgttagtcattcatacactcttgatcacaagcaggaagaaaaattgttccaagatatatccactgtactatctgaactttctcaactacatgatggtttgagctatcctcttgatgttgaagctggaacaaatgatatttcaagtagtgagattgattgggctagaaagcgtaatgaacttttgacaaagcttcaaggattatgcaaatctatccgggtcacgttgtcaaatcatgttcatagagaagaacttgagttgtggccattgttcgataaacatttttctgtagacgagcaggataagattatcggtcatataattggaactactggtgctgaggttctgcagtcaatgttaccttgggttacatcagcacttagtttagaggaacagaacatgatgctggatacatggaagcaagcaaccaaaaacaccatgtttgatgaatggctaaatgaattgatgagattctgtattggcacaatgctgttctgagagaactgagtgatatagcggaggagaatttcggcacgcggcagtctggagatttttctgacatagcaggatttaatatgaggctgcaatttattgcagatgtgtgcattttccacagtattgccgaggatcaagttatattccctgcagtggatggtgaattgtcctttgtgcaggagcatgctgaagaagaacggcaattgaataaatttaggagtttaattgaacaaattcaactagcaggagccaagtcaactgtagttgattttcattcagagttatgctcacaagctgatcaaataatgcagaaaatcgagggtcacttcaatgatgaggaaataaaggtacttcctaaagctaggataaagttctcacaggagaaacagagggaacttttatatcagagtctatgtgtcatgccactaaagctgttggagcgtgttctaccatggtttatagtgaaactgaatgatgcaggcagtgtcttttcttcaaaatatgccagcaccttcctctgaaactgcattggactcttctctcatgcgtctcctggagacaagtgtaaacctgccaggtgtttaggcttggttggaagatcagttttttctgttgacggagtgagctcgatgctgagctcacgcgctcgccgcctaggagcattcacgttggcggcgggcggcggctcggttcctctcctccaccgcacctccaagaatccacctccacgactgagctgacggctcggcggcgccatggcagttcaccggctccaaccttccccatccggcctacagtgctccaccgcccggtcgccagtgctcctccatgggccacggctgacgggtgcacgcaccgaccgatggttgcagtaggagaggtggatttggtggacctagattcgatgtgcagagagcgacttggaggtggctgacatcttcaagcactgcatcatgcagttacaactactgttggccatacagggaaatgctgggcctattataccaattgttcaaagcatggaccttgtatagttacatgtttttatcatagatagattaatttctgaaatgcccatagattggtatatttgtggaaatttatttgccaactgtaagcccgtcgtgatgcacagaacatttgtggtataagatttttctgttgatgtttgcaggttatttttccagcacttgacattcgagtgaaaaatgtcgcagggacatattctcttgaacataaaggagaaaatgatctcttcgcacatcagacaaggcttctactctttcagaagaaagtcattttcaggagaatcttgaacaaaatgaccagatgtttaggcctggttggaaggacatttttcgaatgaatcagagtgagctcgaggctgagattcgaaaaggtctctcgagattctactcttgatccaaggaggaaggcctatctgatccaaaatctcatgaccagccgttggatagctgctcagcagaaatcaccacaaccaagcgtcgaaggacataatggatgtacacgacgacctggatgtgttccttcgtaccgagacccagggaaacaaatatttggctgtgagcattacaaaagaaactgcaagcttgttgctgcatgctgcaataagctattcacttgcagattctgtcacgataaagttagtgaccatacaatggacaagtatcttcactccaaccattcattttatcgtaacacatttcctgctgagggatgctttcaaggatttcattttaacatcgaaccaatatcaattaagcatggcatttaatttggaaatagaagtttgctggggtgtcatggatgtgtgaagccattcacttgcagaatctgtccgataaagtaactaaggggccacttttgactctatgaccatgtaattggtgtttatacaactacattaacatgtaaaggttgtagatctggaaggtcttgatggtctaatacctatctatgagtacggaagaaagaagtcggtctctgcagcatcgaaaaatcagccaattcccgaggaaatcagtgatggagatgatgtgcatgcaatgtctgaatgttcaacctgttggtccaaattgtcaatccccttcttgcaatggactgtccatggccaagtattattgtagcatatgcaagttcttcgatgatgaaaggagtgtctaccattgtcctttttgcaacttgtgtcgccttgggagcggattgggcactgatttttttcattgcatgaagtgcaattgttgccttggcataaagatgatagaacataaatgccgggaaaagatgctagagatgaactgtccaatctgctgcgactttttgtttacatcgagtgcaccagttaaaggccttccttgtggccacttcatgcattcggcttgttttcaggcatatacttgtacccactacacttgtccaatctgctgcaaatccttgggagatatgacggtgtattttggcatgcttgatggtttgctggctgcagaacagcttcctgaggaataccaggaccggtgccaggatatactgtgtaacgactgcgagagaaaaggcaggtcacggtttcattggctctaccacaagtgtggtttctgtggttcttacaacaccagagttatcaagactgatacggcagagtgttctcgccctctataatttcttttatgcaatccatttgtatatatatatcgacggggtagaaaccttgtgaccgtaggtgtgatagtttttttatagagtgaactgggggaggaaccccacctggatgtattatgaggaaaaagtgactgtgcacatgaggagtctgagaattactcgctcccgtcccaacctaactgtatttctacgatttgaaatatattcgctcatatattcaaaatatagttgtaatttatattttggcatgcacgaaacaggtgtatttattcatttttgaacgaaattttatgtcaaaacggtcatataattggaactactggtgctgaggttctgcagtcaatgttaccttgggttacatcatcacttgggggggggggagcagnacatnatnctnnatacatggaagcaagcaaccaaaaacaccatgtttgatgaatggctaaatgaatggtggaagggaccttnaactttatttgacccataagacaaggcttgtactctttnagaagaaagtcatttttaggagaattttgaacaaaatgaccagatgtttaggtctttttggaaggacatttttcgaatgatttatagtgagctaaaggctg

SEQ ID NO: 111305 - DNA, 3447 bp, Zea mays
  Clone ID: MRT4577_32C.1
cttcctttcgctatacgacctgagttcgcttcaggcagccgccgctctctctctctcccgcgtccgtcccaccttcgcaagccagccacctccctgagaggcctgaccgtgatttcggcgtggcatccaaaggcggtcaagattcgagaggccggaggaaccaagcgtagggcctccgaccccacgtcgtcgtccgcgcgcgccgcccgccgccgcagggagatgggggccgattactacaaggtcctcggcgtcgaccgcggcgccagcgacgacgacctcaagaaggcctatcggaagctcgccatgcgatggcaccccgacaagaactccaccaataagaaggaggcagaaaccaagttcaaggagatctctgtggcatacgaggtccttagcgatcccaagaaacgtgcaatctatgatcagctaggggaagaagggctcaaggggcagccgcccccaggagcaggaggtcctggcacatctcccttcttccctggcggggctcattccaccgctcaccattttaacccgaggagcgcggacgatatatttaaagagttctttggatcccctggcatgggtggcatgagaacggaaccaggatttcaaaggtcaatgtttggcaacgatatcttctcttcgcgcttccgcgctgagggttccaccagtatgcagcagccattgcgcaaggcagctgcaattgagaatccacttccagtcggccttgcagatctctacaagggtgtgacaaaaaagatgaaaatctcaagagagactattgatgccagcgggagaatctcaaacacagaggatattctgacaatacaagtaaaggctggttggaagaagggaacaaggattacatttcctgacaagggaaatgaagctccaaatatgaaacctgctgatattgttttcatcattgatgagaagccccatgatgttttcactcgggagggaaatgatcttgtcgtgactgagaagatctcactggtggaagcactgactggctataccgcacgtgtcactacgcttgacgggcggagcctatcattgcacatcaactcaataatccatccaaagtacgaagaggtgatgcctggagagggcatgccagtgcccaaggaccccacaaagaagggaaatctgcggattaagttcaacataatgttcccctctaggctgacttctgatcagaaggccgggatcaagaggctattgggttcttaggccgccacctcaaatgacatcttctttatgatgaaagttgtttgtgaatattgccagtgatttgtttgtaacgggatggtcacaatttagtttttttttaaggtggtgcccttggttttgctgttgttctcatttttaaccttagtcgtgtttttttttctaaagttttgctcttccagtgttctatagagcagaagggtaaaactgatgaaaaaaatatgactaagggtaaaaatgaggaacctgacaaaaataagggcacgaattaaaataggttttccggtgggtgggtagttgatgaattgtaaatcccaaacaaaccggccggcccttagcaaccacaacaagggtgaaccttcaccattttattttagtcaggcagagtgttgtgccctttgcattacggtattccattcagttacaggtgaattaataccgctgtgtaccgccaaccggatttacttaaagaagccaaatttgtatcgctgccaattccacaaacagaatttgcagacttttaatcaccagactgggaacaaacaatggaccgactgactcaagatgaaaacaaaacaaggtatagaagtaggtcgtgattgtcgacgatgttgtgtccgaggaaggtcccgataatattattcacagcagtcatgcgctctttttccttttctcctcttcaatcttagccttaatgtaagagtacatagcaacaccagctatggcaatggacgtgccaattccagtttgtgtgctaattttgttaccaaaaacaatgattgagaaaccgatgacgaaaacacgtttcaacacattgccgacagcatgtgtcagaggagccactcgctccaaggtgtttgtagcaatctggttatacagatggtagaacagtccaaccaagaataggtcactgacaaactttgtcaaacctacttttgcaatggcatcactaaatccatgctgcattagcttgggcccttcaaagatcaatgcaggtggaatgcaaacaattagagcgattattgagatgtaagcatacacgttggtgctatccatgtcagtcatagctttcttggaataaatgctcctgtaagtgaatgagatgtttgatatcatggcattgatgaagccagtccagttgaatgaaagctcagtaagggatgccattgaaacaccaatgaccacaggggcaagagaaagccacagagagaagggaacttgctgtccaaggataaactgagtagccgctgcgctgaagaagggctccagagctttgatagtgtgagcaaatgagactgcaacagcaagttcccctctctctgtggatgtctcttgcccctgttgtcattggtgtttcaatggcatcccttactgagctttcgttcaactggactggcttcatcaatgccatgatatcaaacatctcattcacttacaggagcatttattccaagaaagctatgactgacatggatagcaccaacgtgtatgcttacatctcaataattgctctcattgtttgcattccacctgcaataatttttgaagggccccagctaatgtcgcatggatttagtgatgccattgcaaaagtaggtttgacaaagtttgttagtgacctagtcttggttggactgttctaccatctgtataaccagattgctacaaacaccttggagcgagtggctcctctgacacatgctgtcggcaatgtgttgaaacgtgtttttgtcattggtttctcaatcgttgtttttggcaacaaaatttccacacaaactggaattggcacgtccattgccatagcgggtgttgctttgtactcttacattaaggctaagattgaagaggagaaaaggaaaaagagcgcatgatgaggtgactgctgtgaatattatcgggtggctgagttatacctcctcggacacaacatcgtcgacaatctcgacctacttctatgccttgttttgttttcatcttgagtcagttggtccattgtttgttcccaatctggtgattaactctgcaaattctgtttgtggaattggcagtgatacaaatttcggttcttaagtaaaactggttgctggtactggtagacagtggtattcgcctgtaacttaatggatgcttggaataccgggtgtaccgtaatacaaagggcacaggactctgcctgactaaataaaacggtgaactttcaccctgcttcgccgt

SEQ ID NO: 111306 - DNA, 213 bp, Zea mays
  Clone ID: MRT4577_33000C.1
tttttgacctggccttgctaacaggctgcagaggcggtccttcacgcatcgcgcctagagcaattctgctgttcgtagccgatcgtagtgcagcctgactatatggagctagatgatatcgtcacaagatcctcaacaattttcaggcatatgccagctggacgaccgtgctttgacaaccttagtgactgggattgtgcttactatgatgct

SEQ ID NO: 111307 - DNA, 391 bp, Zea mays
  Clone ID: MRT4577_33001C.1
acaagccaacgggagcgggagaatgcgatataggattttacaacttcttccaaatatagaagatccacgagagccttaaaaacgcatccaacgtcatgtgctcagatccatggccatccatgaataccgcaagcacacccaccctttttatttatgacataatcacgccaagccacgcaaggcacccacacacatacatatatggatgtaaatatatatgtataggccaggggcaatcttacggatagacttcgaaggcaacacgggctccaaattccttcaggatcttggattctctgaaccctggtttgcgtgaagagctcgctccattctttgtcatctctctggcggtcttttgggatgggcatcatgccgatgtccattagggggg

SEQ ID NO: 111308 - DNA, 2317 bp, Zea mays
  Clone ID: MRT4577_33002C.1
ccggaaaaaaaaaaaaaaaagcgcacacacatacacaagcacaagcgcactctagcaatggcttctgaggttgtccgccctagcgacgccgagctactaaaggcacaagccgacatatggcggctcagcctctcctacctcacgcccctgtcactgaggtgcgccgtggagcttggcatccccacggcgatctaccgccatggcggggctgcctcagccgctgagctggtcacggcgctgtctctcccctccactaagctgccgttcctccgccgcctgctgcggctcctcgccgcgtcgggcgtgttcaccgtcgacaagcagagcacggaggaggagcggtaccgcatcagccccgtgtcctacctcctggtggacggcatccctcacgaggaccacatgaaccacaccgctctggtgctcacctgcacctcgacgcgctacatcgaggcggggatagggctggcggagtggttcaagagggacgtggtcacgtcaccgttcgaggagctgcacggggcgactctgttccacgagagcatggggagcctcgacgcagatttccacgacatggcgagcgaggccttggacgcccacgacaacttcggcatcgagatagctatgcgggagttcagggacttgttcgaggggatccagtccatgacctactgctgcggtaacttcggtgatgacaagggtgccagggccattgtcaaagccttcccacacataaaatgcactgtgctggcccctcccaagatcattgccaccaaaccggccgatggagcgaagataaactatgtcgaaggtgacatgttcagtttcattccacctgctcaaactgtcgtgctaaagcttgtgctgcaccacctgaccgatgaggagtgcgtcaagctcctggctcaatgccggaaggcgattcctccacggaaggacggcgggaaagttataatcggtgatattatgattgaccactctgggcttatgctggaaactcacctcctgatggacatcggcatgatgaccatgacaaaaggacggcagagagatgaaaaagaatggagcgagctcttcaccaaagcagggttcagcgaatacaagatcctgaaggaatttggagctcgtgttgccttcgaagtctatccgtgagattgcacctggactatacatatatatttacatacatatatgtatgtgtgtgggtgccttgcgtggcttggcgtgatgatgtcataaataaagagggtgggtgtgcttgcggtattcatggatggccatggatctgagcacatgacgttggatgctttcttaaggctctcgtggatcttctatatttggaagaagctgtaaaataatatatcgccatctagtgttggcgttggcttgtatgtactttgtacctgctttgttattttgtgtaatatcgagtaacctaatgtatacttgcttactactatcaaaaaaaaaaagcaggtccaaagtacatacaagccaacgccaacactagatggcgatatattattttacagcttcttccaaatatagaagatccacgagagccttaagaaagcatccaacgtcatgtgctcagatccatggccatccatgaataccgcaagcacacccaccctctttatttatgacatcatcacgccaagccacgcaaggcacccacacacatacatatatgtatgtaaatatatatatatatctcacggatagacttcgaaggcaacacgagctccaaattccttcaggatcttgtattcgctgaaccctgctttggtgaagagctcgctccattctttttcatctctctgccgtccttttgtcatggtcatcatgccgatgtccatcaggaggtgagtttccagcataagcccagagtggtcaatcataatatcaccgattataactttcccgccgtccttccgtggaggaatcgccttccggcattgagccaggagcttgacgcactcctcatcggtcaggtggtgcagcacaagctttagcacgacagtttgagcaggtggaatgaaactgaacatgtcaccttcgacatagtttatcttcgctccatcggccggtttggtggcaatgatcttgggaggggccagcacagtgcattttatgtgtgggaaggctttgacaatggccctggcacccttgtcatcaccgaagttaccgcagcagtaggtcatggactggatcccctcgaacaagtccctgaactcccgcatagctatctcgatgccgaagttgtcgtgggcgtccaaggcctcgctcgccatgtcgtgaatatcaacagacgcgtggg

SEQ ID NO: 111309 - DNA, 320 bp, Zea mays
  unsure (1)..(320): unsure at all n locations
  Clone ID: MRT4577_33003C.1
agcncgcggcgcgcggggaagccccgccgaggncgcggcggagcaccgccgcggaagacccnnccggggggggggggncgnaagacngcganccannnccgagcnncnaggangcaacagncaagcnncggcgaccaagagaacgaacncngctgagttntangagnnntgaaggaccctgacatctgtttggtggaaggntacctttggtggcanccttagccttacgtaaagaaaaaaggcggtngagggcggatcttccaggcaagttcgggggccttcgcacgagtttcgagggagtaagggctagggactacccc

SEQ ID NO: 111310 - DNA, 443 bp, Zea mays
  Clone ID: MRT4577_33004C.1
cttcttccctttattaagaacatgtacttactattatttaagggctcaaacattggagaagccaaagtgacaacttctgttattcgttttctaggactgttcttacccaagattttctaggttcttgccaagattttctaggttaattatcctgatcacaatcgttttaccaaacgtctatcacaaataccatctttctcatctgtgaaatgaaggaaatactaagcttctccatgaccaaagtccgcttcctataatctcacgtgagcctggcacgtagtaagcgctatagacattttaagtgtcacacgaagcttgaaaaaaatgagacgtgtgacattttagctatgactagtatttttttctacaatggaatcgttcaagatacactgctagaaaccgggtttcccgtcgtgcctaaaagtctcggtagcacgtgtctg

SEQ ID NO: 111311 - DNA, 203 bp, Zea mays
  Clone ID: MRT4577_33005C.1
acgcctgctgcgagtccgaacgcgaccaacgagacaggagagcgtattgaagttagctgagagacaccacggcgggctacaggtaccagatgaacgctacagttctggcttcacggtggagaacggaagaggctatggtctccaacgggggtaactagtctgaaaagtccaggatcacgaaagggcaggggctggcatctgaa

SEQ ID NO: 111312 - DNA, 582 bp, Zea mays
  Clone ID: MRT4577_33006C.1
cctcgaggccggccgggagtggtactacagcaagcggtccacactttcacggtcatgggctcagctctgagaatgcgtggctccaccatggcgatctccttgactgtgatggctcgcacctccatgaaggtgtcctccttcggcgacggtcgcatcaccatgcgcaagaccgtgggaaacgccaacgaggaggcgtctggcagcccctgaggacggacccgacggagcccaagtacgcgcggctccacttctacaggcgagcgcaccagataccacaccggctcagctgcccgcgactacggctgggacagcggcgggcatgcttcgctactccgatgacttcgccaagaaccgcaagctgaaggcgatccactaccgatgcgccatgatactggagctcggcatggttcatcgccgagctgttctcccgcaagggcgactggtgccgagaagacgaactggctcacggtcggatgccagagctgcaccgaggtggtgctggactaccgtgtgaaccacaggctgatccagacaaagagaatcctcgccatctggagcctgacaagtagtgctcaaggaaac

SEQ ID NO: 111313 - DNA, 489 bp, Zea mays
  unsure (1)..(489): unsure at all n locations
  Clone ID: MRT4577_33007C.1
aatatgcagattcgagattcatatacagaattaatatacagattacatccagatgatgtatatgaatccagatcaccagatgatattcataacaaatcaatatacatattccagattcatacatcagattcatacacatcacaaatcacattcacagaacgataacagtaccagtatatacatctcaagttccatatacatatcaaaacatcatctgaagtaccactttcacataacatgttaaccaaactaaagatctaaacactgtgtgctagcgtgtacaaacttagttgtgggaggtgttgcaaatttccatttttattgtagaatatcccttgttgatgaagaacttcacggcacataaagtaaagcaagtcttttacaaccttagccacgccgacggtnaccatatctcattctagccattcagcattgatcttggatgtaggaacatcctcacgattgaccatgtaatggaatgtgacacga

SEQ ID NO: 111314 - DNA, 1352 bp, Zea mays
  Clone ID: MRT4577_33008C.1
gtaccctccgggccggccgggaatctggatccacccccgccccgagccagctcgctataaaggcacccctctccctttctgtctccctcgcagctcagttactcactccggcctccagcttttcctttgcgccccagggccggaagagcccacacaccaccaccaccactagatagccagcgacgatcgagccgcgcgccggtggacgcgcacatacacgcggtagcttccttctcaagcctagctagccccatcctgcgcgcaggcggcggcagcgagaattgacgtgcgacgacgagcttgtgcttgctagctagagagcgaggatgtcgagccggaggccgtcgtcgcgtggcaacatctccgaggacgagatcaacgagctcatctccaagctgcaggccctgctccccagctcccgccgccgcggctccggccaggcgtcgacgacgaagctgctcaaggagacctgcagctacatcaagagcctgcaccgggaggtggacgacctgagcgaccggctgtccgacctcatggccaccatggaccacaacagccccggcgcggagatcatccgcagcatcctccgctcctgatcgcccacgcgcctcctactgcggcggcgccggccggcgcgcgagagagcgaggtcggcgacgacctcgatcgccgacaacgacgaccgcgcgcgcccgcgccccccggcccatctgttctctccaccggctggccgccgggagccgagctcaattagctagggtatatctcaacctctctctctctctctctctcgctcgctctacatgtgtgtgtacctttctcttcctttcacctgcctgtctcctccctagatctgagatcatgtggctagctctcccatatcaaaatgtactagctacacgcgcacgtatggtggtctctgctaagcctaagcttcactgggtagtagggtactagtagcactaggggcttaagcaagctaagcttatcctcctcacatcatcagaatcacattagctcgcaccgcactctctggcttctcgtcgatcgtcttcgtcgtcctcgctcctccgacccacatgatggctagctctccatgtgccgcttctcctctcgcacgtgccgcttctcctcttgtgttcgatatgttgtattgtttccatgtaaatttagtcggtggcctggatcgagttggctagctctctctacaggcaagagacaaccgaccgaccactactatcctagagcaaattgattatcgtcatgatggtgtactgttcaagcttttattaacgacttttaatttacttgctaaaaaaaaaaaaaaaatcatgccagaaaaaaaaaaaaaa

SEQ ID NO: 111315 - DNA, 508 bp, Zea mays
  Clone ID: MRT4577_33009C.1
gcagaggccgagcgagacgctactgcgtttctgcttcatcccattggtagctagctagcttacacggtcacgcatcgttttccgggccgactacggtggtgtagctcaacaaagcggggaaggaagactatgacctccgagagcgcgaggcccggtggcgtggggtcctgttctggcggagcgaggtgccagccacggacgctggtgcgggtttcggccggggtctccggagtggccgtgcccgctccctggatggctgagacgatgtacgacctgctccccttttacgatacggctgcgcccgccaagatcaaagcgagcgtaccagcgcgccgcgcgggggtggcacccggactcgtgccccggcggcgccgaccgcttcatgtgcggcgcggcatgcctacgcagtgctgtccgaccccgagcgcaggcgcagatacaacatccatctacgatgcggtgcccactttgtggacgcctggtaccgagcggcacacctcgcctgttt

SEQ ID NO: 111316 - DNA, 876 bp, Zea mays
  Clone ID: MRT4577_3300C.1
gtttcagtgcattaacccggggtgtacccggtccccaagtagtgatccgtgacctcccctcctccggcctcctgtcgccggcgtccgtcgctcgttgtcgagcccccgggagcaaaggcttccgccgcctgcgttccggatggagaatcccttcagcgtgaaggtgctgcaggtattcacaggtttcggcgtaggatgcggcgtcggcatcggcgtcggacgacccatctacctaggtatgatacctgggcttcagcaagttatgagtgctacaaggggagcaacagatgctttttctggtgtcacaaggcatgtcaattccgcgctaaggacggctggattaaagaacatcgaagcagggattggctgtggagttggtataggccatggttttggaataggaattgcattaaagccacgggtgcttcatggaattcagtcatctgttggggatccactgttccagaatgatacaaaggtggacttcagagatgcccctggaaatttgcatggaatggatagtgtacttcagttggtactgaagcaccaaaaggttattgaggaactgcaggaggaaaacgaaaatctgcgtcagattctgatagaggaacttaagatttcaccaaccaaattacaaataggtcataaaaatggagtgaaggcctactatccatgctcatactgctttgaatgtcgcgccaaatttcggacgtcaactcagtagcagtcggcagtggattttattagttgagtatcctttggtcgtttgttcagtagcttacagctgttgattttattagaacgatatcctctttgagaacctgcagatgagctctgattgttcagtacaactgtcattactgtttttcattagct

SEQ ID NO: 111317 - DNA, 247 bp, Zea mays
  unsure (1)..(247): unsure at all n locations
  Clone ID: MRT4577_33010C.1
atcactctgccccagtggcgccgctgaactcatcacccgaccacaaccacaggagtaaccatagcacagattgccaactcctttatgcacttaataatggattttgttttgcttctgaggtttatgaataagtggtngaaaaaaaaaaaaaaaaaaaaaaaaaaaaaaaaaaaaaaaaaaaaaaaaaaaaaaaatattctcaaaaaaaaatataaaaaaaaataaatggggtgtcgcccaccttttt

SEQ ID NO: 111318 - DNA, 1008 bp, Zea mays
  Clone ID: MRT4577_33011C.1
cattgggtacctcgaggccggccgggagcacacgctaatttgcattgctaaccgttgcaccggccatctccatctctcatagcctcacagtcacaagggtgaggagtggagagacgtcggtgagtttcaccatatggcggtggggaagggaggagggctgctggtcctcgtcgttgtaggtctgctcctgcacggcacccgtgtcgccgacgcgcagtctctccgggttgggtactacagccagacgtgcggcagcgccgagtccatcgtcgccgacgaggtccagaaggcgtcgtacagggataggggcgtcctggccagcctcatccggctgcacttccacgactgcttcgtcaatggctgcgacgggtcggtgctgttggaggccagtgaccggcaggcggagaagaacgccaagcccaacctgagcctgcgagggttcgacgtcatcgagaggatcaagcagaggctggaggccgcgtgcgcgctgacggtctcgtgcgcggacatcgtggccttcgccgccagggacagcgttaagctgagcggtggcctttggtacgccgttcccggcgggcggcaggacggcatggtgtcgcgggcgagcatgaccggcgacctcccgcctccgaaccagcgcaacgtggacctgctcgcgcagtacttctaccgcaagggcctgacgctggacgaaatggtcctcctctcagccgcgcacacggtgggcatcgcgcactgcagctcgttcgactaccggctgacgagcgaccaggacaagggcatggacccggccttccgcaacagcctacggagccagtgccagtacaaccccagcaactacgtgcccttggacgccggcagccagtacgcgttcgacaccggctacttctccaacgtgctggccaaccgcaccgtgctcgactccgacgccgccctcgcctcgccgcgcacagcagacaaggtcaagcagtggaagaacaacccggactggttcaagaacagcttcgc

SEQ ID NO: 111319 - DNA, 369 bp, Zea mays
  Clone ID: MRT4577_33012C.1
ttttgtgtactctagccggcaacatgaggccatcaacattggaaccgatggtggccattcatatacaagatgcataattgtacaacacgctacatgctcactttcttacaccatcacaggaccctgcgaagaattatggataacgaattacacctttacagttttccaacgaagccaccaaacgaatgcggatcgggggataacatttgcgcaatggaccaggtccctgcacgtgttgggaagtaaaacaatgataatgttcacaggtccatgaaaaaaaaaagagcaattaattgtacaacaagcgctggagaggagaattcattgcctttatttactgacatccaatgaactgaactataccaacaa

SEQ ID NO: 111320 - DNA, 478 bp, Zea mays
  Clone ID: MRT4577_33013C.1
ctaagcaccagcaccaacaccaccaccagtgatccgaccaaggtccagtaccgaccaaagacggccgtagaggagatggccgccttcgagaccgggaacaacaggttcgcccatacatgcgctcgcgtgcggcagttcatgatggatcagaacaggcaggtgctgatggatgacctcatcggctcctcctcatgccctagccactgtaactgacgccagtccctgtacctacggtgccgccgccgacagctgcctagagagaccgacgccggcttctaggactttgacgctggtccccgtgcgcaatagcattatcaccgagatcattaagccaaagcaggaggtcttagccaccctatccatcttctaccaatgccaggagacatcgttacacatcttgccggtacacatagccaacgaccttatacaaatggcatgtgtctgtgaccggggaggcgccggagaaaggggtgacgac

SEQ ID NO: 111321 - DNA, 343 bp, Zea mays
  Clone ID: MRT4577_33014C.1
gctcacaactaaccaattactccatcgatacttcgcacacataacaattcataccataggtgcatatgaacatctacaacctctacatgctctcatccaactacctgctctgaaccctctctcctaccagcaacagcacttgcacctattacatccacttgctctaccattcataacatccatactcaacaacatcacactattacaacaatcatctaccacctctaacatatctcctcatcttcatcgctcacagctaactacaacatgctcaactgatctcatctacatctctccctactgtcaatgcacctacatacctataacaacagacggtgctaca

SEQ ID NO: 111322 - DNA, 368 bp, Zea mays
  unsure (1)..(368): unsure at all n locations
  Clone ID: MRT4577_33015C.1
aaaaggggccgaccgacgcgaccgnncgggcccaaccagactccnggccagacctatcggccgacccgccggcacaagggcccggcggccaaagaggctngcccggactcctccacaccccaagaagaatatcactactccaatcacagcacgtggagaacaaagacaactgacaaagacaacaaatactacactgaccacggcgaatccagacgccattgaaaaaacgccaagcacaaacgcagctccaacagacttcaacactgacgccaattaataaaaacgacccatatggacaagaggcataccccaaacaccataagcaatcagcagttcccgacacacatcaaactagctgcaagaacaaa

SEQ ID NO: 111323 - DNA, 354 bp, Zea mays
  Clone ID: MRT4577_33016C.1
accccccaaggccaaattattttttggagacattaaaaaccacacctttggcataaaaagggctatgggaccatgttaaaaaatacagggggggcacgttaatgcaaacaaaaacttttccggaatttttgccccccgccttaggggataacggggactggaaaaaggaccaacaggggcgaaaaaaacacgggtggtgggggaaccggcaccgggagctttgatacataaacaactacaggaggggggaaaacaagccgggggggacaactgggtgacttgggggcttcgggatgttcattaatttggtgaataaaggggcacaaaccgggttacaggggggggggggggggg

SEQ ID NO: 111324 - DNA, 343 bp, Zea mays
  Clone ID: MRT4577_33017C.1
aagacgtagtccctcatcagggctgtgttttacatcatcattcagtgcctgggcgccatctgcagtgcgtggcgtcgtcaatgggttccatcatgggctgtacatgggcaatcgctgccgtgccaacgtcgtctcgcccggctataccaagggtcaccgtctccgcgccgagatcgtcggcaccttcatcctcgtctacaccgtcttctccgccacagacgccaataggaacgccagtgactcccatgtgctgatcctcgcccctcttacaatccggtttgccgtgttcctcgtccacctggccaacatccctatcaccggcaccgggatcaagcccgctctg

SEQ ID NO: 111325 - DNA, 439 bp, Zea mays
  Clone ID: MRT4577_33018C.1
ggggggagggaaaaaattataaagggggggggacccaacacaaaagggcacatggttagcctgttagcggggggaacccacacaaaaaaaaaaactgtttgccaaaagccccccaagaggccaggggaggacacaacccccccattagccattattattattttaaactcaaagcatgccatggcacccaactgactgactgacttaaaacacacacagggacccccctttactttattaaactttataattagctagcttcctccggccggcctgcaggggggagcacctaacttacttgcccaaattgcaggggtcccacttgcaattgccccccaacttgcaccccccgtccttaatttcggggggcgccttaaacccccccttggggtgccccttggatggggcgacacccataaccaaagcctggggggggggg

SEQ ID NO: 111326 - DNA, 641 bp, Zea mays
  Clone ID: MRT4577_33019C.1
attgggtacctcgagccggcgtgtcgactcacacacgctctcgccagccaaccgaagccaccgtacccacccacccaatggcggcagcttaccgccacgtcgcgacgcgcggcctcgccctggccctcgcggcggccgtggtcacggcgtggcagtgcgcggcgcagcgggcgccgtccggcccgggctgcatgccggagctcgtcagcctgaacccgtgcatggactacatgtccggcaacgcgacggcgcccgacggcccgtgctgctcggccgtgtcgggcatgcttcgggccagcccgagctgcctctgcatggtggtcggcggcacggccgcgacgctcggcgtcgccgtcgacggcgaccgcgcgctgcggctgcccgcggcgtgccaggtccaggcgccgcctgctagccagtgcaacgtcgcgggtgctccagtgccgtctccgatggtggggacgaacacaccaggggctccggcagcggcggcgccatcggacgccaatgtcacccctgcagggtctggatcgacccttccatcctccgacggagacaacggcagacctggaacgaccttcgtcttcgccgctgcggcactgccgttgctacatcgtctctgagacacgaaagttttcccg

SEQ ID NO: 111327 - DNA, 302 bp, Zea mays
  Clone ID: MRT4577_3301C.1
ttgcaggataggcagccaatttatcgtctccctcggcgaagcttcagcttccctttcgccgaacccaacggcagccatggccgctccctccgccgccctctccgtctccggtgcggcgcatacaaattcattcgtctgcaggaacaagaagctaaagtcaaacagaaatcgtttacatcgtgcagttccttcaagttctgagagtacaaattactgtagaaagttaaccatctgcagagcacagagtgaagattctaaaggtggaggaggatctttggctgggttttcttataggggggagc

SEQ ID NO: 111328 - DNA, 166 bp, Zea mays
  Clone ID: MRT4577_33020C.1
attgactttcaaaacaaatatagaggatctcatatggtccatgtatacgacttttacaagcccgatcgtgcgagtgaatatccaatgccatgaggtagcatgtttgtgatagctttccatcaaccaccgtatattcactcgcatgatcgctcttgttaaagtcgta

SEQ ID NO: 111329 - DNA, 641 bp, Zea mays
  Clone ID: MRT4577_33021C.1
gttctagatcgcgagcgccgccctttttttttttttttctcgaaaacacaggagagttgtgtatcattatattaaaaaggaaacaaggtccaaaatagaccaaaacagtccagtacaaactttaggcacctcacggtggccaaaaaataccatacgaaaaggggtccattaagaactaaaaagactaatcaagcctaggattggagccaagaggaagagatttttagccctgccatctcccaaagcactctctcatctttttttcgaaaaacgcaggagaactgcgcctcattatattaagaaggaaaaataaggtctaagtagaccagatacaaaatgaccgacttccttacggaggtcgaaaaactaaaaaaccaaaatagtccatatgagaacaacaacaaactgctgaagaaaaaacgccctccaaggctaaacctcaagaaggggggcagacagataggaaagccctttagctccagccatttcccacatccatctttcctccatagccatcctaatggctaaagtcacattaggaatccagttatcaaagacacatctgttgcggtggttccaaataatgtaagcacccaacgcaaccagagaattcagcccctttctaaccagaccactgaccg

SEQ ID NO: 111330 - DNA, 311 bp, Zea mays
  Clone ID: MRT4577_33022C.1
ctgccacctgccattgccattgtgtgagggacaccacgtcaaaggataccaatggccacaagatggctctgcgcggctacctgcccgtgccgccccctttggtacgcgccgcggacaccgcaagcgataaatccgctacgctcgactttttctcatcagcaccggcagcatctgtaaccgcacgggccaagggcgaccggcgcaggcacgcgtacatctccgccaatctcacgtcgcgccggggcagcaggcatacggttgccactgaattagagtcatcatccgcgatctccgttcctatctcatcgggg

SEQ ID NO: 111331 - DNA, 309 bp, Zea mays
  unsure (1)..(309): unsure at all n locations
  Clone ID: MRT4577_33023C.1
gccgcctgaacattggattctgactggaatcgaaaaaggcgatactccctaggcantccactagactctanatacatncgagggggaagcgagcagatcgatggcgatggctgagaaggtgaaggagaagagctgatgctccgcagnagcgacaaccaggagttggaggtgaaggagttggtggngatgcaatngatgaccatgaagaaaatggttgaggacggatgtgccgacaaaggaattatgtttatcaaagttacctattacatgcttgtgaaggttatggagtattgtaataagaatgttgag

SEQ ID NO: 111332 - DNA, 428 bp, Zea mays
  Clone ID: MRT4577_33024C.1
aaaaaaggaaaaagggcccggtaaaaaagcccccctaccaagttaaatgggtataaaccaaaagcccaaaccggccccttgggggcttggccccccatgcccaaaacaaccgcccatatagcccgtttaattcaacaagcacccttggaagccaaaaaaagccccccccccgattaaatgggccaaacccaccccggggagggaccaaagggaaatcctgtggggaaccccccccccgggaccccccggtttgaaaaagggcttgaacattttgaacggaacaaccccggccccaaaagggttctggaggcccaggttgttgttcccctcgaaaaaaaacccctgaatccccttaatccggcccccaaacttttaaaaccccgccttaaccaggggcccccccagccacaagggctccggaaaccccc

SEQ ID NO: 111333 - DNA, 681 bp, Zea mays
  Clone ID: MRT4577_33025C.1
atgagaagctgcgaaacgatttttagcaacattgacatctgggacgaggaccggatagaagcattactcaacacattcttggaggacctaaggagcgggtggctggaagaggttgggtggcccgtgatgctaccggcctacagcgtatcgaaaatggtcatcaatctatacaccaggatcatggcaaggagacgaacatcaactggaatctggggggtcctgacgcctgaacaaggtgcgagagggccattcatgctagctctgctcccagatgatggaccaactagatggtacatagatgaaatgggcgataagatgggcagcctatcatttttcaaaaagctcaagtattcatcatcagttgagggattttgtggtgcacaattttcatttcctaatattatgttgtgcaagtcttggtcacaggatttagccaccaacacagaaagccatttactaccagaaatgctagaagtggtcactggttatatttctcatgagcttcatcttatgcttacctcaattggagtgacacatatgatcggttgtggtaaatatttgatgggggtcatcggcttgctaactccatgggatcctggcatagtggtcttcaacctcaagttcctgatgctttggcttgagggcaagccaaatcttaagaagggggaatatcaatactga

SEQ ID NO: 111334 - DNA, 1131 bp, Zea mays
  unsure (1)..(1131): unsure at all n locations
  Clone ID: MRT4577_33026C.1
gnatcctgaaccggnacctgaagctccaggcctcaacatcctggcggcgtggcccagcggcgtcgggccggccggcatcccctcggacggccgcagcacggagttcaacatcctgtcgggcacgtccatggcctgcccgcacgtgtcgggcctcgcggcgctgctgaaggcggcgcacccgagctggagccccgcggcgatcaagtcggcgctgatgacgaccgcgtacgtgagggacaacagcaacggcacggtcgcggacgagtcgacgggcgcggcggccggcgcgttcgacctgggcgccgggcacgtggacccgatgcgcgccatggacccggggctggtgtacgacatcggcccaagcgactacgtgagcttcctctgcaacctcaactacacggagcggaacatccgcgccgtcacgcggcgcccggcggactgccgcggggcccggcgcgccggccacgcgggcaacctcaactacccgtccctgtccgccacgttcgtggccgccggggcggcggcggcggcggcggcgagtaggacgcacttcatccggacggtgaccaacgtgggcggcgggagcgcggtgtaccgcgcgtcggtcacggcccccgaggggtgcaacgtgacggtgcagccgcggcggctggcgttccggcgcgacgggcagcggctgagcttcgcggtgcgggtggaggcggcgctcggagggaggatggagcccgggagctcgctggtgcggagcggcgcgctgacgtggagcgacgggcggcacgtcgtccgtagcccgatcgtggtgacggtgcaggcgcctctgcagtgagtgctgtactgaccagctgccccgaccgccacgatgggaggtggagaggagaggacacagtctcagtgttctagcttttctgtactattaaggttgctgttagctgtagaatacgtcgtggaagagctgtatcgttagctactacgtaacgtaagctacactggaaatcatggagccctggagctccgttcttccccatttctttctttctcctcgccttgctgctaccatttgcttctgtattgccggcctccggcgtgcggttttgcacggaatggttttcaagtgcttcgtcgtctgcacct

SEQ ID NO: 111335 - DNA, 378 bp, Zea mays
  Clone ID: MRT4577_33027C.1
ttcgctttttttccaaagcgagcgagctaggcgttacgccggagctcgtttgggcggtggtggaggagagaggtaagggaggagatgaaggcggtggtacgagcgaaactggagaagagacttcgtgctcgctctcgatccatcagaggaatgacgctttataggggagatccgtcaagaactctccgactgacacatgcggtgatacaaaggtggtcaaagactatacctacggtgtggaagacagcgtcaatgacaaactcaaacccaatgttgcgggaaccactggcgttgatgaacagatgctcgctagtgaggcctagcagagaaagggggcactggaagccactacatctgagattctagctggtgaagacc

SEQ ID NO: 111336 - DNA, 713 bp, Zea mays
  Clone ID: MRT4577_33028C.1
actcctatgggcgattgggttcctcgaggccggccgggactaagtttagcttaatgtataaactaccggtgaccagggctagccctagggccatgcagcggaggcgaccgtcggggggtcaggaaagaaaggggcctaatatgtaatagaatagtagtgttaatgttaaattattgtcttgtgaaatcgcatagaagcgaaagagaggacacacacattaggctaaagcgtcggttaaaggcctcctacaccgctgcacagaaccagtctcgtcctcactgtcatcgccgatcacatgtcacaggctcgcaactccctgatcttagatgttaccaaagaagtatcttttcatgagaagcaatggatgtgatggagttatattcttcattaaggttttgttggcaatatgagctgcacagtttgaaggctttcttgatggctctaaacgtgatccattgaagacattgtcaattaaaaatgattctaatatgacagaggttgcaaaccctattatataaattggcgtgttcgtgatccatacgtcccgatgtatcttgtctccttactctcttataagatgctctctggaattcctttatgtttcataacaactgctccgtggacaacaatctcgtttgcctcctaaaaaaaaaaaaaaaaaatttgcggccagtctcagattggaagtacatgcaaagaaaatgtctataacg

SEQ ID NO: 111337 - DNA, 477 bp, Zea mays
  Clone ID: MRT4577_33029C.1
actcgaggcgggatgggccggggtggggtcctctctatgatgcagcgacggtgtgatcacagccggtggggcgagctcaaggcagcggctgcaagggcggcttcgaccctgtctacaggggcgccgccacggagggcgccaagcttggactcaagccataggaggtcgtgagtctggctatggcggcatccatccattctctaatagaagccaagcaaactgctgcgtgctccggcaactctggtggcgagtgacgacttcaataggctggtggtggtgacagtcatgtcccatccttatccatagctacaggcaggcaaagtcattttgaagtatgtttatttgatctacgcttggtacttgtgctactgaagttctaaacattaagcattgaatgtctaaacattgtcttcgctcggtatttgatgaattgaactatgttatatgtttgccaaaaaaaaaaaaaaaaaagcggcc

SEQ ID NO: 111338 - DNA, 253 bp, Zea mays
  Clone ID: MRT4577_3302C.1
atactatcaccctcgaggtccttagcagctacataatcgacaatgtcaaggccatgattctagacaaggaaggcattcctccggatcagcagcgtttgattttcgccggaaagcagctcgaagatggaaggaccctggccgattacaacatccagaaggaatcaacccttcatctcgtcctcaggcttcgtggtggcatcattgagccttccctcatggctttggctcgcaaatacaaccaggacaagatgat

SEQ ID NO: 111339 - DNA, 412 bp, Zea mays
  Clone ID: MRT4577_33030C.1
ctcgtacagtatacttgcgcgccagccatgtcgtccatggtgtcccgagccgcggccgcggccgcgctgcggtgccacgtccgccggcccggggccgccttctcccgccccgcctccacgtcggcggccaccgccgagcaccacgcgggccacagtagggccagcggcaggctcccccgcggcgactacgtgccggtgtacgtggcgctgggcctgatcgcgctgtcggtgacgctgggcctgcacacggcgcggcagcagcttgcgtacgcgcccaacgtgtgggtggacaagaagaagctggagacggtgccggaggtggcggcgccggagctggcgctggacgaagccgagcagttcgtggacaggtcgctcttccgcaaggtcgcaaccgtgcaagacgacccgagcc

SEQ ID NO: 111340 - DNA, 424 bp, Zea mays
  Clone ID: MRT4577_33031C.1
ggtccggaattcccgggtcgaccacgcgtccgctcaacctatcacaaagatatcggaaccctctatctactattcggagcctgagcgggaatagtgggtactgcactaagtattttaattcgagcagaattaggtcaaccaggtgcacttttaggagatgaccaaatttacaatgttatcgtaactgcccatgcttttgttataattttcttcataggaataccaataataattggaggctttggaaactgacttgtcccactaataatcggagccccagatatagcattcccacgaataaataatataagtttttgactgctaccaccatgatttctccttctcctagcatcatcaatagcgcaagcaggagcaggagcagcatgaacagcgtaccgacctgtacgcgcgaatgtagcccatg

SEQ ID NO: 111341 - DNA, 353 bp, Zea mays
  Clone ID: MRT4577_33032C.1
gatttatgtgcttgtttatgtgcttggcagttcccatgctctccgtcagcgtcagcatggcagcattcacggcttcacgcttgcgtgttaccgtcggactcgacgaatatcatcagcctgagactcgtgtctttgcgcattacggactcgggtactcgtccggcatttgcatgtttcgttactgacctgcttaaggaagggcaaggcgaggcggcgatttgatgttagttagacgagacgagacttaccgaagttgatagttgagggccgggcgcaaaacacggagctgacgagcgcggcgcccccctcgctttgaggcgaaggatatagatcgccgcctgccgtctccgctt

SEQ ID NO: 111342 - DNA, 376 bp, Zea mays
  Clone ID: MRT4577_33033C.1
tcgcgatctagaacttagtcttttttatctgatttgagcagttctcatattttgattatatcatgctgaacaagtctctcaacttctattgcaggtggcaaatccaataaccaaatatcctttcttatatttggctgggtaattctttgtttttcatgatacttgtcaaactttctatgtccttaacgaataatcacatatgcattaaccataaccccactgactatgagtttggaagagttgcttccaccaaatcaacagaagtactcaaacatagtcatgcttagatcagccctggtggtgtcaaccctcctcattgctctatctgtacccttttttggtaagttcatgatcgattggtgacctataagatggt

SEQ ID NO: 111343 - DNA, 317 bp, Zea mays
  unsure (1)..(317): unsure at all n locations
  Clone ID: MRT4577_33034C.1
caacaagcaacagagaaagcggaaaccagnaccaacaaaagagcaacaanggcgaccaagggaggnacccaccgaaggcgggggggcacaaacagcaagcgnagcaaacgcgacaaaanacccccaaggcacacaagcaccaagagcgacccaacgaaccccagaccngacaacaaagaaagcaacaggaggggaaaacccaacacaacaacccgaaaagcnccaacaagcaaacgcagcaagcaacaaaccaaaaacacccgagaaacaacaaacgccagccccaacaaaggggcaggcaagggaacaaaccaaca

SEQ ID NO: 111344 - DNA, 483 bp, Zea mays
  Clone ID: MRT4577_33035C.1
acgaaaaccaatcaactttatacctaaaccgtctcaaccgattgcgtttaaggataacaggctactgctagaaaaatgggccccacttatcagtctgacaggactcataacgttgatcacaccatacatctccagaacaaggttactgtactacactaccatggcgaatgaaccatgagctaccagcacatacttgacttagacactccgctggcggagcacaaactcatatactgtactatacatgtaggccaatgccacactatctgaactctggactgactgattgatgctctcttgaagaaccgcggccctcaatcagagttgccataggacacacgatctggcacaatcagtcaacacgagaagccatatcttgatgccgcatccaacaggcacaatgttaacagctactgaagtcagaccctctatctgcacactgtgtacaggataatgcaggtagaccatataactctcatcgcc

SEQ ID NO: 111345 - DNA, 472 bp, Zea mays
  Clone ID: MRT4577_33036C.1
gaccgcgcggtgcctctatttacccttacatacagcacatatgaagcacgcaccggcaatggcatggggcgtcgagcctgtctcggaacctaaaggagatacgcgtatctcttctgccatcatacccgggcagctgccgttcgccgcggagctcattaacaagactatggcgacatcaaggaccgtagccccggcattcgataccttgtccagcagtgctccggtgggctgcaccaagtttgggagcgctacgatctgggtgtcatacagaagcctcatcttggctgatcccaccatagtgcagatggtaatacgctcaaggagctggccaagtgcgccgttgagtgttaaagccatataccttgggcgctctaaactggcatgacctactgaccaaactaaatgacgccttatgggtgagcaatagttactctatcatcaactttgagctgttcctggcattaagtctgta

SEQ ID NO: 111346 - DNA, 2021 bp, Zea mays
  Clone ID: MRT4577_33037C.1
aaagaaaatagagagggagaagacagtctgagggcgtgtggtatgcgagcggttgtgggtggcaggttgctcggtgtggcgctgcgtgtctcgtcacgctcgctcctggtgaccgatgaatgtgccaacatgatgcttggttgtgggtgctggtcggatgaggcctctcctgtatcatcctccggggtgaattcactgtggtggaatgagcctgagatagagttgaaggaggcggatcctgtagatctcttacccacggaccccttttggatgaacctggaaactacgttcaaagttgcgagcgcctgttgaatcgggaacctcacgttcatgtctggtaccgggcgttttggaagttgcgatgacgatgttttttacgatgacctgagtttgtacttgaaccgggcttttatgctcaagccggagccatggagtagtgtctatactgggagcattgaccattcttttgtgagtggaggcctctcccatactggaggcaaggattaattctgacatccgttggatggattcacttataacattggggttatgtgatcgatcttatagctcttgtcacccagctttgtcatgctgtgataatatggttgaggaggacccatctagctcttgtaacccagctttggcatgctgggatatggttgatgttgctcctgtccaggagggaaatgatgcacatgaagcgatggtgtttgttctgagctatcttggcttacgtgacatcctctctgttgagatggtgtgcaagtcattgcattcagctgtccggaacgaaccctttttatggaagtgcatccatattgactcgcgcttggggaagaagatgtctgatgctgatcttctgtgcctgacacagaagtccccaggttctatgcagtgcctgagtcttatgcactgtaacaacatcacagatcagggattgaaagctgttttaaagagtaatctacagttaacaaagttgggcatttttggtgctttccggattacttatcaaggtcttattgacagtctgaggtcatttaatatggaaacagatattggtataaagaaactcagagttacaaatcacgtcactgcatcagaagcgcaatatgaagagttgttgtccttgatgaaaatagacaagaagatggcattacacaaacaggagcctcggatctttcattctggtcgtcttttactagatctttatggtggatatgttcccgattctttcgtaccagagcttcatgatgaatttgctcttgatattgagaagtgccctctttgtccaaactacaaacttgtttatgattgcccatcaaaggagtgcaagaacagcagacatagtacttgcagagggtgtattgtttgcatctggagatgtttgctatgtgggagatgtatagacattgccaatgtgttccaagagtcgttttgtttggggaaactttgccgtgactgtgtcaaatatgaagacttgctccccacagaaaagtagatgttcgaatctgttatcttcattggatggatacagttttaacttttaacataacatttcttctgttgattgatgctcccatccatcagtatcttgactgagtatttctaacaaggaaaagaaaaaaaagaggtataccaatttgctatcggtgtagttgcaatgactgaaattgtttttgcttacaagaaaaagaaaaaaaacggtataaccagaagacgatcatggtttccctatcaaggtgtcagccgacaactaacaattgcggtatgtttccttttggaataatcaagtgctctgctccggagtttggacaacagtacaaacattctcccagcaggctgcttgatgctgcatcttcctggaacatcagaagttattgatttcatttgccctcaaaatatcagatgtatctatctgtccaatgttacctatctagctgtgtggctgtgtgctatgttacttgacaattgacaagttattggaataaataaagacaaacttctaacttaaaaaataaaac

SEQ ID NO: 111347 - DNA, 1047 bp, Zea mays
  unsure (1)..(1047): unsure at all n locations
  Clone ID: MRT4577_33038C.1
gccggccgggtcggggtcttttcccccgccgtctacaaagacttcacactcgcagccgcaggctgctccggcagactcctacaccgggaagacttctcctctcctctctcctctctcctctctcccttccactcgcgctctcctggataccgcgcgcggcgacgagatggcgatagatcacgcgacccctctcgggctgaagcggagaggcgccatgggcggaggcggcgagtgcgacgacggcagtgatacccggcggtggccgccgtggctgaggccgctgctgtccgcgagcttcttcgtccaatgcagggtccacgccgacgcgcacaagagcgagtgcaacatgtactgcctcgactgcatgggcggcgcgctctgcgcgctctgcctcgccgcgcgccaccgcgaccaccactccatccagatacggaggtcgtcgtaccacgacgtgatccgggtgtcggagatacagaaggtgctggacatcgccggcgtgcagacgtacatcatcaacagcgcgcgcgtggtgttcctcaacgagcggccgcagccccgcccgggcaagggcgtcaccaacacctgcgaggtctgcgagcgcagcctcctcgactgcttccgcttctgctcccttgngtgcaagatagtgggcacggcccgtggttaccgtcccaagaagaagcacggggcggcggcggcggtaacaagaggaagagagcggcgcttaaggacgtgcgctctgactcggaggagtcgtgcaccagcaccagcggcgcaaatgccagcgacgggcgagagcggtaagcacacaccagcggtgcagcccgtgctgctatagttttgcttctttttcgcgctttgttacttcagttggtactaagttttgcagccttgtacattgtaatatactagtactactctccaatgctagatgtacatatacatacacagtgttggcagtatcataatgtgggggtagcagtaggcagcgaggtgtgttcgtatgcgcatcatcagctgtgtaataaaaataaagaaatgcttgct

SEQ ID NO: 111348 - DNA, 213 bp, Zea mays
  Clone ID: MRT4577_33039C.1
catgccgcaccgtcacagctctccacggaatccacgaagggggatgttgtgttaagctgaccaaggccacacaatgactgatctacctacatctgggtgacatgccacaccggctagtgacatcgtacttaccacacgggacactgttcacctgtggtgtggtcagcacaatggaggctttgtcacagaagcggtatatctccccttgatgat

SEQ ID NO: 111349 - DNA, 394 bp, Zea mays
  Clone ID: MRT4577_3303C.1
cgagtccgcttttttgtaatgatagatatgaataactttcatgcaattcacgagaaacaaattcaaatatttttacaaccaaacaatgataaagttacatattgcagcaaaataagatacatcgtactattagctggagtccagcggatcacttgtgtaacgccaatgccattgccaagtatgcatgtttcagttcttgtaggttctcaggctctgaacgaattcgtctatgtacctcttgtggcactcgtcgtctgccacaatctcctgcatcctcttagcattggccacaaagatcctcttgctctcttcttcgcacatgacagcccgattcgctgtggcgaatgttgtcaccaaggaacgcttcgtcactcttctccttccgcaccttgac

SEQ ID NO: 111350 - DNA, 1212 bp, Zea mays
  unsure (1)..(1212): unsure at all n locations
  Clone ID: MRT4577_33040C.1
acattccaaaccagtgtctacccagtgctgtgacactcgcgacctttccctcctcccggtctacaaaggcctcctcggctttcctccgcctccgcttcctccctccaaagccccccctccccctttctcctctttccctcccaagcaaatcctctgcgctccccacgcctccttcttcttcctccgccgcttgccgtgtttggttcgggaccgaaatggcattccacgacgaggcgccgctgctgctcaggatcaacaccgccagaggcggccacatgggcggaggcgagtgcgacgaggccgagaaccagcggtggccgccgtggctcaagccgctgctggcgaccagcttcttcgggcaatgcaagatgcacgcggacgcccacaagtgcgagtgcaacatgtactgcctcgactgcatcaacggcgccctctgctcccagtgcctcgcctaccaccacggccaccacgccatccagataaggaggtcctcctaccacgacgtgatccgcgtgtcggagatccagaaggtgctggacataaccggcgtgcagacctacatcatcaacagcgcgcgcgtcgtgttcctcaacgagcgcccgcagcccaggcccggcaagggcgtcaccaacacctgcgacgtctgcgagcgcagcctcctcgacaccttccgcttctgctccccaaagacttcgcactcgcagccgcaggctgagttgccagactcctacaccgggaagacttctcctctcctctctcctctctcccttccactcgcgctctcctggataccgcgcgcggcgacgagatggcgatagatcacgggacccctctcgggctgaagcggagaggcgccatgggcggaggtggcgagtgctgcgacgacggcagcgagacccggcggtggccgccgtggctgaggccgctgctgtccgcgagcttcttcgtccaatgcagggtccacgccgacgcgcacaagagcgagtgcaacatgtactgcctcgactgcatgggcgacgctctctgcgcgctctgcctcgccgcgcgccaccgcgaccaccactccatccaggtcagtggagagcctagcgctgtgcgcagactggtgcagttcggcagttcaagcggctgcgttctcgttccccagtgcctctgcctccagcacatttcattcccctccatcgcctgctccatccgtctctctttntgcgt

SEQ ID NO: 111351 - DNA, 985 bp, Zea mays
  unsure (1)..(985): unsure at all n locations
  Clone ID: MRT4577_33041C.1
ccgggcttccactcgcagccgcaggctgctccggcagactcctacaccgggaagacttctcctctcctctctcctctctcccttccactcgcgctctcctggataccgcgcgcggcgacgagatggcgatagatcacgcgacccctctcgggctgaagaggagaggcgccatgggcggaggtggcgagtgctgcgacgacggcagcgagacccggcggtggccgccgtggctgaggccgctgctgtccgcgagcttcttcgtccaatgcagggtccacgccgacgcgcacaagagcgagtgcaacatgtactgcctcgactgcatgggcggcgcgctctgcgcgctctgcctcgccgcgcgccaccgcgaccaccactccatccagatacggaggtcgtcgtaccacgacgtgatccgggtgtcggagatacagaaggtgctggacatcgccggcgtgcagacgtacatcatcaacagcgcgcgcgtggtgttcctgaacgagcggccgcagccccgcccgggcaagggcgtcaccaacacctgcgaggtctgcgagcgcagcctcctcgactgcttccgcttctgctcccttgggtgcaaggtagtggggacgagctctgtcgcattgcgcgtttctatacgcgtcgttgtcaacgtccccttctcttcttgttttgttggtacgcgcgcgcgcagatagtgggcacggcccgtggctaccgtcctgggaagaagaagcacggcggcggcggcggtaacaagaagagggcgtcgccggcgccggcgcttaaggacgtgcggtctgactcggaggactcgtgcaccagcaccagcggcgccagcagcgacaagagcagcgtcgtgcagagctccccttcgncgncgacctctgccagccaccgnccccccgggaacaagcgccgaaagggcatcccgcacggtcgcccttgggcagcctcatcgtcgagctctaggactcttcgt

SEQ ID NO: 111352 - DNA, 392 bp, Zea mays
  Clone ID: MRT4577_33042C.1
acgttattacctctctcaaaaaagaattcaaaagagaaaaaaaaattaaataattttcaataaaatatgtcgaaacacgggcaaaaaaagtataaaatgtacgaagcttaagaatgatcatgaaggtcaagctattgctgactgggaaagatgcccttctggatgaagattataaaatgggggagggcccaaatggtggggtggttgcaaattgtgcccaattaaccttgatagtgccttgctgattcaccataagtcgtatgctggggtattgccttttgtacttccggatgggtggacagtagcagttttcaatatgtacgacctgcttaggggaattctgttgtgcctcgagttcaacaacttccatgtgcttttgttttaccacctgg

SEQ ID NO: 111353 - DNA, 1210 bp, Zea mays
  unsure (1)..(1210): unsure at all n locations
  Clone ID: MRT4577_33043C.1
aattcggcacgaggggaagacttctcctctcctctctcctctctcctctctcccttccactcgcgctctcctggataccgcgcgcggcgacgagatggcgatagatcacgcgacccctctcgggctgaagcggagaggcgccatgggcggaggcggcgagtgcgacgacggcagtgatacccggcggtggccgccgtggctgaggccgctgctgtccgcgagcttcttcgtccaatgcagggtccacgccgacgcgcacaagagcgagtgcaacatgtactgcctcgactgcatgggcggcgcgctctgcgcgctctgcctcgccgcgcgccaccgcgaccaccactccatccagatacggaggtcgtcgtaccacgacgtgatccgggtgtcggagatacagaaggtgctggacatcgccggcgtgcagacgtacatcatcaacagcgcgcgcgtggtgttcctcaacgagcggccgcagccccgcccgggcaagggcagcgagtacacctgcgagtgctgcgaccgcatgcacggcgcgctctgctccttctgctcccttgggtgcaagatcgcgggcactcgcccagatacggaggtcgtcgtaccacgaacgtgatccgggtgtcggagatacacaaggtgctggacatcgccggcgtgcagacgtacatcatcaacagcgcgcgcgtggtgttcctcaacgagcgcccgcagcctcgcccgggcaagggcgtcanccaacacctgcgaggtctgcgagcgcagcctcctcgactgcttccgcttctgctccctcgggtgcaagatagtgggcacggcgcgtggttaccgtcccaagaagaagcacggcggcggaggcggcggcggtaacaagaggaagagagcggcgcttaaggacgtgcgctctgactcggaggagtcgtgcaccagcaccagcggcgccagcagcgacaagagcagcgtcgtgcagagcttctcgccgtcgaccccgctgccgacctccgctagctaccgccggccagggaacaagcgccggaagggcgtcccgcaccggtcgcccttcggtagcctcatcgtcgagttctaggactccttcgtcagcgcctaggcaatgcgctctctactgtgcagtacatgacaaagcccagaagggaagggaataacaggacgcgcttctggacgtggaggaagaaccgggagggtaccc

SEQ ID NO: 111354 - DNA, 1116 bp, Zea mays
  unsure (1)..(1116): unsure at all n locations
  Clone ID: MRT4577_33044C.1
gaccctcgaggtcttggccgggctttttttttcgtcttttcccccgtctacaaaggattgacagacactcgcagccccaggcagagactccttccctgcgaaggcttctcctctcccctatcccccccaactcgtcgcattctcctcggttcagcagcgacgggatggcgatagaccacgcggcgcgtctcggactgacgagcagaggtgccacgggaggcggcgggtgcggagacgacgacgccgagaaccggcggtggccgccgtggctgaagccgctgctgtgcacgagcttcttcgtccaatgcaggatccacgccgacgcgcacaagagcgagtgcaacatgtactgcctcgactggtgtgnaccggcgcgctctgctccctctgcctcgcgcgccaccgcgaccaccactccatccagatacggaggtcgtcgtaccacgacgtgatccgggtgtcggagatacacaaggtgctggacatcgccggcgtgcagacgtacatcatcaacagcgcgcgcgtggtgttcctcaacgagcgcccgcagcagccccgcccgggcaagggcgtcaccaacacctgcgaggtctgcgagcgcagcctcctcctccgcttccgcttctgctcccttgggtgcaagatagtgggcacggcccgtggctaccgtcccggcaataagaagaagcaccgcggcacttaaggacgtgcggtctgactcggaggactcgtgcaccagcaccagcggcgccagcagcgacaagagcagcgtcgtgcagagctcccctccgccgccgacctctggcagccaccgcccccccgggaacaagcgccggaagggcgtcccgcaccggtcgcccttgggcagcctcatcgtcgagctctaggactcttcttcagcgccaaggcaaggcaaggcaaggcaacgcactctgtactgtacatgacatagcccccgaagagaagggaataacaaacagtaagccgtaagatcggacaatccttagttgtgcacttgtgctgctgtgctatagtttgcttcttctcaggttttgttttgcttttacagttactagcagtggtaccatcagtaagataaccccgactaatttttgc

SEQ ID NO: 111355 - DNA, 617 bp, Zea mays
  Clone ID: MRT4577_33045C.1
ccccgcgtccgcttttgtaaatcggatttgttttacttgcctgcattattctcttttggagaagtttcctgacaatgtagatatatctgtagaggctgctactcttggaatttctctcgattgctttaaaggaaggtgtagaactccagacatcattaaattggggtgatgaactatatgatggtgaatcaaataaacttcagagtattggccttcagtcaggagatgcctactcaccgcctgaaaattggtgtgcagaacgtttagggagtcagagacctggcaatctccctctgcacgaagttttacaggttcttgtttattgtttgcaaagttcacttaaatttgttcattacaaaatgttgcagtttatctagacacatgcatgttatatacaaaactgtttctttcctgttatcgcatatcctgtttttggtaggcttagaatactaagttgtcaatgtgtaaacaaattatttatagaaggattgcctttgtattagatcaaatttagctagctaaagctgtcatgcttcgcaaacaaagttatatatcttgttaacttcctgttttacaggttttatttaaccacttggcatgctaatatgaacatcaac

SEQ ID NO: 111356 - DNA, 298 bp, Zea mays
  Clone ID: MRT4577_33046C.1
agcagtggtaacaacgcagagtacttttttttttttttttttttttttttgcaaatccgctaaaatgtttagcttccgctatagccggttatagctggacttagctattctggaacccagccgctaaacctcttagcccgcgatttaatacactggttgcaactcaacacaactaccaatgtcaacaccatgagctaaatcctctaaattcttcggatggagtcttacagcaactcactctgcacaaatatgtgattgtgaaggacatccccgcgtactctgcgttgttaccactgct

SEQ ID NO: 111357 - DNA, 376 bp, Zea mays
  unsure (1)..(376): unsure at all n locations
  Clone ID: MRT4577_33047C.1
gtatgatgttttctttttcatagtatgtacttcaacatgtgtgtggttganttaacttatttcttttgttctttttattgttggatgtaggggacaagaacctatcttaatgaaagacgagaggttgtctatcggaggacactgattgtggagcgataaatggtttccagaggatcgaacacaaaaaaaccatggccgacacacggtccaatgagagaagacaagtggaaaggcagtttcttataaagcacacaatagggagcttaaagattatatcggacagctaagccctgctgatgcaagcctgccgggaacgaagaggcttgcaactggcaagaaggctggagatccatctgatgaaactggtaaaattata

SEQ ID NO: 111358 - DNA, 170 bp, Zea mays
  unsure (1)..(170): unsure at all n locations
  Clone ID: MRT4577_33048C.1
gtccggnaattcccgggnntcgacccacgcgtccgcgngcctttccagnncctgagggactccggaggggacgcgtagcctcacagaggatcgtgngncgggcggctgttggcggtgccgccctgtgtgcctggtcggctgcgggtgctgcggtgcccgagtgttgtgtg

SEQ ID NO: 111359 - DNA, 436 bp, Zea mays
  Clone ID: MRT4577_33049C.1
ggagcatctggaggggtgggctggtgcagccaggaggctgcgacgcctaggtacccagcactacttttttagtgctagctgtggtgctcggcgggtggcgctacccatgctgccatcacatctcttggggggggggggcctaatgtaacctgtttctgggttgggcgcctgcgttctcgagccggtgcaccatgcctgcccccgggatgtggcctacagagccgctagccgccgagcctagtagggaaaattcggccgggtcacgccggattgactccgtgaacatggtgtcccgcagcctttagccttctttcgcctgcttgcaggttcgagtgacggatgccaatcgtaacctcctaactaacatacacagcgtcggagggggttccaggttcaccgtggtggcggctccagtggcacttcaccggctgctgtg

SEQ ID NO: 111360 - DNA, 1524 bp, Zea mays
  Clone ID: MRT4577_3304C.1
cattgggtacctcgaggccggccgggagcagtctcgatggccgccgccgactcctccccgctccacatcgtcattttcccttggctcgcgttcggccacttgatccccggcctcgagttcgccgagcgcctcgcagagcacggccagcgcgtgtctttcgtctccacccagggcatcctccgcaggctccgcccggtcgcgcccgcgttggcctcgctcatcgacttggtggccctcccgttcccgcgcattgacggcctccccgatggcgccgaggccactagcgacctcccgcccggcacggccgagctccacgtgcaggccatggaccgcctcgccccggccttctccgccttcctcggtgccgcctgcgccgacgggagcgaccgtaaggtggactgggtgctcctcgacaacttccacgcgtccatggcggacgtcgccagcgagcacaaggttccctgcatactgaacatgccctactccgcggcgacgacagaggatttcggcattccagacccgtcggttctaccaatgttccggccatttgtcgagaccttcaagagatgcaaagtcatcgctgctcgtagcagcttcgagttggaaccggagtccctgcctctcatgacaaagatcctcgggaagccggtcatccccgtgggcctacttcctccggcgcccgccggaggcaacacgcagcgcgacgacagcgcagccctgtcgtggctcgacgagcagccgtccaagtccgttgtctacgtcgccttcgggagcgagtacccgatgaccgtcaagcagctgcacgagatcgcgcgcgggctggagctcgccgggacgcgcttcctctgggccctcaagaggcctagcgtcgcccaccccgacgaggacctcctgccgccaggtttcgaggagcgcacgcgcggccgtggctccgtcgtcacgggctgggttcctcagaccagcatactggggcatggcgccgtcgccgcgttcatgatgcactgcggctggggctccaccatcgaggcgcttcagtacggccatcctctggtcatgatgccagttctcgtcgaccacctgtccaccgcgcgggtgatggagcagcggaaggtcggagtcaaggtgcggaaggagaagagtgacgaagcgttccttggtgacaacatcgccacagcgatacgggctgtcatgtgcgaagaagagagcaagaggatctttgtggccaatgctaagaggatgcaggagattgtggcagacgacgagtgccacaagaggtacatagacgaattcgttcagagcctgagaacctacaagaactgaaacatgcatggtattggtcagtgcactcagcatacttggcaatggcattggcgttacacaagtgatccgctggactccagctaatagtacgatgtatcttattttgctgcaatatgtaactttatcattgtttggttgtaaaaatatttgaatttgtttctcgtgaaaaaaaaaaaaaaaagtcgccaaaaaaaaaaaaaaaaa

SEQ ID NO: 111361 - DNA, 204 bp, Zea mays
  Clone ID: MRT4577_33050C.1
cccacgcgtccgacgcatattgcaccagtttatccatctagaggccgtcgacaggggaatggatgtctttttcgtgtagcagcatccaccgccgtctcatcctctcagccgtcgtccttctcttcgtgctcgcggctgccagcgccagctccggtaccttctgcgtgccggggtggtccatcccgcacaacccgctccctatct

SEQ ID NO: 111362 - DNA, 158 bp, Zea mays
  Clone ID: MRT4577_33051C.1
cgaattagatagttattaatacaattagcttggctcgtgggctgcaacaacgacggaggcggttgattcatggacggaaaacaggctgacctctgcatggacgacaacgaggtctctgagcgtcactgcgatttatacatgtgctcacggcacggact

SEQ ID NO: 111363 - DNA, 2053 bp, Zea mays
  Clone ID: MRT4577_33052C.1
gagcttatctagtcggcggccgctcgcgatctagaactactcttttagcaaacacaagaaacctaaggccccacttattggaggaagcaatctaattatctgtccaatgacactaattagtcagtggaaggcagagattgaagctcatactaagccaggcactgcgaatatatatgttcactatggacaaaacaggccaaaagatgcaagcatcattggtcagagtgatattgtcctgactacatatggtgttgtgtcatcagagttttcaatcgatggttcaacagaaaatggggctttgtactctgtacattggttcagagttgtgcttgacgaagcacacatgataaaatcttctaaaagtttgatatccctagctgcggctgctctgactgcagatcggcgctggtgtctcactggtacaccaattcagaacaatttggaggatttatacagccttttccggtttctgaaagttgaaccatggaggaactgggctttgtggaataaacttgtacagaaaccatatgaagaaggtgatgaaaggggcttaaagctactgcagtccattttgaagccaataatgctgagaaggactaaaaattgcacagacaaggagggcaggccaatccttaatttaccccctgcaaacattgaagtaaaatactgtgttttatctgaggctgagaaggatttctatgaagctctatttcgaagatctaaggtaaaatttgatcaatttgttgagcaaggaagggttctgcacaactatgcttcaattttggagttacttttgcgcctaaggcaatgctgtgatcatccattccttgttatgagtcgtggggatacaaaagagtatgcagacctaaacaagcttgcaaagcgttttctgcgtggtggtaatggtgctgttaatggtgattcttgcatcccctctagagcttatatcgaacaggttgtccaagaattgcaaaaggatgaaggggagtgccctatttgtcttgaagcctttgaggatgcagtattaactccctgtgctcatcgtttatgccgagagtgtctcttatctagttggcggagtgcgacagcaggcctttgtcctgtctgtagaatgtcaatgagcaagcaggaccttataactgctcctactgataaccgctttcaaatcgatgtcgaaaaaaattgggttgaatcttccaagatatctgctctcctgcaggagttggaagctcttcgcagttcaggcgccaagagtatcgtgtttagccagtggactgcttttttagatctgttgcaaattccactttctaggaataatttctcatttgctaggctggatgggacgttgaatcttcagcaaagggagaaagttataaaggagttctcagaggacaaaggcattttggttctgcttatgtctctgaaggctggaggtgttggaatcaatcttactgccgcttctaatgcatttgtcatggacccttggtggaatcctgctgtggaagaacaagctgtcatgcgcatccatcgaattggtcaaacgaagactgtttctatcagaagattcatcgtgaagggcactgtcgaagaacgaatggaggctgtgcaggctcgaaagcagcgaatgatttctggagctttgactgaccaagaagtccgcactgcacgtatagaagaactgaagatgcttttctcctgagactacaaaagggctgttgtgcatcggatggtcggcaattcggcatggctaaaacaagatggctggtagccagaatgttggaaggtaagacgagggtaggaaattgcacgcccaaatatcttggcgtttagctgctgttgtgcgcacgatttgtacatcatgaatggttaatggctgacaagagtccaagacgcttcattgagtgaaaatcgaaagcatcatctcaaaattgaatatttctgtttgggttttgtataagtagataaactgaacatttgcagtaatacgaaggcagctacctgctcgatcattaatttaacaataaataaatttggtaaggtggtcaagtatacg

SEQ ID NO: 111364 - DNA, 383 bp, Zea mays
  Clone ID: MRT4577_33053C.1
attttccttctcccgtaccaacctgctccatttttggcgagcgttcaggcgaaagaggaaaaagagaggagtgcaccgcgagtgtacagctcgaagatccacttccaagtgcttccttttaggataatcttatataccttcaagcaaatagacaatcggaggaacttcacaaagatggaaattactccaatatcacaactacgtccaggaaagttaaattatgctttacatgtgcgaatatctagaatgtgggagtttagaggcacaaatgaacagaacgacatcaaacaccttgaccttgttctcatcgatcaaaagggaaattcaatatatgcagagattccaccagatgcaattgctgtcttaaaaagccacatctacac

SEQ ID NO: 111365 - DNA, 304 bp, Zea mays
  Clone ID: MRT4577_33054C.1
tcgcccacgcgttcgcccacgcgtgcgcccacgcgtccgcccacgcgttcgcggacgcgtgggcaaagagatgtcgtgggaaaggaacgtgtcgtcctccctagatctttcactttggcgaattaggaggcacgtgtgataaataagagtcttgctagttcgtcgtcgtccatgttgtcatagatcctgtcttgtgtgttcatgttactgtgatgcaggcaattgtgtgttgtgttcgggcgttatttgctgtgttgtgcgttgccaatttgccagcttcagattatgtgtgaataaaaaagag

SEQ ID NO: 111366 - DNA, 556 bp, Zea mays
  Clone ID: MRT4577_33055C.1
aaataccacacaagcaaacacaaatcaaattaaaactttgtcgtcaaatgcatcttagggatccacaagccaacagcaatatatgtcaaggctttagaacatatatagaacatccaacttaaaccccatgtcatctgggtattgtactagtaccaagggaaacaaaaacacaaactcaacagcttgtttgaagcagcctcgcgtcagccccaatgcatgcgaaacttaagttggtcatgctcatgcaaggggagagattatattagtatggagacgctggagcaggtactgaatggactagatcagcccattcgaaacaccgcgcgcatcggtagatatgatgcaataacataacgcgcatgcttactgcagagacgaccttgacaaaaagaactcgtaatctgaatgacagttcatggcttctccagatggcgcccttggcaccactgccttcgacatgattgatgcacattgcctcagtgccctcagcctcttgttcaggagttcagcatggtctgttcccgaggaaacgtttggccttggtttgatcctgaat

SEQ ID NO: 111367 - DNA, 283 bp, Zea mays
  Clone ID: MRT4577_33056C.1
attcggctcgagctcaggacaagatgccaaatattcgttttttccaccacttgacgagcttatagccaggattgatgaggaacttttcattctccagttggaacaggactggatagaggaccaaagtgaccgtgaagcagtattgaacgagaacatgcgccggaggggagtgcacagggctctttttcatctcgaggcactgatcccggccagtttgattcaagtatatcttgtggatcggttcttcaagcgcaagctggggacgtctagggtttaaggctcc

SEQ ID NO: 111368 - DNA, 181 bp, Zea mays
  Clone ID: MRT4577_33057C.1
ctgggggcctaattttttccttgtccacgattttgggcatcaacattgggcatcacgaagcccttccattactttctcaacgagcataccatcctgagaatcacagctcacgttcacatcccattcaaaaaaacccatactaagttagtgtctccttcccaggatggccggactcctcccc

SEQ ID NO: 111369 - DNA, 380 bp, Zea mays
  Clone ID: MRT4577_33058C.1
ttttcagaccaagaaagaagcaggaggaggggtaggaccgactcatccgtaactatgggtatcgactctccgtgccggacagaaggacaagaagaccaatcgcacagaacctgagcatgaccatgctcatgacaaactccttgaaaaggactaccgtttcttggtcaggaagaccaagagcaaggcgaatgctgttattgtcaagaggtgtctgcatgagcaaaaccaatactccaccagtttccatgcgccgactagtgaagtgcatggaaagaaaagagaagaacattggtgtgattgtatgtacagccacagatgacaagacgatccatgaggttacagccatgaaggttactgccctgtagttcaccagagacggg

SEQ ID NO: 111370 - DNA, 165 bp, Zea mays
  Clone ID: MRT4577_33059C.1
gaaaccaccagctttatagtgtgcctgatagattttaaacattcctgggcacccactcagagtgctctttttatcaccttctggaaatccgcaaagttgcaggggcctctggagtgtctcttctctagagagaattggtgggaccccctcagtgccatggcccaa

SEQ ID NO: 111371 - DNA, 1563 bp, Zea mays
  Clone ID: MRT4577_3305C.1
tgtcgaggaggacggcgcggaggtggtgcgcctccggacccgccgcgggaacgagatcgtgggggtgtacgtgcgccacgcgcgggcctccgccaccgtgctctactcccacggcaacgccgccgacctcggccagatgtacgggctcttcgtggagctcagccgccgcctccgcgtcaacctctttgggtatgattattctggttatgggagatctacagggaagcccactgagtgtaatacatatgcagacattgaagcagcatataactgcctcaaggaaaaatatggtgtagcagatgaggatataatcttatatggtcagtctgttggaagtggtccaaccattgatcttgcttcgcggttgcctgacttgcgagctgtggttttgcatagtcctattttatctggactaagagtaatatatccagtcaagcggacgttttggtttgacatttacaagaacatcgataaaattggcttggtaaattgtccggtgcttgtcattcatggtacatcagatgacgtggttgactgctcccacggaaaacagctatgggagcactgcaaagtaaaatattctccactgtggttaagtggtggtggccactgcaatctcgagctatatccagattacattaagcacttgaaaaagtttgtgtcaagcgttagcaaaaaaacatcatcgaaacctgacccaaaagagataatgacaaaggatgacactaccagtaaagaaagagaggaagcgtacccggagaaacctcaacctcgaggcccgcgcggcccggcacagatctcacgtaagagcctagatagccgagttgggaaatccaaaacagtggatgttcctgataaatcacggatgagctcagatgacatcgacaagttccggaggagaaggtgcttggtttggtgatgcctatgttgtgcacagattgtcgaacagtacctgagtgaggatactatagcatggaaatcaagcaactttattacatacatcatgctgcgaggaatggcatcagccgttcctgcagtggagaggaaagaactgttaaataagaaaaggaaccagaaagctaccatcatcatccatcagagacaaagccacttgactgaaagctggtagtttcccagttaatttaacactgacactgacaccgtcgacatgttttgcagcaccggttagggtttccccatcatctaaaagtgtacaattattgtatgtaatcacgagggacctatacaaacatttacagccgctctgtgcaaagtctgaaagcctaggagcaccatagtttatcctcggtgcatcagcatcgggcccacatgcgttgtggaaccatttggctatgtgagctctgcatactgatctactccagccttattatacggatcgtgctccacttatcaactgtgacacggcagcaagcggatcatgctccacatatcaattggaaactgttgggtgaaaggtcagggcaggcacaagtgacatctatttactagtactcatttatttatatgtgtattatatatatcattcaccactctttcacatat

SEQ ID NO: 111372 - DNA, 260 bp, Zea mays
  Clone ID: MRT4577_33060C.1
aggggaaaccgctgcggatagccttagactatccgcagcgtcctcctcttggctccctctcccctaacactgttcttgcgaaaggggcaacagttccctactgggcgggacgacgtactctaccgaggctccttgggggcgctcctcttctctctcgtaccacatggagcggagcgctgtagacccatccgacgttccttagactgtttgcacgggtcgccgctatactttcctctcccctggcatgccgtgtacagacg

SEQ ID NO: 111373 - DNA, 427 bp, Zea mays
  Clone ID: MRT4577_33061C.1
ggtactctccttgttttgtttcatctagagaatccgatgcacaccttttgttcagaagaaaaggttcaatttttttcagagaggacctggacctgtaccttggattaagtgcggtaaggcgtgaccttaaaacaggcattgataacacccaccaccctaacacgcgtttaggactccaatttaaggctttccctagccggagcgagtaaaaattattacgtgtcaaaggaaagaatgaaggaacgaaagaaatgagttttggctttttctcctaagtcgtatcccatcccatgcataataccctgaagttgttgccctctaaggcatggccgaactgtcaggtgctcggtgcggttttccaataagggatggtgccgagttcgctctctgggacacaaaatgagatcgcctggccgacaaggatggc

SEQ ID NO: 111374 - DNA, 596 bp, Zea mays
  Clone ID: MRT4577_33062C.1
cgggacctaaaatgctgtgttcccgattactctaataaatcttttaatgaaagtagattatgttgctgtcaagcttactatttttatgagctcattcccgaaccacacatgaagtctttacaatacatataggactctgcccgcatccttattgtctctatttattgtgaatggatatatggactatcttccatatcgttattttatgtaatgaccctatcctactatcctctcttttctggtggcattactatctacccaacctcatacaagactagaggaatattactaggactgttccaattcgataaagacctatacctggacaaacatagtatgtttcctattacttggtgtagagctgctgttcgctaataatttcagtttctttaagaataactaactcttttattggatcatataaattgttaaaaaacctctgattccttcatcacatacagacaagttctttttttcttatacataagtagccacttagacattgaaacaaaggctgcgtgcccttatatgcaataggacatactatatgatcgaattgagtgttctatatcagagaaatactaccctagctattt

SEQ ID NO: 111375 - DNA, 723 bp, Zea mays
  unsure (1)..(723): unsure at all n locations
  Clone ID: MRT4577_33063C.1
catttcgccaattcccctccaagatccgtcttctccggccgctccacccaattcgtcgtcctccccgcctccggatctgaacatgagcgacgcgaccacggcccccgccaccggagccggggaccacgttgtcgatgccgccgcgcacaagccgccggctgccccgtcgccggacatggcaagcatcagacggggcgggagctccgtgaccgagacagtcacccaggcaacgcagcagcagcagtcgcggctggacgacgaccagctggcggagctgcgggagatattccggtccttcgaccgcaacgccgacggcagcctgacgcagctggagctgggctccttgctccggtccctgggcctgacgcccagcgccgaccagctcgacgcgctcatcacccgtgccgacaccaactccaacggcctcatcgagttctccgagtttgtggcgctcgtggcccccgacctcctccaagaccggtccccttactcggaggaccagctccgcaagctcttcgccatcttcgaccgcgacggcaacggttccatcaccgcggggcgagctggcgcactccatggccaagctcggccacgcgctcaccgtcaaggagctcacgggaatgatcaaggaggcagacaccgacggcgatggccgcatcaatttccaggagttctcgcgcgccatcaccgccgncgcatttgacaacatcttctcctgaccga

SEQ ID NO: 111376 - DNA, 1482 bp, Zea mays
  Clone ID: MRT4577_33064C.1
atggacgtcgatttggaggcaccgccgccgcctccacccactgcagcagcagttactcgtcgttcaccatctccgtcggcacccatggtcgtcgggaccattgctgctcgtcgtggagagccccacgcgccgtcgatgctccgcgcggacgcatcatcctcactggccatcgcccaaatggggtggccccatcttcctcctccaatgggaggacctaatggccctcgatccggccgccacgacggccgtttggggggagggggtggggaagaggctcggcccctgcgcgggcagtggaggagcgcgctcagcgcggcgctgctcctcgacgtggagcagtgggcgggcggcggctcagcaaggcccgaggtcgggcctggcgcggcgtgtccggccgagcgcaggcgacggcaccggccggcggtgcgtggccgcggtggcctggccgagtcggccacatcctcccccagcgcggatggggagggcggctccactggcacgcgcgccatggcggctctcggcgctggcaaggaccggcacgacggccacgcgggccctcttcctccaaggcgcggcaggctccatggtggagccacgggcgcgcaggaaaggagcctggcggcggctggagctggccgctcccttctggcgcctcctcctggagggaacatgtcaaccaaagagttcgaggaactcgcccttgatgggcataactacccaacttgggcttcagatattgaaataacttttgcttctcgtgggatcattgatgccattgcagcacccatcactggtactgatccagtgaaagagccctctgaagcagacaagatagagaagactctatctaccatgcttccagaggataggatattgcatcagcagtatcgctctagcaatttccagagatattctcaactcatgcacacattgacccaagcagaaaagcatcatgagcttcttctaaagaatgctcagcagcgccctcctgggtctgcccctctgcctgaggtacatttcaatgtgcataagactgagaataagaaaggattcaagaaaaacttcaagaatcctcctggatctcgcaaattcaagaagaacaaattccacaagaaaggtaaaggaaaaggaaaaggaaatgacaagcctctaccatctaagggcaacagagcttgccttaaatgtggtactgagggccattttgctagggactgcacttgccctaagcaccttgttcttttgtatcaacaatccctaaagaagccaaagtctgataagcctggttttgaggctcatttcaattctactgaagcaccaattgaggttggaagttcttcactggcttctggtgatctgaagaacactcttgctaaagagcacctcaatgtggttgacaacaagcctccacttctgcaagaagatgaatctgatgatatgatcattgagtatatgtcaaaggatccatttggagatttggcataa

SEQ ID NO: 111377 - DNA, 195 bp, Zea mays
  Clone ID: MRT4577_33065C.1
cctcagggccacggaggagagggtgtcagacctgaggacttcaccgtagatgctcaccagctcgtcgacctcgccgggcgtcatgatcatctacggggcagccagcacggccacggaggagagggtgtcagacctgacgatgaaatccgagaagaactaaccaaaagggcgaggacgacgacgataacgcctggc

SEQ ID NO: 111378 - DNA, 698 bp, Zea mays
  Clone ID: MRT4577_33066C.1
aagtgcatgtcaaatggagtagggtaggttacaagccggataggctgatgtgtgtagaaccatgcgagtgttagacctcttttgaaacagaataatgcattgtaggatttttttatggtcataaaagtttcctgccatctcatctgtgactatgagagaagccattttggttcgtttagtttgtcttggctgcctgtatgccacaccgtggcatctttcttctcagctgtgttggattatgttttctatgttctcaaatgcttcttctgattcacaaatatactatcttaggctctctttgtgtatataagattactccctatcccactcttatatctacttaatatttcaaacttcgctctgagacggtgcaatacttctcaaaacagtactttcacatggcctgctgacttctctttgaggtggatctcatgcagatatgatttagggagagatggtgtctgccaatgggagcatacattagctctgatcctgtgaagcgtgtcagtcaagaccatatagacagcagtagtaagaaccacccgaaaacaggcgagtcaccaagccatattgtatcagcgacgatgaaaatcatgttctcattctggatgttaaatttgagaccaaaagatggtgtattcgttcaagtgattttgtatcctattcatagttcccttaacttaaaaaatatgttcctt

SEQ ID NO: 111379 - DNA, 181 bp, Zea mays
  Clone ID: MRT4577_33068C.1
ggcgaccgccgcagcacctgcaccggcagccgacacgacggatccgaccgaaagcctggcggagcggcataccgaggaacagcgggccaatgcaaatgctgcagctgcggcggagcaccagagataggcatgccgtggcttcaaggagcgcgtggcggatgagctcaggggctcgcgggct

SEQ ID NO: 111380 - DNA, 625 bp, Zea mays
  Clone ID: MRT4577_33069C.1
ggtcctaaagttttctgccatctcatctgtgactatgagagaagccattttggttcgtttagtttgtcttggctgcctgtatgccacaccgtggcatctttcttctcagctgtgttggattatgttttctatgttctcaaatgcttcttctgattcacaaatatactatcttaggctctctttgtgtatataagattgtgtatataagattactccctatcccactcttatatctacttaatatttcaaacttcgctcactatttcaaacttcgctctgcgacagtgcaatacttctcaaaacagtacttttacatggcctgctgacttctcttgaggtggatctcatgcagatatgatttagggagagatggtgtctgccaatgggagcatacattagctctgatcctgtgaagcgtgtcagtcaagaccatatagacagcagtagtaagaaccacccgaaaacaggcgagtcaccaagccatattgtatcagcgacgatgaaaatcatgttctcattctggatgttaaatttgagaccaaaagatggtgtattcgttcaagtgattttgtatcctattcatagttcccttaactgaaaaaatatgttcttttgtatgccctct

SEQ ID NO: 111381 - DNA, 447 bp, Zea mays
  Clone ID: MRT4577_3306C.1
aattcggcacgagggccagcgcccccggctatcttcctacggtcctctggctaacacaagcccatctggattctggacttctcaaacgccgccctcgccgtgcacgcatcagcccgggactaccagggattacgtgaccgcccgctgccctccttgcccgagaagcgcgccgcaccacgaggtgagtcctacgcccagctacataacgggcgacgccagacgaacggctaccgctctgtaccgccgccgggcggtcgttacacgctcagcatgcgcccggagacttggcggcacagggctcgaggtgggcactaggcgacgcccatgtcgtgctgctttctgcaacgacgggggctgcctcactgggcgacctgctgctgtgctcgctcatgcggtacttgactagcggagatgtaacatcctgcacaagaaggcgctcaggcggag

SEQ ID NO: 111382 - DNA, 656 bp, Zea mays
  Clone ID: MRT4577_33070C.1
gggaccctcgaggccggccgggggccatagacagcgaccgagcgattccctcgtatctgcattcgcatgcctttgctgcatccaccaccgcgtaaccccacgcagccgcatcgatggcgcctaaggtggagaagaagccggatgcgaagaagacggcggaggaggagaccgctgtcgcgaagggcccggtggggaagaaggccatggccgacaagaggctcccggtggacaactccgccgggaaagaaggcgtcgacaagaagggtatcaagaaggatgaagaagcccgtggacacctacaagatctacatcttcaagggggtgaagcaggaccacccggacatctgtatgtcttgcaagggcatgttcatcatgcactccttcgtcaacgacatcttctagaagctcgccggcgaggctgccaagcttgcgcgctacagcaagaagcccgccatcacctctcgggagattcgaacctctgtccgccttgtgcttcccggcgagctcatcatgcacgcgttgtccgagggcaccaaggacgtcactaagtgccatcatcgtagatttgaggcatgatctattgggaggcgttggcatctgcgactcaatttgtctgctactaatactggtgctagtatccatgaggaattgggttg

SEQ ID NO: 111383 - DNA, 632 bp, Zea mays
  Clone ID: MRT4577_33071C.1
agcgtggtcgcggccgaggtacgaggctctggacagatgcgaggagattcttggcaagcgacgctatatttgtggcgaatgaatgcaccgagctgagaaagaacagaacaaagaaagatcttaaaatcaaggctaaagaagtggaaattcaaaatctaaaaaaggctaatgtcatggaataaatgaggttgatgtggagctaaaaaaggaggctaagttttttgggtgaggtggttatcattggcttgttatgtgaacattattgtgatgtggtttcatgttatccaggtgacagtttaacaacttcttgcaccaccatgtcgagaatatcatcggctcatgtttggagagtaagcaggatcgactgattggccatgtccttgatgactgtaaacttgttacaagaattctggaagcagagaagaactctgctctgtcgtcagatttaactaagcatactatgtcttcagagggaagatctcccccaaggataggaattgttggtcatatgacacggatagctaacaggctccttcagctggtcaacacaaacatcatggttcaatcacatttgcagcaaaattctgattggattgagtggcatgccagtacctgcccgggcggccgctcga

SEQ ID NO: 111384 - DNA, 265 bp, Zea mays
  unsure (1)..(265): unsure at all n locations
  Clone ID: MRT4577_33072C.1
ctgccactcattaaaaacacatcttattaaatgccggagaggcatggctcctctgcgttcctactacatgaggctagngctcatagttgctaccactatgatcttgcggattgctgccatacataggtcagaggacaatatggctgctgcatatagatacaccgatcaacctgaacggtcataatgcttcacctggatcacagaaagctacaaggtgctatatgagtcaaatagagtccacttgatgccatagaagcatatctca

SEQ ID NO: 111385 - DNA, 1246 bp, Zea mays
  Clone ID: MRT4577_33073C.1
tctcgtgtcgctctgtgccaccccaccagcctccctccccctcttctactcctggaccggcccagcttctttaattcccttccttcgcctggccgcgaccagtaccacccaccgctcgctctcgctcccaggcctcctgccgcccggcccgcgccgcgccatggaagagccgccgccggggagcagcaaggccgccgcggcgcgcgcgccccgggtggtgggcgtgctggcggggctgctggagcgcgcggcggagcgcggcgacacggcgacgccgacgctggcggactcggcgttccggggccgcgcgctgccggggatccccgtgcggcggtacgcggagcggatataccggtacgccgggtgcagcccggcctgctacgtcgtcgcctacgtctacctcgaccgcctcgcgcggggccaatgcgacgccggcgccggcgaggacgaggacgaggacgaggcggcggttgtcggcatcgactcgtacaccgtccaccgcctcctcatcacctccgtcttggtcgccgccaagttcatggacgacaggcaccacaacaacgcctacttcgcgcgggtgggcggcgtggaggtggcggagatgaacgcgctggagctgcgcctcctcttcgccctgcgcttccgcctcaacgtcgcccccgacaccttcgcgcggtactgcgccgcgctcgagtgccacgtcgacacgcccgacgccggcggccccgtgccgcggatgccgccctcctcccacgtcgacggcgaggaggcagtgaccagcagcaagggcaaggttgccgccgccgggtggcggttccgtcgtcgtccagcgtagtcaccgtcagcggagagccgtggtacagatcatgacgacggcccaatgacgacgacggacggcctaggtcgacgtacgggagattgtttcatttgttcttttttaatatacgctccataagcttttgtacgcacctgctatatacactccataagcttttgtacacccgtctatggctcgatatcgagccatccagcggttgattggttgtctatacgagcacgcgcgttgcttccgcagcggattgtctagggatggataatgttttagtttacgtgagctttgattcatttatacagatacatactcacactcacacacctacacgtcttatacaatgataatattaaaggaggaaataaaatcactgcatcttttgtattaaaaaaaaaaaaaaaaaaaaggtcccta

SEQ ID NO: 111386 - DNA, 3124 bp, Zea mays
  Clone ID: MRT4577_33074C.1
aattcggcacgagggtcgctccctgcctctccattcggcacgacgcgcgatcgaaccctcgccctcttgcttcccttcccccacctccgcctccgcgcccttccgtcctcccactcctcatctcgcgattggcaaattctagggtttcgcggcggccacccggatccagctcggcttcgcgagcgcctctaaagcttcgggtcacgagagggcgctttgctctctccctgtcccgccctcaccgcggccgccgccacgacgacgacgacctgcggtgcgcctgtgcctgggttcggatcgtccggcgcctctccgttggccactggataccagctcatgatgtggaaatctcagctctaaatccgcttgggttgtgatatcgtgacagtgtgggtactgacataactggcactgtgcaagatgttttggcatgtgccgggactctccgctgcatcaccggttgatactattttggacaaggaaaattttaagttggaatgtcttcttgatgaggatgaaataattcaggagtgcaaagcactgaatacccgcttaatcaattttttgcgggacaaggttcaagtggaacaattactccgctacattgtagaggaggctcctgaagatgcagaaaaggaaaggatatttagatttccgtttatagcttgtgaagttattacatgtgaagtggatgtcatcatgaagacattagtggaggatgaagatcttatgaatttacttttctccttcctgaaacctgaccacccccatgggacattgtcggctggttactttgccaaggtagtgatttgcttgatgatcaggaagacactcccactagttagttatgtgcagggccatcctgaaatagttagccaacttgtcgatcttattgggattacttctatcatggaggttttgattcgcttaatcggtgcagatgaaactatgtattcaagctatgcagattctatgcaatggttagatgacatacaagtccttgagatgattgttgacaagttcagcacatcagattctcctgaggttcatgcaaatgctgctgaaatcctttgtgcagtaactagatatgcccctccagcacttgctgcaaagatttccagtccaagctttgtggggagattatttcaacatgcttttgaagattcaaggccaaaatcggtgctggtccactcattatcagtgtgcatatcgttgttagatcctaagagacttgtatcggcttcctatcaggctttccgtagtcagttgagccatggaacacttgtcaccgcaagtccagagacagtaaatggcatgctggatagcctaggggatttattgaagctgctggatgtttcatctgctgaaaatgttctgccaacaacatacggtagcttacaacctccactcgggaaacatcgcttgaagattgttgagttcatctctgttctactatcaattggtagtgcagctgccgaaacacgactgattcaactaggagcaatcaagcatgctatagatctattttttgagtacccgtttaacaacttcttgcaccaccatgtcgagaatatcatcggctcatgtttggagagtaagcaggatcgactgattggccatgtccttgatgactgtaaacttgttacaagaattctggaagcagagaagaactctgctctgtcgtcagatttaactaagcatactatgtcttcagagggaagatctcccccaaggataggaattgttggtcatatgacacggatagctaacaggctccttcagctggtcaacacaaacatcatggttcaatcacatttgcagcaaaattctgattggattgagtggcatgccagtaccctgacgaagcgtaatgcattagaaaatgtttaccagtgggcttgcggtcgaccaacatcactgcaggatcgtggtagggatagcgatgatgaagacttccgagatagggactacgatgtggctgcacttgctagcaatttaagccaggcatttaaatatggtatttacagtagtgaggatattgacgaggctcaagcatcacttgagcgggatgatgaggatgtatattttgatgatgaatctgcagaggttgtaatctcctcccttccccttggagacgaccaagaaagtggttcgctctttacaaattccaattggtttgcatttgacgaggacaaggcactgaatgatggtttggttagctcagaagcatccccatctccaaattcggaaatatccgcactaaaagaggatgatgaacacgatgaagtcattcttggcgaaattatagatgaaataaaaggttctgaaccaactctaccattctccaacaaagatgcagacaaagaatctggttccaccggcttggcaaatggtaccgttgacaaattcgaagatgatatcagaccaccaactccggatgtaaaagagagtcaacctgagtttgttgaatggaaggaggaagaagctgaacctggtgatgttgccgagaaggataccgcagttcctgatattgaggttgaaaatgagaagcagctggattccatggatgatgttatgctttgcgatgcaaagttaggagaggaaaagaagagtgatgagcttggcatatgaagtgaatttcagaggagcagaatttcagaggaagcacttggaactggtcagaccattattgcacaagcagtctgaggatcatatgtgagttctctgttgtacacttgaaggtggtcccggaccgtgcatctgatggagcctcaaagattcaacttgtctgatggatagatgtgtaacatgatttggtggtggttattgttatgtgcctatagtctgggctacatcgagacgcaaaattctgaaagtagtcttccttgtcctttcggggttctagttgtgacccaggtaaataactgataggtgaataggtgatgctatttgtacgaaaattttggctcaaatgcagtcgattgttggcatatttagaacttgtttcaaatttgtgtaaactaaagaatatagtttctatttttttccaggtacttaatgcataattcatttgttataatataaacgacccttggtacaaaaaaaaaaaaaaaaaaggccccta

SEQ ID NO: 111387 - DNA, 865 bp, Zea mays
  Clone ID: MRT4577_33075C.1
gacatattctcgttcttcggcagcggaataaatgcaccgagctgagaaaggacagaacaaagaaagatcttaaaatcaaagctaaagaagtggagattcaaaatctaaaaaaaaagctaatgtcatggaataaatgaggttgatgtggagctaaaaagggaggctatgtttttttgggtgaggcggttatcattggcttgttatgtgaacattattgtgatgtggtttcatgttgtccaggtgccagtttaacaactttttgcaccaccatgtcgagaatatcattgggtcatgtctggagagtaataatgatcaactgatgggccatgtccttgatgagtgtaaacttgttacaagaattttggaagcagagaagaactctgctctatcgtcagaattggacggtcgcatcgacgccaggttccagcagaggagtcgttactctccttgattccttcaccgagttcaccgagatggctgaattgaagggagaagatgatttatcagcaggctctatgagcacaactgcatagtcaagacataattcttcggcccctgcagacttcaagcagctaagaagtgttacgcccattgacatctttccacgacaagagacctgggcaagagaatccggacgtgctgagggggagaggaaggagaggaggaagatatcgggcaagagaacccattgacatccttggatagggtccgtctgatgccattcatcgctgtctttgatctcgggaaggcatcttagccagctcaattttattagaaatattgttgttttaagatacagagtccatggttactattgtacgcttttctgagaaacttgtcatcccaataatttggttctggagct

SEQ ID NO: 111388 - DNA, 3734 bp, Zea mays
  unsure (1)..(3734): unsure at all n locations
  Clone ID: MRT4577_33076C.1
gtctgcacacctcaccgctcagcgctcacctcctcgtcggttcggtcggtcggctgtcgtgtcgctctgccaccccaccagcctccctccccctcttctactcctggatcggcccagcttctttaattcccttccttcgcctggccgcgaccacccacccccaggcctcctgccgcccggcccgcgccgcgccatggaagagccgccgccggggagcagcaaggccgccgcggcgcgcgcgccccgggtggtgggcgtgctggcggggctgctggagcgcgcggcggagcgcggcgacacggcgacgccgacgccggcgggctcggcgttccggggccgcgcgctgccggggatccccgtgcggcggtacgcggagcggatataccggtacgccgggtgcagcccggcctgcttcgtcgtcgcctacgtctacctcgaccgcctcgcgcggggccgccgcgacgccggcgccggcgaggacgaggacgaggacgaggcggcggttgtcggcatcgactcgtacaccgtccaccgcctcctcatcacctccgtcttggtcgccgccaagttcatggacgacaggctacctggcgattggtggaaagagatctgatgacggcgatcatggtcgaagagtaggagaggccctagaagaaaggtgacatattctcgttcttcggcagcggaataaatgcaccgagctgagaaaggacagaacanagaaagatcacgcaagttatgctaccgatgtcgcccgaccgcccccgccgcattgcccccacccccgtccgccgctagatgcggatcccgccgcttccagcatccagccaagcccgtgagccgcacgccgctcctgctcccgctccgagcgccttaggtcaggcggcgttggcccgacggcggggggaggcatcacgctgccatccatgggcgcgcccccgccgccgctgcacccgacgcccacctctcccacggcgcgcccgcaccaccaccactacctcttctccatcaagcagctcaacacgctgggcgcggcggccgtgctcgccttctccaccacggtcccgctctcggagactgccttcgcggtgctcctcccccctacctcctcgtcctcgcctggctcgccttcccgcagcgcccaggccgctcgagacccggatcccgcctctacccctcggcaccatcgtcagtgtcttcgatggccacaacggccccgacgcccccaccccgacagacactgagccctcttccgctcgcgtgactggtgccccctcaaccctcgactctcctccccaccgtggccccttccccagccccagtgaccagcgcctcccttcctaagtgcggccatggcgaccatcgtgccctagcccgcccctgcaccatggcaagcacaccccttctactcctctcgccccaacccctgtgcagcccagcgcggtggcctataacccacagcaaggcgcaactagctggctggtggccctgccccggtgagcccctgctaggcgcggccagcaacccccgtggtctagcccctgcctaggcacacccaaaacccctgcccctgcaacttgtcctcggcgccgccccactcgcccgagatctgccgcgacaacaggaattggacgtacattgggactttgaagtgcagctaaggctacctggcgattggtggaaagagatctgatgacggcgatcatggtcgaagagtaggagaggccctgaaaggtgacatattctcgttcttcggcagcggatgcaccgagctgagacagaacaaagaaagatcttaaaatcaaagctaaagaagtggagattcggctcgaaaaatctaaaaaaaagctaatgtggaacatggaatatatgaggttgatgtggagccacattggtaggcgtttcttttcacccacccctccacccaaactggcatctccttgctccctggtgagtttttctcttgatctatcatctttgttagttgttttcggcgttgtcaaaatctcaggtgccacaatggacgaaagaacaacatgaagaattgggttccaaaggacttgagggctacttcatcacaacctgtaactgaagattttgaataactgactacatctccatgcaagacttaagtttttgttttattaagaaaatgaccccaaagaagaagaaactatatgttgcagtgcaatctacccagtcatacgttgtatgttagtttctggaaaaaaactacatggttcattgtggtatgtgtatgacataagtctatatgtgtttcttttagtttctccttttttagctttactccgtgctacacctccacagtccccacatgcacggagatgtttgaaaatataaaataaacggacgcgtagggcaaatttactagctcaactacaagaggcatggagttattattaaaaaatgaagtactcatgatgaattccaaacaaaaaatctgacctaataatcaacataatataaattgttgtagctcagtcctatagtcatactgagctactgattagaatgttcaagaatgaaccattagatttcctgtgctaaaatgaggattgatcataagactaatgacgatcaagactatcaaggcccctacaaacaaagctcatgggaaattagaaagtgaaatgaaataccatgttgaaaacagggccaaagtagctagcaattcaaagaggcaaaatgctgcaaaatataatgcttcatgaggtcagtaaatacatatttggtaattccatgctaatacactgatgctttaagatgcctgagacatctatcttctttgttagttgttttcggtgttgtcaaaatctcaggtgccacaatggatgaaagaacaacatgtagaattgggttccaaaggacttgagggctacttcatcacaacctgtaactgaagatcttgaataactgactacattaccatgcaagactaaagtttttattttattaagaaaatgaccccaaagaagaagatgtgtgatatatccctgatgactgcatatgtattgagggttactacacactgaaaaatagaataacagactctgtggctgttagtgaagagggattagtcaaaaagagaacaaggcgtccaaaacctgttggcaatgagggggctgtcagaaagagaagaggctctgccatcccacaactataattgttcaatatatatggctgaattgaagggagaagatgatttatcagcaggctctatgagcacaactgcatagtcaagacataattcttcggcccctgcagacttcaagcagctaagaagtgttacgcccattgacatctttccacgacaagagacctgggcaagagaatccggacgtgctgagggggagaggaaggagaggaggaagatatcgggcaagagaacccattgacatccttggatagggtccgtctgatgccattcatcgctgtctttgatctcgggaaggcatcttagccagctcaattttattagaaatattgttgttttaagatacagagtccatggttactattgtacgcttttctgagaaacttgtcatcccaataatttggttctggagctatatactgatctagcttgttttagtaacaaatgtaagttgctcacatttcctttagactgtcactagaactttgaacgatcaactcgtgcttctaaatcaagaattaccatatgtgttttttgaaaaaaaaaaaaaaaaaaaaaa

SEQ ID NO: 111389 - DNA, 169 bp, Zea mays
  Clone ID: MRT4577_33077C.1
tatcggtcgttcttcgaggcccatacctgcgccattcagaagctattgggaggctaggtctgactgcacgttgagaacggatcgccctgtgtcaagtggttacggaacacgcggatcgggatgccagtgatgagccatacgatcatgctctgggatctgaagaaggttt

SEQ ID NO: 111390 - DNA, 354 bp, Zea mays
  Clone ID: MRT4577_33078C.1
cgggatagaactaacgctgacttctttattgccgagctcaatacattctccggacgcacatcactctcagcacgtaaattcattaactacactccactcccaccacaacctaaacaaccacatccattttattctcatctttcaacacatattcttaaaaaaataccctttcttatccaccaatataaacccgactcctagtcccacatcatatatcacaacccccactaccctttccccaacgacggacctaatatccttccatcctacccatacaacctctccatttctctcttctggtcctactacatccaccacaactaatacacctcactaatacccaatgacaaggtc

SEQ ID NO: 111391 - DNA, 413 bp, Zea mays
  Clone ID: MRT4577_33079C.1
tctctcatcggccgccgcctttatcgcggttggctggtacgcgtactgatctcaaggtacgtgccggactccgtatagacctgatcggtgcacatgtaccgtcacatcctggacaaaaacgtgtactaaattcacccagatgtactagggcggaattcatcgcctttccgaccgcctgtgccaagacgtgctctggacctgggcggaggccgtgtctccctattgtgacagccatcacgtattcctggttctctaccgtgagctctggtactgttactgcgcactacccggctttattggcttaccgatcgtcaccgtgcggagtcagtgaaccagcttctgccacctttttagcgtgaacttacactgcgtcattagtatgcaggttggtaactcaaggggtttgggacttg

SEQ ID NO: 111392 - DNA, 270 bp, Zea mays
  Clone ID: MRT4577_3307C.1
ccctctcacacacaggaggcttccggaaagccctagccagatcgacatggcatccccgtcgccgtcgccgtcgccggactgggccggcctccctgacgatgctctgcttacagtgttcgagcgcctgggcgcgccggaggtgctcatgggcgccggagtcgtgtgccgcaactggctccgcgtcgccaccggcgagcccgacctctggcgccgtgttgacctgtccgactgcttcgaccccaccatcgacatggtggccatggcgtgcgc

SEQ ID NO: 111393 - DNA, 727 bp, Zea mays
  Clone ID: MRT4577_33080C.1
gagactgggggaacggcgcggagatgggcaatgccgccgccgccgtgctcgacggcgaggtgctgcactgggccaagccggagccgtacacggagctggagcagcggagcgcggggcaagccgccgcggacgacgacgcgctgcatcataggttcttgctgccctgcggccaggagcagagcctggcgcatctcgacttcggcttggaatacttctgatcctcttcctcccgcttttgtttttggcccttcgttcgtctctgcctttgcctttgcctttcctccctccctgaattatccatccatccatccattccccctacgtcatttggaagattagggattgtacgtagtaaccaatatgttaatttctctctagcccatgaatgatacacacacatactctctttctctacctttttctgtatactctgctcctgctcggtcggaggaacagaagccattggtacgtacatacgggattattgtgtactacaatatatacaatatacaaaggtgtttcctttttttgtaaagaataaatttaaaaaaaaaaaaaaaaaaaaaaaaaaaaaaaaaaaaaaaaaaaaaaaaaggagtcgatttaaaaaaaaaaaaaaaaaaaaaaaaaaaaaaaaaaaaaaaaaaaagggggggggccgtttaaagggaccaaagtttccttccgggggcttgggagtttaaagttttttttaagggcccccaaa

SEQ ID NO: 111394 - DNA, 395 bp, Zea mays
  Clone ID: MRT4577_33081C.1
cccacgcgtccgcggactcgtgggcggacgcgtggaccaattactataatctggttaattatttctcagaaatggcttcatacaacaggtgaaaaagtttatgcgtgttctaaacatcaagtatccacctaccaaatgaatatttcatggtccttgttcatctagcacttacgtggcaccagtagtatacagatggctcatacttctgtcctactggatgcacatggtgttcctgatactcaagggttgcgtgacgccttggaacatcctcatctacatcttggagtacgattccctatacattactcatgtaccacgatcactaaactggacatgaagtctatggaacacgatagctcgacacatggtgctcggacttgttatagaaactgttc

SEQ ID NO: 111395 - DNA, 1879 bp, Zea mays
  Clone ID: MRT4577_33082C.1
gagccgcgccccgcctccgtcggaaccctttataaccgcctcccccaaaccctcccttccttcctttccccgctcttctcccacacaaacgccaccgccgcatcgaatccgagacgccgatctcggattcgccgtcaccacacgctgccctcgtcgcgctctcccgccgccgccgctcgtctcgtcagccatggcaggattggcaccagaagggtcgcaatttgatgacaagcagtatgacaagaaaatgcaggagatattaactgaagacttcttcacttcatatgatgatgtttgtgaaagttttgacagcatgggactgcaagagaaccttctgagaggcatctatgcctatggttttgagaagccatcggctattcagcaaaggggaatagttcccttctgcaaggggcttgacgtgattcagcaagctcagtctggaactggaaaaacagctaccttctgttctggaatcttgcagcaacttgattatggattggttgaatgccaggcattggttcttgctccaacccgtgagcttgctcagcaaattgagaaggttatgcgtgctcctggggactatttgggtgtcaaagtgcatgcctgtgttggtggaacatctgttcgtgaggaccaaaggattcttgccagtggtgtgcatgttgttgtgggcacaccaggacgtgtgtttgatatgttgcgcaggcagtctctccgtcccgacaacatcaagatgtttgtgttggatgaggctgatgagatgctctcccgtggattcaaggatcagatctatgatatcttccagcttcttccatccaagattcaggtcggtgtcttctcagctaccatgccccctgaggcccttgagatcacgcgcaagttcatgaacaaacctgtgaggattctcgtcaagagagatgagctcacccttgagggtatcaagcaattctatgtcaatatcgacaaggaagattggaagctcgacactctgtgtgacctgtatgagaccctggcaatcacccagagtgtcatctttgtgaacacacgccgcaaggtggactggctcacggacaagatgaggagccgggaccacaccgtgtcagctacacacggtgatatggaccagaacaccagggacatcatcatgagggagttcaggtccgggtcctctcgtgtgctcatcaccaccgacctgctcgcccgtggtatcgacgtccagcaggtctcacttgtcatcaactacgacctgccgacccagccagagaactacctccaccgcatcggccgtagtggtcggtttggaaggaagggtgttgccatcaacttcgtcacccgcgacgacgagcgaatgctgtttgacatccagaggttctacaacgtgttgatttaggaactgcctcccaaagttgctgcccttttgtggtccctttgaagaaaaaaccaaacaaaaaagggtggtgagggaacctggtaaggattggttttgtcgaaataccgtgggagagggggtgataaggacggtggggggtttctatgttgaagtcgtggtcatggacaatttgtgattttttctcctttatgcaacgttttggaatttttgtagctgcctaggccttgtggtaatgtgctgctgtgggggttcattagtatgaagaggaagacgctgctggcgcggagtctttttctctttattagtattttgtttaaaactatgtatgaccgaatggtggtatttatttgtgtcatccttgactcttattctgctgcaaccagatgtatcgtgccatgtctgcaaaaaaaaaaaaaaaaaaaaaaaaaaaaaaaaaaaaaaaaaaaaaaaaaaaaaaaaaaaaaaaaaaaaaaaaaattcgaggggggg

SEQ ID NO: 111396 - DNA, 472 bp, Zea mays
  unsure (1)..(472): unsure at all n locations
  Clone ID: MRT4577_33083C.1
cccggngtcgacccactgcgtccgcaaagtatacaaagaatagagacatggagcaggaaaatacaaacgaaggaaggaggaaaaaacgcaaaaaaacggctggggctgatcatagggcccaagatgctataatcgaacatgcgacgcaatcgactttctattgggacgctcaaaacatacaagactggtcggtgggtacacaattgctagaggagcaaaaccccggctgtacaaagggtaatatgatgagaagacatccgcatttaaatatattcgccaaactgataacaaccacaatgggaagaccgttgcaaagattgacaagcactaaaacagtaagatcaattcgccctgatcacctgtactatagcaacgtgatcaagctggtaacaccctacaaaaccccacacacttttctacatcataacccaggttctttccggaggcttgcttaggttatacctaaacaaca

SEQ ID NO: 111397 - DNA, 257 bp, Zea mays
  Clone ID: MRT4577_33084C.1
caccggagttaagcctgtgccagcagttcggatcctgcagcgtcagcagcgtacggagaccggtcctgggccactgcgtcgagttcctgaggcaccagtgcagcccggcggggacgccctacgggtcaccacagtggcaggcgcttcagcagcagtgctgccaccaaatcacgcacgtggaacccctgaaccggttccatgcgacatacagcgtggtcctgcagtacttcctgcagcaacagccagaaggcgagctc

SEQ ID NO: 111398 - DNA, 192 bp, Zea mays
  Clone ID: MRT4577_33085C.1
ggactaattcatgagcccaaaataacgtttacgtactcgtggatccgactccaaaaatgttttattgggtcacttaattttaatgcacttggcggggttgcacaacatatggactggaaaaaccctgaccaaggccaatttaagtggtttgtaagacattgccttttccacagttggggtagtagtcaatgg

SEQ ID NO: 111399 - DNA, 703 bp, Zea mays
  Clone ID: MRT4577_33086C.1
ccggcccttgaatggttaaaccctagtagagagaaaggaagagaagggggctgttaagcacgtacgtcgtacatcgcccaccgccctttgcctcgcctcgcctcgcctagcctgcatatctaacagccggagcctgagccggagccggcgcctacaatcgttccaactgatatggctacgacgccgccaggattcacgggcaacctgaaggtgagttattgaaagatccccgtccgccaccgcacggttcaggctctttgccagttccggcgcactgctaggacggcatcgacacatcaacaccacccatggctaccattcctatccccaagcgtcgtcgcaggtccctgcccaggcgcgttgcgtctccatcccagggcttccgccactcgagaaactctttgctactgcgcccccatccgctcccttcaatcgggggcatgaatcatttgccgccgagctgtgctgatccgggggcccgacgtctgtggcactcagtcctcctatttgcgcttagtagtaggttcagttctctgcagacaatagctgaaacactactgtacatggatcttgggttaatttgactgcgaatgttatgattttattcggcatcagttgattggattgattgtagcttgaacctttgatcctgattatccaccattttatctcccctggttgtgaataagctgttggcattttt

SEQ ID NO: 111400 - DNA, 690 bp, Zea mays
  Clone ID: MRT4577_33087C.1
aactatccgcccttcgtctcgcccccttcctctcccgtcggcgccgccgccgccatccaccggagagagccgtccgacgctacccggtccaggggcgccagcatcgcgcctccgcgtggcctcggcttgctcccgcagcgcaggaccgcgttccagggtgcgaggatggcgaatggcggcggaaagggcggccgcggcgcgctcatagtcctggaagggctggacaggagcggcaaatcgtcgcagtgcgcccggctgctgtcctttctgcaagggaaaggctgcgcaaccgaagggtggcgcttcccggacagagacaccagcgtcgggaagatgatctccgcctacctcgccaacgagtcgcagctcgatgatcggaccatccatttgctcttcagcgcgaatcgctgggagaaaagaagtttgatggagagcaagctacttggtggaactacactcgtcgttgaccgctactcttattctggagtggcgttttcagctgctaaaggacttgacattgggtggtgcaaggcccctgaggttggactgctagctccagatcttgtaatatatcttgatgtacaaccagagaaagcggccgaaagaggaggctatgggggtgaaagatacgaaagagttgagttccaaaagagagttgctgagcattaccattcactccgtgattcgaca

SEQ ID NO: 111401 - DNA, 144 bp, Zea mays
  Clone ID: MRT4577_33088C.1
ctaacaccccctacagaacaagcggctcctgtggctcccacacaccaccgtttcatctaccgcctccgtcctatacgccgcctactttctatctgccaccacaccatcatccgcagccatgtcaataccccactcaaccacctc

SEQ ID NO: 111402 - DNA, 441 bp, Zea mays
  Clone ID: MRT4577_33089C.1
ctgtgctataagggcctattcttgctgacacttttaaagcaaaacaatatgaccgttgcatttctactgcacgctccatctccttattcactagtttgggtgcttcatgaagctctttataattcccaagacaattaccattctggggctcaaacacactacaatcctcaagccatctaacatttgggacatttcgatgtgacctggttgcatcaatcctttaactgctgatacatcatcttttacaccccttccagcgttgttttgaactcgatatgtccaccataagatctgatccctttcaggatgagggccaacagtaatgacactgatgccaagattctaacatcaactgaggtggaacctgcccaatccctaataaccgactaagtcgaatatacaggaggagactctgtcatggaagctcttcataacccatct

SEQ ID NO: 111403 - DNA, 365 bp, Zea mays
  Clone ID: MRT4577_3308C.1
gacagggagagaaaagggatgcatcggtggtggatcgctttgggtgcatggtggcggcgatggagccagagcagtcggggacagggccgtgacgtgcccggccgcgatccaccggtggcaggaccggccgcccgcgctgctctgctgcatgcatggctcaacgggaaacgcatacgaggcgactgcacgtcggccattagccggccctgccagtcccagtcccgttaaccacgccggcactgggaccgctgggcgggcgaccagacatgaagatgatgttttggttagggacgacgcttgcatgcgctaagatgaggtgaacctgcccttgatccggcatccttttcttggcaggttggtgactc

SEQ ID NO: 111404 - DNA, 464 bp, Zea mays
  Clone ID: MRT4577_33090C.1
cctacagcaaaaccagaccagacccacagcccaaaaaagcaccgccggtgccggccagcattgggacgggatcgcgggggtgggggctcgggatgctggcgcgtccgatggccaacagtcttgcgcgtccgcgggcgccggctgtggagcccggggggccccgcgctgcgctggggcgagcgagccccccctgcaggcgtgcgggggtcgcagaggagtgccgcttgcccgctggtcacccgccccggggaagaagttagcgtccgtggccgtgcccgaccgccgaccgccgtgctgggggtccgaccgcacccgcccgtgcgtcgcactcggccccgaccacactgcatagggatacgccgtggccacccacacatgcatccagtttttgcttctgaccccgtttccgatatgataagcgttgtcgccgcggcactgtgacaggatacggcgacttgcttttt

SEQ ID NO: 111405 - DNA, 327 bp, Zea mays
  Clone ID: MRT4577_33091C.1
acaagaacttttattttttatttttcccacaagaaccgtgttcggcattaactatgagtgcacatgaacgggacaggacaggaacccaacgggaaattcaggggaacgatccaattccaaaaaacattcaacttcgccatgagaaggatgggggtggttccataatataaaccagccccaacgatacaaaggcattttggggtttcatggcgataacaaatataaaggggagcccaatcaaaaggtgttagtcctggcagcgttcaaatttagtttggaaaggcgtttgtaaacaagacaacatactaggccaagtctttgaaaaat

SEQ ID NO: 111406 - DNA, 427 bp, Zea mays
  Clone ID: MRT4577_33092C.1
cttcttttttgtgcctgttgcgacacctcattttggcttttttcaagatagttcgggttccacagtttccggtgataagtgaaacaataggactggctgtgcaccattgatcatcgcaaagtccctgagactgcacagcgccctataaaagaacgtgtactgtctatggggcctttttcagagaccaaacgtgaactagtcttgactgggactgtaaatgtgcaacacagcacctcccctcctgtaggatacttgaaccatgtatccatgatactgggagaggcatgcctgtatgatctcaactagggggcttctctgttctgtaacccagaccgcatcctcatcggtgcccatactgaggtgcagatgatgcgcccctttctgcgtgacaagggcgactatgctagacgagatgtttttggggacc

SEQ ID NO: 111407 - DNA, 883 bp, Zea mays
  unsure (1)..(883): unsure at all n locations
  Clone ID: MRT4577_33093C.1
atctcagaacagaatacagaaactactcgccttcgacatcttctttcttctacctcatttctttccctgctacctccgatctctctccctcgaaacccaacaacatccagtagctaacatctggtatcagattcagtcatcctggatccgcttgttgttgtgccgtggcgaccccgatctttcgcaacggagcaccaagacgccgccatccgcaagctgctcgacgaaatgcgacttatggaggcgcgcctgtccgaacgcattagcggacgctgtgacggcgtcgagcgccgcctggaccagcgctgtgaagagccttgtgacgagatgtccatcttcgacgagggtcccatcttcgacgaggagccttgtttccaccgccgcgtcctcgattcggatccggactcttcctacgacggggtcgatttgccctcggtcgtccgtgtcgcggccccgcgctcccaggatttgcttcctccacctggcatccgcaccgtgccgagcaactacgtcgcgagcgcacatccgcaggaggtggtcggcgtcgatgtccgtcctaacgcgccgcatgatcttctaccgcttcgactccagctcggacaacacaacggagaacttgtcgagcccccgcgacgagccgagtcggctgctcgtgtcgagtcgaacgttcccagggcctctagcaccgagctgggcagggagttcagcgccgcctccgccttcatcacagccgcctctagcaccagcgccctcgaggaggcgcagctgcacctctacaccatcgccaccgaggggccctgcgccgtactgccgncgtccgncctcaaggtgttcgaccaaaggttcagtccaagtccagcccgctcgagaagtcgttcctctt

SEQ ID NO: 111408 - DNA, 372 bp, Zea mays
  Clone ID: MRT4577_33094C.1
cccagcgtccgcccacgcgtccgcttgtttaaaaaaaaaaaaaaaaaaaaaaaaaaaaggaaaaaaaaaaaaaaaaaaaaaaaagaaaaaaaaaaaaaaaaaaaaaaaaaaaaaaaaaaaaaaaaaaaaaaaaaaaaaaaaaaaaaaaaaaaagaaaaaaaaaaaaaaaaaaaaaaagggggggccgggtttgaaagaccaaagttaacttccggtggggggcgacgtaaaatcttttctttggggccccttaaataaatttcagggggcggagttttaaacggcgccaacgggaaaaccctgggggtaccccattttaatcccttgggggcaattccccttttggccaggggggttattccttaaaaggcc

SEQ ID NO: 111409 - DNA, 365 bp, Zea mays
  Clone ID: MRT4577_33095C.1
ggtgaggaagaaagttagatcccgccattaccgtgagaggggtgagcgcatccgaagtcgctccttggctctaccgatgtttggtggctttgggtgatcgccggagggcctggatcgtgttcgagagtggctgggcgcgggagctctctaggctggagcaattgctcgacggagcaattccgtcgccgcagacccgtctctaaccgtggttgagcttctgcgcgcacagttcacggtacttgatacatgttgggaattaggggggtagcagcacgttcactttcacttttacaattacgctgcccaggcgcatccatgattttaatttgaaacctattgtcaaaggaaagtttggttattttttt

SEQ ID NO: 111410 - DNA, 362 bp, Zea mays
  Clone ID: MRT4577_33096C.1
ccaattatgcatactagtacatatgcacttatgcactcggttagatttgtgttggcaccaatcaccctaaagggggcacatatactggaaatcaggcttatcacgctttctccctaactaatgtaggtggttgaattgtccaacacacatcatcggactaactagtactggtctagtctataagttctacaggagccgattgttcacaagaagccaatcagaaaaccaagaaaggtgttaaaacacagagagcataggacaaccccaaggcaccctgatactggcgcacctgacagtgtgcaggtgcaccagcgcacagtgtgcgatcctccaccgcacttgaagctttactcagtatgttc

SEQ ID NO: 111411 - DNA, 249 bp, Zea mays
  Clone ID: MRT4577_33097C.1
ccggttcggaattcccgcgtcgacccacgcgtgcgttgttttttttttttttgtttttcttttttttcttttttttttttttttttgtgattgcacaaacaaatcccaatcccctttaattattgttccggatgaaccatcctagaaatgctttaatctttttgctcgccttattatttaaacatatgaactagcttcaagctcattcctcatgcactatactctttgcaattacttggagggcatttt

SEQ ID NO: 111412 - DNA, 339 bp, Zea mays
  unsure (1)..(339): unsure at all n locations
  Clone ID: MRT4577_33098C.1
cggatcatttttagnttctttaggtagcagagtttagtagggacaatatgtcgtcgagtattcttacatgcatagtagtttctagataggaagtagatataggttaagtaaagcaagtgagtgaatgagatacatgagcatatcgaggcactagggagcattatatccatatcttttaggactatgaccagagctagaagactagtattttaggaagtccagttattaggtttccagttttccaggttctcttagagttttcttctagtcgtcaatagtattattaactcattgatgatgaataggagaaattgaagatggattgtttttttgagttct

SEQ ID NO: 111413 - DNA, 233 bp, Zea mays
  Clone ID: MRT4577_33099C.1
gccggccggttcgggaccgcgtccatcccatcccatcccatcccatcccatccgcaaccggacaaccgtcacttccccacatcgcaccgcacccaataaaacgccccgcatggacggcttcgcgcagcaggcgcgctccatcggcggcggcgccatgtccgacgccgtcatgcgcggcttcaaccccgccgacgtcgccgtctaccgcgagctcgtctcgcagttcgccgtct

SEQ ID NO: 111414 - DNA, 403 bp, Zea mays
  unsure (1)..(403): unsure at all n locations
  Clone ID: MRT4577_3309C.1
acggttggggtttttcnttgcccaagattttatcaactctcatcagctgttgcgttccccgggtgctggtcccctcggggccttgcccccccgtgtttcgtggtctgttcccggtgggggggtgcttttgcggctccgccgggtggngcgtcccctttctctcttggcctggggccttgccccctggggcngtcttgggcctcgcgggttcgttgttttggttgctcctttgccgctctttttttcntcttggtaagggttcgggtggtcctcagttggccgcctcccggtcccgcttgcgggtcttctgggctggccccctcttgcggcggttgtttgcggctcggggaagcgcttgtgttgggcgctcgttccctttccctcccctccgctttttctcttc

SEQ ID NO: 111415 - DNA, 329 bp, Zea mays
  unsure (1)..(329): unsure at all n locations
  Clone ID: MRT4577_330C.1
attaagtatgaaaatagatcgttacttcgaagaactnttggattntactactagacctgaccttcagcgacctagggaccaggagggtctattttagtactttcgcaaggaatgtcgggggtaggacttcagcggaaaggaggatcgttccctnttagacaaagaagaatgggagatttctaacttatacgaaattcaacatttccaggttaataagattaaaactaggtagaaggacaaggcgaaaagaaaagaagaggaagaaaactaagaaacttttgaaacgcacatcaaggaaatactaactaaagttctcctaaagaaagaga

SEQ ID NO: 111416 - DNA, 375 bp, Zea mays
  Clone ID: MRT4577_33100C.1
atcttttttttctagcccggacagagcgaccgtcggtgcacatattggaggccgttggaattattcggatgaaaacttagatagccgaccaggagaacggttctatgtgaacagtacttgcacatggactagcctttcctctaggtcgggggataccccgttgataccgcgatcacgcgcgtcatcccatagggaatcggcttcatacctaccgagccgctacctggctgctgaccgtgaccacagtaacaccactgtcccctgccgcatcctctgcatgagtcatcttccgttattaacagcccgacaaccctgtaacttggtcagccggcggtaggcgccaccggccggtagagcaccacacattgtgcggcg

SEQ ID NO: 111417 - DNA, 381 bp, Zea mays
  Clone ID: MRT4577_33101C.1
actcatcattcttacacctatcccgtgcgcgctgttaatggaggtgcgagaatagcctctccacaatgtttttgctatcttccatgaccttgacaactgcatgcacccaatcattgtcctctatccttacctaccaatccctgcgcataatctccgtaacatgtcacagccacttttggtcttaaatcttttccaccatctttaagtcccccaatgcctcttgacagtcttatgaagacatgctgcattgctatattgattccaattacaataataggcgccccaccaccgaggtttaagttacccaactacttatcgcaatactctttgttatacaacttaccatctcaatcaccttaacccttactgaaccatacattc

SEQ ID NO: 111418 - DNA, 1997 bp, Zea mays
  Clone ID: MRT4577_33102C.1
ccgtccgaattcggcaccatcccatcccatcccatcccatcccatccgcaaccggacaaccgtcacttccccacatcgcaccgcacccaataaaacgccacaccacgccaccggggtccagggtccatccatcactcacgagcaggatcgagtcgaggcctcagctccctcctcggcgtcctcgcaacgaaggaaaggaacaatgtcagcggctcgtcgtcggtccccaatccccgttctcctcttcttcctcctcctccactccgcgtcgccgagccccatcaagacggtggtggtgctggtgatggagaaccgctccttcgaccacatgctggggtggatgaagcggctgaacccggagatcgacggcgtgacggggcgggagtggaacccggccaacgcgtcggacccggcggcggggcgcgtctacttccgcgacggcgccgcgtacgtggacccggacccgggccactcgttccaggagatccggcagcaggtcttcggctccgacgacgacgccgcggacaacccgccccgcatggacggcttcgcgcagcaggcgcgctccatcggcggcggcgccatgtccgacgccgtcatgcgcggcttcaaccccgccgacgtcgccgtctaccgcgagctcgtctcgcagttcgccgtctgcgaccgatggttcgcgtccgtgccgtcgtccacgcagcccaaccgcctgttcgtgcactccggaacgtccggcggcgccaccagcaacaacccgacgctgctggcggagggctacccgcagcggaccatcttcgacaacctccacgacgccggcctctccttcggcgtctacttccaggacgtgccggcggtgctcttctaccggaacctccgcaagctcaagtaccttctggacttccacccgctgcgcccctccttcgccgaccacgcccgccgcgggacgctccccaactacgccgtcatcgagcagcactacctggactccaagctggacccggccaacgacgaccacccgtcgcacgacgtgtaccagggccagatgctcgtcaagtacgtctacgagacgctgcgcgccagcccgcagtggaaccagacgctgctcgtcatcacctacgacgagcacggcggcttcttcgaccacgtgcccacgcccgtcgccggcgtgcccagccccgacggcatcgtcggcccgccgccctacaacttcaccttcgaccgcctcggcgtccgcgtcccggccatcctcgtgtccccctggatcgacaggggcaccgtcgtccacgggccccacggccccacgcccacgtcgcagtacgagcactcgtccatcccggccaccgtcaagaagatcttcggcctgccgcaggacttcctcacgaggcgggacgcgtgggcggggaccttcgagggcgtggtgcaggggaggaccgagccacgcaccgactgccccgagcagctgcccacgccgacgaggatcaggcagacggaggcggacgaggaggccaagcttagcgagttccagcaggagatcatccagctcgcctccgtgctcaacggcgaccaccacctcgccaccctgcaggaccggatcaagaacgacatgaacgtcagggaaggcatcgactacatgaaggccgccgtcaaacgctacttccaggccggcgcgtccgccagaaggatgggcgtcgacggcgaccagatcgtcaagatgagaccctccctcaccaccaggatccaacgcccatagacagactgtctaatcaaagcgggatcggttatgttcacaaacaggattggactacatatatatatttctaaaaatacagatcacattcagtgttaaaaaaaaaaaaaaaaaagcggcacgagacccgcgagcccgacacgaagcccgctgtttgggtccgatacgatcccggcacgatccgattctatgcgggttcagatagcaaactaggcacggtgggctagcctggtatggcctgtttccctct

SEQ ID NO: 111419 - DNA, 283 bp, Zea mays
  Clone ID: MRT4577_33103C.1
gggatccaacaacccttttatttcattttttatttcaaaactttttaaaacaccttttcgttttgggctttttacgatacaaaccttacaaaacaaaaagccgccccgggtgaccgaactttttaaaatgccaattccgaaaaccgggggggtggggttggggcccttcttagggaaaatgttccaatttttacaagggccagtttaaaagggtaaacccttttaaaatgggggttaaggactggttgatttgcaagtttttttttcttgtttgccaacccca

SEQ ID NO: 111420 - DNA, 1777 bp, Zea mays
  Clone ID: MRT4577_33104C.1
atggtgacctcgcggccgggacgacagtgcggtcgctcgtctccgcccgcctctccccattctcacttcttttcccccagttgcgttgcgtgcccctcgtttccacattttgttgcgctcctttagcgccggcggcccgtagcctcatcatcatttccattccatccggtttcttccgacgacggtgtgtacagagagcaggatcggacaagtctctgctggtagaagcatggcgcagcgccggctgttgggcacggcgccggcgcccgcgggcgatgcggcgtcgcacggctcgggctccagccccgacgcgatgcggatcatggtgggcgtgctggtaacggtcatcgtctgcacgctgctctactgcgtctactgctggcggtggcggaagcgcaatggtgaaactgcgctctgctgccatccggagatccctgctggacagcctatggcggcggtcgagctcggacctgccgctcatggacctcgcctccatcctcgctgccaccgacaacttctccaaggccaacaagctcggcgagggcggcttcggccccgtctacagaggcgtgctgagcggcggctccgagatcgccgtgaagcgtctgtcggcgcggtcgcggcagggcgcggccggagttccggaacgaggtggagctcatcgccaagctgcagcaccgcaacctagtgcggctgctgggctggtgcgccgagcgcgaggagaagctgctggtgtacgagtacctccccaaccgcagcctcgacgccttcctcttcgatccgagcaagagtgcgcagcttgggtggagcacccggcacaacgtgatcctgggcatcgcccgcggcctgctgtacctccacgaggactcgctgctgaaggtggtccaccgggacctcaaggccagcaacgtgctgctcgaccacaagatgagcccaaagatctccgacttcggcatggccaagatcttcgaggacgactccgacgcgatcaacacgggccgcgtcgtcgggacctacgggtacatggcgcccgagttcgcgttggacggcgtcttctcggtgaagtcggacgtgttcagcttcggggtcctcctgctggagatcttgagcgggcaacggaacggcgctttgtacctcgaggaacaccagcagtccctcatccaagacgcatggaagctgtggagtgaagaccgcgcggccgagttcatggaccagtcgctggggcggtcctactccaaggacgaggcgtggcggtgctaccacgtcggcctgctctgcgtgcaggaggaccccgacgtccgccccaccatgtccaacgtcctgctcatgctcatcagcgaccacaccaagttacccgagccagccatgccgcccttgttcgcgcggctcaggaacatctccttgctggcgccgccactcactaccaaaaccgagtccaccacgtctccgctgtcgatcaacgacgtctccatcaccatgatcgaaccgcgatgagctcatgcgttttgtacttctgacaactgagggagaggcttcgagtgtaaatttataagactgcaatcgttcagaatgactactcatatgtactagtaagtttttttttgatggtgtgcacaagtgtgggatttagctactagactagaacatgcggcgcccgtaatcgggtcataacagatttcttttttatgtttatgcattctcctatgtgatccaatggactaaaatgtgtcaccactggtagcaaagagcatataactattttaattagtttgtatcc

SEQ ID NO: 111421 - DNA, 391 bp, Zea mays
  Clone ID: MRT4577_33105C.1
tccatcgcacgccgactccgccactccagtccagacgcgcacatccacctccactgcctgcctccgtttggtttgacttcttcgacatctgggcgctctgcatcgtcgtcttctcgtagaagcgatctggacttgaatctgtctgtcgcctccgcctcctccatcgcacgccgactccgccactccagtccagacgcgcacatccacctccactgcctgcctccgtttggtttgacttcttcgacatctgggcgctctgcatcgtcgtcttctcgtagatggagaggtctatgcctcgtttatatgactgtgactcggggcacaactatggagagggttggcaaagcaccaacctccatccttctcgacgctctcctggaagactacagcc

SEQ ID NO: 111422 - DNA, 363 bp, Zea mays
  Clone ID: MRT4577_33106C.1
aattcggcacgaggccttcggctgcccagagcgcccatcgcccgcgacgcttctataacacgcgacgcgggcgagcgcgctggcgggtgggcgaggcaaaactaaggaggcgggaggggcggcgatgcggggcaggtgacgctgcggcgcgtcgtgggggatggtggcggcggagggtgggcccggcggttccgtgatgagggcgtcggagagagctcgtccccgccgcgcgaggacgccgtcccagcgcccgccggctccgtcgtgagcgggtgcagttgaggcgcccgggaagtgctggcccaggggctggaccggctggggggcgacgactacggggggggggagggaccgggggggggg

SEQ ID NO: 111423 - DNA, 874 bp, Zea mays
  unsure (1)..(874): unsure at all n locations
  Clone ID: MRT4577_33107C.1
ctcgaggccggccgggaaatgacagcccatggagcatggccactgagtcttccgccgtcgccttcgctggcgacgcaaattccaccgaatcatggagcgcgcgggtgcgcaccctgacgcgcctcggacggcacagggagtcgattgctcttcttcgtcatggcggcccctcgccgccgccccacgcgctagcgctcccggcctcggtcatctcctgcgccgcgctatccctccccaccggcgttgcccagatacacgcgctcgccgccaagcgcggcctgctccccgccgccgacgcctacctgctctccgcgctgctgacggcctactcccgcctcggctgcctccggctcgcccaccagcttctcgacgaaacgcctattgagtccacatccgacaccacgctccgcaccgcgttcaactctctcatctccggctgcgcccgccactctctcccggtggcttgcttcgctctcttccgccgcatgcgcgccatcgcggtccgcttcgacgcggtgaccctcctcgcgcttgtccctgccgcgccactgagcgtggtgccgcaggtccacgccctcgctgcccaagtcgggctcgccaccgaaacttctgtggccaactgcctcatgtccacatacgcgcggggngggcgcggttcggcgcggcctccgccccggagggtcttcgacgagatgccgctggcctcccgcgacctggntgtcgntggaacgctgtgctatcagcccacgcgcagaccgggctgggctgtggacgccctcgatctctaccgccgcatgcttagcccgaaagncagcggggggtggagccggacgccgtgacgnatcgtcggcgtgctctcctccgcagcgcactg

SEQ ID NO: 111424 - DNA, 310 bp, Zea mays
  Clone ID: MRT4577_33108C.1
cccggggtggggttatcccctctcatggagcgggcgcgcgacctgcaggcgtggagctaccgagataaagcagagccctttgcttctagggcgtgtactgggctctcatgtagtgcgcaagacctcaggacataccacagcccatatagctggagtgtggcccagagcaagtgccatcagcatatctagaggcgatgcccctcggtatccataagggaccaagagacttctgctagagcgcgaatgcttctaatcctcagcagagcagtttgtggcatgctctaagctgagagagagcgcctgatctgca

SEQ ID NO: 111425 - DNA, 241 bp, Zea mays
  Clone ID: MRT4577_33109C.1
tcgcccacaccttcgcccactttttcgccctttcgtcctctgctggcttctgggccccctggggttcttcttcgggttcttgagggtctcctttcttcggttatctgatcgagctgatcgagatggctgcttcatacctttagtaccgctgcttcctcgtctggctcacctgctacacactacgaccactacgtccacaacgccttcagcacctacgcttaagtcctagatcataatatca

SEQ ID NO: 111426 - DNA, 513 bp, Zea mays
  unsure (1)..(513): unsure at all n locations
  Clone ID: MRT4577_3310C.1
ttttttttttttttttttgaccaaggaaaatcagttcatgttcattataaatggcttcctacatatgaattaccagtccatttcagatcagaaagaagtaaagaagacagggcacatncttctcatgcagattgggttgtatggatcaaacagattcaccgcaggagcacaagtacgagattggtagcaagtctgtagacgagacgcaatgcatgatgctctgatcagaaaagttcaggagcatgatgcatatgctgggattggattggattggaggactgagactgtaaatgtgatcagctggagagctgcaccgagcagcactggctgaagagctccttgccgccgacctcggcgtcctcctgactcatctcgggccggaagctcctccacgccggcaccagccccggtgcagcgccggtgtcgaagctgtgcaccagcgagactgttctgaagctgtcatcggccgacggcacctggtacccggcgaggaagtagagctgcgtgccgacg

SEQ ID NO: 111427 - DNA, 141 bp, Zea mays
  Clone ID: MRT4577_33110C.1
attggggggttgtttaaaacatattctgagggtggaaatgaaaacaacaaacatttatgaccatatcggacaaacctatgttataattaatcttggtcattaggtgttaccaccaatattctgtggcctattttaccattt

SEQ ID NO: 111428 - DNA, 389 bp, Zea mays
  Clone ID: MRT4577_33111C.1
gataactgttattttatatcaaaagggagtacattcacacggactgccggcatatacatctcctagattgcactgaacaacagaaaaatactactgacgtgtgccatccctcttttgcaacgccagttgcgagtctagaatcaaaagttgggacggatacaaccaacagccgggccagaaccgggcgtgggggaactctattatgtacactccaattctccaatcttccatcgagaggacaaaacactgcctactacgacttcgacccttcacagcacacctatgcacaacacttcgagcagccgaggcacgctagagccgcgcatatctgtgccaataaaacagcgcactggtcgtcatcctgttgaacgccttgatgcattacatgc

SEQ ID NO: 111429 - DNA, 192 bp, Zea mays
  Clone ID: MRT4577_33112C.1
atgaaatgcatgtttattctgaaacttctaactagttgtacaactaatccgtgacaaattaccagattaattttactttatttcttcaggcctgggtttttcgatgacttcaaatttgggatcttcaaatttgaaggtgggaaatgtattcatgtctgcattaccaaacatttgcttgagcttaaaaagctc

SEQ ID NO: 111430 - DNA, 561 bp, Zea mays
  Clone ID: MRT4577_33113C.1
tggggaccctcgaggccggccgggttcacttccccggtttggcttccttttctacccgcgggccgcggcgcgtagtcttctactctctagctcgccatcaccgtcgtcatcaatcacggtgaccttgccctcgctgcccgactggaaccggacgctgctgctgctggtaggctgacagcgaggaggacgagacgagggggccatggctcagatcttgctccacggcacgctccacgccaccatcttcgaggccgagtcgctctccaacccgcaccgcgccactggcggcgcccccaagttcatccgcaagcttgtggaagggatcgaggacaccgtgggtgtcggcaagggcgccaccaagatatatgccaccgtcgatctcgagaaggcccgtgtcgggcggacccggatgatctccaacgagcccgtgaaccctcgttgtggacgacgagtacatcatcattgggtccgccaacatcaaccagaggtccatggacggtgccagggactccgagatcgccatgggcgcgtaccagccgtaccacttggcgactaggcagc

SEQ ID NO: 111431 - DNA, 408 bp, Zea mays
  Clone ID: MRT4577_33114C.1
tttttgatgatctgcctaatattatgccattgacattacacaatcacaacatatatagaaacctaaactaattacaagtgacacctatatatatatctacttcttcagtgtatatacatctacacatgaaaactgcacacccaaacatatccatgcactcttcttaggccaagtattgctggacggacaacaatggtttggccacagccaaacaagcagcctgtacattttacaatcaatgggcgtacaatattaaagcatcatttcaagcaccatcagctattatattgcagggggttttctcagctccagttccactggacatccgaaaacaggcgtaggtttgggatccttgttgtaggctttgtcttcgaagcgcagcttccacctgaaccgcgtaactagata

SEQ ID NO: 111432 - DNA, 319 bp, Zea mays
  unsure (1)..(319): unsure at all n locations
  Clone ID: MRT4577_33115C.1
gggacgacccacgcgtgctaaagcaagccatgtagaggagggctttacctatggtcctgttcatggntggcgcgaggcggctcgtctgcaccggcgcctccttcactcatcatttcttgtgtatcatcataacccggcccatgttctagagcatgctgatacactcattcgacaagctgtnccacccctccttgtacacctactacgccttcatcgaggccaccagcatgttccccgtcttttgcaccaccggcgacaagcagactcgcattcggaagctcatacccttatatctccaaacgtcccactaaaccaccgg

SEQ ID NO: 111433 - DNA, 855 bp, Zea mays
  Clone ID: MRT4577_33116C.1
gtgcggcgctcgaggcggccgtgcttacttccccgatttggcttccttttctaccccgcgggccgcggcgcgtagtcttctactctctagctcgccatcaccgtcgtcatcaaccacggtgaccttgccctcgctgcccgactggaaccgtgcctcgctcagatctgtccccgctccactccccgctgttggcggttgcttgctctcatcggccgggaaaggacgctgctgctgctggtaggctgacagcgaggaggacgagacgagggggccatggctcagatcttgctccacggcacgctccacgccaccatcttcgaggccgagtcgctctccaacccgcaccgcgccactggcggcgcccccaagtccatccgcaagcttgtggaagggatcgaggacaccgtgggtgtcggcaagggcgccaccaagatatatgccaccgtcgatctcgagaaggcccgtgtcgggcggacccggatgatctccaacgagcccgtgaaccctcgttggtacgagtccttccacatctactgcgcgcacatggccgccgacgtcatcttcaccgtcaagatcgacaaccccatcggggcctcgctcatcgggagggcctacttgcctgtccaggacctcctgggaggggaggagatcgacaagtggcttgaaatctgcgatgaaaagcgtgagcctgttggggacagcaagatccatgtgaagctccagtactttgacgtcggcaaggaccgtaactgggcgaggggtgtccggagcaccaagtaccctggtgtcccttacaccttcttctcgcagaggcaggggtgtaaggttactctgtacaggacgctcatgtgccgg

SEQ ID NO: 111434 - DNA, 3139 bp, Zea mays
  Clone ID: MRT4577_33117C.1
cccgctgccgcctgccggcgtgcgtgacccgggtcccattccatatccggtgccattttttaatactactagtctcgttcgatcaaaatggggcacgggtcttggctgcatttttctatccccgcgtggccgcgtgtagtcctagtctctcgccagcaccatcatcatcaatcacggcggcgaccccgccccgcctcgatcgcccacgctgcccgactggaaccggacgctgctgctgctgctgctaggctgacagcgacgacgagggggccatggctcagatcttgctccacggcacgctccacgccaccatcttcgaggccgagtcgctctccaacccgcaccgcgccaccggcggcgcccccaagttcatccgcaagcttgtggaagggattgaggataccgtgggtatcggcaagggcaccaccaagatatacgccaccgttgatctggagaaggcccgcgtggggcgcacccggatggtctccaacgagcccgtgaaccctcgctggtacgagtccttccacatctactgcgcgcacatggccgccgacgtagtattcaccgtcaagatcgacaaccccatcggggcctcgctcatcgggagggcttacctgcctgtcgaggacatcctgggcggagacgagatcgacaagtggcttgagatatgcgatgagaagcgcgagcctattggggacagcaagatccacgtgaagcttcagtacttcgacgtcggcaaggaccgcaactgggccaggggtgtccggagcaccaagtaccctggtgttccttacaccttcttctcgcagaggcaggggtgcaaggttactctgtaccaggacgctcatgtcccggacaacttcgttcccaggatcccgctcgccgatggcaagaactacgagccacacaggtgctgggaggatatctttgatgccataagcaaggcccagcatctgatttacatcactggctggtccgtgtacaccgagatcaccttggttcgggacaccagcaggccgaaacctggaggcgatgttactcttggggagttgctcaagaggaaggccagcgaaggtgtccgtgtccttatgctagtgtgggatgataggacttcggtcggcttgcttaagaaggatggcttgatggctacccatgatgaggagactgcaaattacttccatggcacggacgtcaactgtgtcctgtgccctcgcaaccctgatgattctggcagctttgtccaggacctgcagatatcaactatgttcacgcaccatcagaagatagtagtggtagaccatgagttgccaaacgagggctcccagcagaggaggatcgtcagcttcgttggcggaattgacctttgtgatggaaggtatgatacccagtatcactccttgtttaggacacttgacactgtccatcatgatgacttccaccagccaaactttgagggtgggtcaatcaagaaaggtggtccgagagagccatggcatgatatccactcacggctggaagggccaattgcttgggatgttctttacaactttgagcagaggtggaggaagcagggtggtaaggacctccttgtacgtctcagggatctttctgacattattattcccccttctcctgtgatgttcccggaggacagagatacctggaatgttcagctctttagatccattgacggcggtgctgcttttggcttccccgagactcctgatgaagctgcaagagctgggcttgtgagtggaaaggatcaaatcatcgaccggagtatccaggatgcatacataaatgccatacggagggcgaagaacttcatctacattgagaatcagtacttccttggaagctcatatgactggaagccggaaggcatcaagccagaagatatcgattgtcttcacttgattccgaaggagctctcattgaagattgtcagcaagattgaggctggggagcggttcactgtttatgttgtggtgccaatgtggcctgagggtgttccagaaagtgcttccgttcaggcaatccttgactggcaaaggagaacaatggatatgatgtacactgacatcacacaagctctcgaagccaatggaatccaagcaaaccccaaggactatctcactttcttctgcttaggtaaccgtgaggtgaagcaggagggagaatatcaacctgaggaacacccagaacctggcactgattacatccgggctcaagaggctaggaggtttatgatctatgttcatgccaaaatgatgatagtggacgatgaatacatcatcattgggtccgccaacatcaaccagaggtccatggacggtgccagggactccgagatagccatgggcgcgtaccagccgtaccacctggcgactaggcagcctgcccgtggccagatccatggcttccggatgtctctttggtacgaacacctggggatgctggacgacgtcttccagcgccccgagagcgtagagtgcgtgcagaaggtgaacaagatcgccgagaagtactgggacctgtactcgagtgatgacctggagcaggacctcccgggccacctcctcagctacccgatcggtgtcactgccgacggcaccgttactgagctgcccgggatggagaacttccctgacacccgtgcccgcgtcctcggcaacaagtcggattacctcccgcccatcctcaccacataggctgcaggctgcaggcagcgccatggcttctctgtttgtgtttgagatactgaaagttcagatagcagtgtttttatagttattgagtgataataagtgcattgtgcatggtgggacgataggagttagagttgttcataaatcataactactatgtactgcaccagatgacgagattgtgttgccccttgtctggtgtagcttgtgtagctttctgcgttgcagtgctgtttgtaaaggcgacttcagagttcagaattaaaacatggttgttttttcaagtgtgctgctaaaggcctgtatgaaatcgttgatgtggtgctagtacaacaatatggataatctctcgtcaaaaaaaaaaaaaaaaaaaaaaaaaaaaaaaaaaaaaaaaaaaaaaaaaaaaaaaaaaaaaaaaactcgagaggggg

SEQ ID NO: 111435 - DNA, 220 bp, Zea mays
  Clone ID: MRT4577_33118C.1
cgagcaaacgtctgtcatacctggttggaggatcgataaaaaccggggcgttcgctacataggcgcgtaagagtacaaggtaacccagggaaagcgtgccatcgagcctctgtgaggcaaggaaggtattatcttcccatatggttgagaccaccctttagaaggtttacagccagacgttcacactgggaacggtgggggacttgggccaaccaccaat

SEQ ID NO: 111436 - DNA, 264 bp, Zea mays
  Clone ID: MRT4577_33119C.1
ataaccctattcagttattgtgaaacaagaaccgtttactttaaataacttgcgctcccgggaccgggcggaagattatttaccccgggaaaaagttctggggggaatgggcaaagtaagcgcggcaatacacagcgctggtaggtgcacactatatatcatccaatgggcaggtgcccttctgaactgatcggtggatgcatgtacaccaagctggaacccacttgggggggcttgctacgtggtggctactatactaggtaa

SEQ ID NO: 111437 - DNA, 279 bp, Zea mays
  unsure (1)..(279): unsure at all n locations
  Clone ID: MRT4577_3311C.1
ggagcaacgaccagaagaacgcgcccaagcaggcagccgacgacaagagcaagagcgaggacgccaacgacgcgggcgccagcgggcgggacgccaaccagcnagacgaggcggacgacgacgaagacaagaagaaggagcgggagagccaangcaaccccagcaccgccaagaagaaccaaggcgcgggggccgacaggggaggccccagcggaagggacgaggacgcaccggccggaagcggaggcccgggccccaagagcgaggaggcggacaaag

SEQ ID NO: 111438 - DNA, 1320 bp, Zea mays
  Clone ID: MRT4577_33120C.1
tggtaccctcgattctgccgggaacttatctacattgagaatagtacttccttggaagttcatacggctggaagcccgaaggcatcaacccgcaggaaatcggtgctcttcacttgattccgaaggagctctcgctgaagattgtcagcaagattgaagctggggagcggtttactgtttatgttgtggtgccaatgtggcctgagggtgttccagaaagtgcttctgttcaggcaatccttgactggcaaaggagaacgatggagatgatgtacactgacatcgcacaagctctcgaagccaatgggattgaagcaaaccccaaggactatctcactttcttctgcttaggtaaccgcgaggtgaagcaggagggagaatatgaaccagaggagcacccagaacctgacactgattacatccgggctcaagaggctaggaggtttatgatctatgttcataccaaaatgatgatagtggacgacgagtacatcatcattgggtccgccaacatcaaccagaggtccatggacggtgccagggactccgagatcgccatgggcgcgtaccagccgtaccacttggcgactaggcagcctgcccggggccagatccatggcttccggatgtctctttggtacgagcacctgggaatgctggaagacgtcttccagcggcccgagagcgtagagtgtgtgcagaaggtgaacgaggtcgccgagaagtactgggacctgtactcgagcgacgacctggagcaggacctcccgggccacctcctcagctacccgatcggtgtcactgccgacggcagcgttaccgagctgcccgggatggagaacttccccgacacccgcgcccgcgtcctcgggaacaagtcggattacctcccgcccatcctcaccacatagagtgcacactgcaggcagcgccatggctgctctcctctctggcctcaccttggtgtccctgtgtttgtgtttgagacactggaggttcagattgcagcgttgatactatacccactccgtcgacatgatttagtcgttttggacggagggagtagacgttattgagtcataataaaatgcagtgtgcacggtgggagactgggaggatagaaattatagttgtttattacgactgcttactgcttactgcatccagattgtgttgtcccttgtctggtgtaacttctgttgcttgctgcgttgcagtgccggggcccggatgtgactccagatttcagaacttaaacatgattgcttgttcaagtgtgtgctgataaatgtcaaaccgtcgatgtcatgctacagcaac

SEQ ID NO: 111439 - DNA, 335 bp, Zea mays
  Clone ID: MRT4577_33121C.1
ggctggcagcgcggaggccgcacgatgcctggagttactgtaaaagacgtgaaccagcaggagttcgtcagagctctggcagccttcctcaaaaagtccgggaagctgaaagtccccgaatgggtggataccgtcaagctggccaagcacaaagagcttgctccctacgatgagaactggttctacacgcgagctgcttccacagcgcggcacctgtacctccggggtggcgctggggttggctccatgaccaagatctatgggggacgtcagagaaacggcgtcatgcccagccacttcagccgaggctccaagagtgtggcccgccgggtcct

SEQ ID NO: 111440 - DNA, 3211 bp, Zea mays
  Clone ID: MRT4577_33122C.1
ggaccgtccgtccccgcagctggcggcgacgcgaggaggcagagctcgggcggccgtcgggctcctcgggggtcggggatgccttgccggccccgtcgggcgcggcggcctccatagcccttacctgcctggcgaaggggaaaaatatacgtggagggaggctacacttcccacggtttggcttccttttctaccccgcgggccgcggcgcgtagtcttctactctctagctcgccatcaccgtcgtcatcaatcacggtgaccttgccctcgctgcccgactggaaccggacgctgctgctgctggtaggctgacagcgaggaggacgagacgagggggccatggctcagatcttgctccacggcacgctccacgccaccatcttcgaggccgagtcgctctccaacccgcaccgcgccactggcggcgcccccaagttcatccgcaagcttgtggaagggatcgaggacaccgtgggtgtcggcaagggcgccaccaagatatatgccaccgtcgatctcgagaaggcccgtgtcgggcggacccggatgatctccaacgagcccgtgaaccctcgttggtacgagtccttccacatctactgcgcgcacatgggccgccgacgtcatcttcaccgtcaagatcgacaaccccatcggggcctcgctcatcgggagggcctacttgcctgtccaggacctcctgggaggggaggagatcgacaagtggcttgaaatctgcgatgaaaagcgtgagcctgttggggacagcaagatccatgtgaagctccagtactttgacgtctgcaaggaccgtaactgggcgaggggtgtccggagcaccaagtaccctggtgtcccttacaccttcttctcgcagaggcaggggtgtaaggttactctgtaccaggacgctcatgtgccggacaactttgttcccaggatccagctcgctgatggcaagaactatgagccgcacaggtgctgggagggatatctttgatgctagaagcaaggactagtgtttgatttccatagagggatggcccgtgggcacaccgagcaccttggtcagggacaccaacaggccaaaacctggtggtgatgttactcttggggagttgctcaagaggaaggccagtgaaggtgtccgggtgcttatgctggtgtgggatgacaggacttctgtcggcctgcttaagaaggatggcttgatggctacccatgatgaggagactgcaaattacttccatggcacggatgtcaactgtgttctgtgccctcgcaaccctgatgattctggcagctttgtccaggatctgcagatatcaactatgttcacgcaccaccagaagatagtagtagtcgaccatgagatgccgaaccagggatcccagcaaaggaggatagtcagcttcattggtggcattgacctttgtgatggaagatatgatacccagtaccactccttgttcaggacgcttgacactgtccatcacgatgacttccaccagccgaactttgagggtggatcaatcaagaaaggtggcccaagggagccatggcatgatatccactcacggttggaagggccaatcgcttgggatgttctttacaactttgagcagagatggagaaagcagggtggtaaggacctccttgtgcgtctcagggatctttctgacattatcatccccccttctcctgtgatgttcccggaggacagagagacatggaatgttcagctcttcagatccatcgatggtggtgctgcttttggcttccccgagactcccgaggaagctgcaagagctgggcttgtgagtggaaaggatcaaatcatcgaccggagtatccaggatgcatacgtaaacgccatacggagggcgaagaacttcatctacattgagaatcagtacttccttggaagttcatacggctggaagcccgaaggcatcaagccggaagaaatcggtgctcttcacttgattccgaaggagctctcgctgaagattgtcagcaagattgaagctggggagcggtttactgtttatgttgtggtgccaatgtggcctgagggtgttccagaaagcgcttctgttcaggcaatccttgactggcaaaggagaacgatggagatgatgtacactgacatcgcacaagctctcgaagccaacgggattgaagcaaaccccaaggactatctcactttcttctgcttaggtaaccgtgaggtaaagcaggagggagaatatgaaccaaaggagcacccagaacatgacactgattacaccagggaccatagcagggagtccgtgtacgatctatgtgcgtaccagaccgtatgactgggggactaggcatactgcctggggccagatccatggcttccggatgtctctttggtacgagcacctgggaatgctggaagacgtctgcgagcggcccaagagcgcagcgtgtcgtccaggaggtgagcccggggccagatacgtggcttccggaggactctgaggtacgagctggagcaggtcctgcccgagccactcccctcacccgagagcgtagagtgtgtgcagaaggtgaacgaggtcgccgagaagtactgggacctgtactcgagcgacgacctggagcaggacctcccgggccacctcctcagctacccgatcggtgtcactgccgacggcagcgttaccgagctgcccgggatggagaacttccccgacacccgcgcccgcgtcctcgggaacaagtcggattacctcccgcccatcctcaccacatagagtgcacactgcaggcagcgccatggctgctctcctctctggcctcaccttggtgtccctgtgtttgtgtttgagacactggaggttcagaatgcagtgttgatattttaccccctccggccacatgatttagtcgttttggacggagggagtagacgttattgagtcataataaaatgcaatgtgcacggtgggagactgggaggataggaattatagttgtttattacgactgcttactgcatccagattgtgttgtcccttgtctggtgttgcttctgttgcttgctgcgttgcagtgccggaggtgactccagatttcagaacttaaacatgattgcttgttcaagtgtgtgctgctaaatgtcgaaaaaaaaaaaaaaaaaaggcccctagggcctgataatctctcatctttctat

SEQ ID NO: 111441 - DNA, 3050 bp, Zea mays
  Clone ID: MRT4577_33123C.1
gggaccctcgggccggccggccgggattcccacgatttggcttccttttctaccccgcaggccgcggcgcgtagtcttctactctctagctcgccatcaccgtcgtcatcaatcacggtgaccttgccctcgctgcccgactggaaccggacgctgctgctgctggtaggctgacagcgaggaggacgagacgagggggccatggctcagatcttgctccacggcacgctccacgccaccatcttcgaggccgagtcgctctccaacccgcaccgcgccactggcggcgcccccaagttcatccgcaagcttgtggaagggatcgaggacaccgtgggtgtcggcaagggcgccaccaagatatatgccaccgtcgatctcgagaaggcccgtgtcgggcggacccggatgatctccaacgagcccgtgaaccctcgttggtacgagtccttccacatctactgcgcgcacatggccgccgacgtcatcttcaccgtcaagatcgacaactccatcggggcctcgctcatcgggagggcctacttgcctgtccaggacctcctgggaggggaggagatcgacaagtggcttgaaatctgcgatgaaaatcgtgagcctgttggggacagcaagatccatgtgaagctccagtactttgacgtcggcaaggaccgtaactgggcgaggggtgtccggagcaccaagtaccctggtgtcccttacaccttcttctcgcagaggcaggggtgtaaggttactctgtaccaggacgctcatgtgccggacaactttgttcccaggatccagctcgctgatggcaagaactatgagccgcacaggtgctgggaggatatctttgatgctataagcaaggctcagcatttgatttacatcactggctggtccgtgtacacagagatcaccttggtcagggacaccaacaggccaaaacctggtggtgatgttactcttggggagttgctcaagaggaaggccagtgaaggtgtccgggtgcttatgctggtgtgggatgacaggacttctgtcggcctgcttaagaaggatggcttgatggctacccatgatgaggagactgcaaattacttccatggcacggatgtcaactgtgttctgtgccctcgcaaccctgatgattctggcagctttgtccaggatctgcagatatcaactatgttcacgcaccaccagaagatagtagtagtcgaccatgagatgccgaaccagggatcccagcaaaggaggatagtcagcttcattggtggcattgacctttgtgatggaagatatgatacccagtaccactccttgttcaggacgcttgacactgtccatcacgatgacttccaccagccgaactttgagggtgggtcaatcaagaaaggtggcccaagggagccatggcatgatatccactcacggttggaagggccaatcgcttgggatgttctttacaactttgagcagagatggagaaagcagggtggtaaggacctccttgtgcgtctcagggatcttcctgacattatcatccccccttctcctgtgatgttcccggaggacagagagacatggaatgttcagctcttcagatccatcgatggtggtgctgcttttggcttccccgagactcccgaggaagctgcaagagctgggcttgtgagtggaaaggatcaaatcatcgaccggagtatccaggatgcatacgtaaacgccatacggagggcgaagaacttcatctacattgagaatcagtacttccttggaagttcatacggctggaagcccgaaggcatcaagccggaagaaatcggtgctcttcacttgattccgaaggagctctcgctgaagattgtcagcaagattgaagctggggagcggtttactgtttatgttgtggtgccaatgtggcctgagggtgttccagaaagcgcttctgttcaggcaatccttgactggcaaaggagaacgatggagatgatgtacactgacatcgcacaagctctcgaagccaacgggattgaagcaaaccccaaggactatctcactttcttctgcttaggtaaccgtgaggtaaagcaggagggagaatatgaaccagaggagcacccagaacctgacactgattacatccgggctcaagaggctaggaggtttatgatctatgttcataccaaaatgatgatagtggacgacgagtacatcatcattgggtccgccaacatcaaccagaggtccatggacggtgccagggactccgagatcgccatgggcgcgtaccagccgtaccacttggcgactaggcagcctgcccggggccagatccatggcttccggatgtctctttggtacgagcacctgggaatgctggaagacgtcttccagcggcccgagagcgtagagtgtgtgcagaaggtgaacgaggtcgccgagaagtactgggacctgtactcgagcgacgacctggagcaggacctcccgggccacctcctcagctacccgatcggtgtcactgccgacggcagcgttaccgagctgcccgggatggagaacttccccgacacccgcgcccgcgtcctcgggaacaagtcggattacctcccgcccatcctcaccacatagagtgcacactgcaggcagcgccatggctgctctcctctctggcctcaccttggtgtccctgtgtttgtgtttgggacactggaggttcagattgcagtgttgatattatatcccccctccgtccagagggattcgacgttattgagtcataataaaatgcattgtgcacggtgggagactgggaggataggaattatagttgtttattacagtacgactgcttactgcatccagattgtgttgtcccttgtctggtgtagcttctgttgcttgctgcgttgcagtgccggaagtgactccagatttcagaacttaaacatgattgcttgttcaagtgtgtgctgctaaatgtcaaactgtcgatgtcatgctacagcaccaatattgataatctctcatctttttattag

SEQ ID NO: 111442 - DNA, 3159 bp, Zea mays
  Clone ID: MRT4577_33124C.1
cattgggtacctcgaggccggccgggtcttggttgcatttttctatccccgcgtggccgcgtgtagtcctagtctctcgccagcaccatcatcatcaatcacggcggcgaccccgccccgcctcgatcgcccacgctgcccgactggaaccggacgctgctgctgctgctgctaggctgacagcgacgacgagggggccatggctcagatcttgctccacggcacgctccacgccaccatcttcgaggccgagtcgctctccaacccgcaccgcgccaccggcggcgcccccaagttcatccgcaagccggactactgttctagcatgctcaagagaacgctcctgcactgcactagttccctttgatcactctaccctaggctcgtctccaacttgtggaagggattgaggataccgtgggtatcggcaagggcaccaccaagatatacgccaccgttgatctggagaaggcccgcgtggggcgcacccggatggtctccaacgagcccgtgaaccctcgctggtacgagtccttccacatctactgcgcgcacatggccgccgacgtagtattcaccgtcaagatcgacaaccccatcggggcctcgctcatcgggagggcttacctgcctgtcgaggacatcctgggcggagacgagatcgacaagtggcttgagatatgcgatgagaagcgcgagcctattggggacagcaagatccacgtgaagcttcagtacttcgacgtcggcaaggaccgcaactgggcgaggggtgtccggagcaccaagtaccctggtgttccttacaccttcttctcgcagaggcaggggtgtaaggttactctgtaccaggacgcgcatgtcccggacaacttcgttcccaggatcccgctcgctgatggcaagaactacgagccacacaggtgctgggaggatatctttgatgccataagcaaggcccagcatctgatttacatcactggctggtccgtgtacaccgagatcaccttggttcgggacaccagcaggccgaaacctggaggcgatgttactcttggggagttgctcaagaggaaggccagcgaaggtgtccgtgtccttatgctagtgtgggatgataggacttcggtcggcttgcttaagaaggatggcttgatggctacccatgatgaggagactgcaaattacttccatggcacggacgtcaactgtgtcctgtgccctcgcaaccctgatgattctggcagctttgtccaggacctgcagatatcaactatgttcacgcaccatcagaagatagtagtggtagaccatgagttgccaaacgagggctcccagcagaggaggatcgtcagcttcgttggcggaattgacctttgtgatggaaggtatgatacccagtatcactccttgtttaggacacttgacactgtccatcatgatgacttccaccagccaaactttgagggtgggtcaatcaagaaaggtggtccgagagagccatggcatgatatccactcacggctggaagggccaattgcttgggatgttctttacaactttgagcagaggtggaggaagcagggtggtaaggacctccttgtacgtctcagggatctttctgacattattattcccccttctcctgtgatgttcccggaggacagagatacctggaatgttcagctctttagatccattgacggcggtgctgcttttggcttccccgagactcctgatgaagctgcaagagctgggcttgtgagtggaaaggatcaaatcatcgaccggagtatccaggatgcatacataaatgccatacggagggcgaagaacttcatctacattgagaatcagtacttccttggaagctcatatgactggaagccggaaggcatcaagccagaagatatcgattgtcttcacttgattccgaaggagctctcattgaagattgtcagcaagattgaggctggggagcggttcactgtttatgttgtggtgccaatgtggcctgagggtgttccagaaagtgcttccgttcaggcaatccttgactggcaaaggagaacaatggatatgatgtacactgacatcacacaagctctcgaagccaatggaatccaaacaaaccccaaggactatctcactttcttctgcttaggtaaccgtgaggtgaagcaggagggagaatatcaacctgaggaacacccagaacctggcactgattacatccgggctcaagaggctaggaggtttatgatctatgttcatgccaaaatgatgatagtggacgatgaatacatcatcattgggtccgccaacatcaaccagaggtccatggacggtgccagggactctgagatcgccatgggcgcgtaccagccgtaccacctggcgactaggcagcctgcccgtggccagatccatggcttccggatgtctctttggtacgaacacctggggatgctggacgacgtcttccagcgccccgagagcgtagagtgcgtgcagaaggtgaacaagatcgccgagaagtactgggacctgtactcgagtgatgacctggagcaggacctcccgggccacctcctcagctacccgatcggtgtcactgccgacggcaccgttactgagctgcccgggatggagaacttccctgacacccgtgcccgcgtcctcggcaacaagtcggactacctcccgcccatcctcaccacataggctgcaggctgcaggcagcgccatggcttctctcctgtctggcctcagcttggtgcccctctgtttgtgtttgagatactgaaagttcagatagcagtgtttttattatagttattgagtgataataagtgcattgtgcatggtgggacgataggagttagagttgttcataactacaccagatgacgagattgtgttgccccttgtctggtgtagcttgtgtagctttctgcgttgcagtgctgtttgtaaaggcgacttcagagttcagaattaaaacatggttgctttttcaagtgtgctgctaaaggcctgtatggattcgttgatgtggtgctagtacaacaatatggataatctctcatctgcctgtaaagagatctaagggctagtttggtaattccattttcctaagagattttttttttctaagag

SEQ ID NO: 111443 - DNA, 543 bp, Zea mays
  Clone ID: MRT4577_33125C.1
ctcacaactagttaaatacaatcaaaaaagaatccatttctcctgcatgcctgccgtttgcaaggttttagacagggtctatgcacacagcatgcaaccagcgtcccttaagcctgccttttagctagacacagggagagccacaaggggccaagtagggggcggtttgagaacggggggaccaactgggcttaacaagacgttcaacacaggtcaaacccactagcaggcaacctgagtgaggcaatggtacgggaagggaacagggtgtcagcgcctcctatgctcataagagcgtcacaagaacatggagctgaaaaggacctgatggtcactaaaagagacccaagagagatctgcttgtgattcgacgaagatccaatgatcgggtctgggggatggaaagccagatccttggcagaaccatagcgcccgcaaggctcgcccaggatgcgccttgaagatgtggaccatacgtagaccattcggactgggctcccagcagtgaccttgcggccatctgcgcaccagctacactttatt

SEQ ID NO: 111444 - DNA, 3177 bp, Zea mays
  Clone ID: MRT4577_33126C.1
acttccacgatttggcttccttttctaccccgcaggccgcggcgcgtagtcttctgctctctagctcaccatcaccgtcgtcatcaatcacggtgaccttgccctcgctgctcgactggaaccgtgcctcgctcagatctgccccgttccactccccgctgttggctgttgctctgctctcatcgtcttcggccgggaaaggacgctgctgctgctggtaggctgacagcgaggaggacgagacgagggggccatggctcagatcttgctccacggcacgctccacgccaccatcttcgaggccgagtcgctctccaacccgcaccgcgccactggcggcgcccccaagttcatccgcaagcttgtggaagggatcgaggacaccgtgggtgtcggcaagggcgccaccaagatatatgccaccgtcgatctcgagaaggcccgtgtcgggcggacccggatgatctccaacgagcccgtgaaccctcgttggtacgagtccttccacatctactgcgcgcacatggccgccgacgtcatcttcaccgtcaagatcgacaactccatcggggcctcgctcatcgggagggcctacttgcctgtccaggacctcctgggaggggaggagatcgacaagtggcttgaaatctgcgatgaaaatcgtgagcctgttggggacagcaagatccatgtgaagctccagtactttgacgtcggcaaggaccgtaactgggcgaggggtgtccggagcaccaagtaccctggtgtcccttacaccttcttctcgcagaggcaggggtgtaaggttactctgtaccaggacgctcatgtgccggacaactttgttcccaggatccagctcgctgatggcaagaactatgagccgcacaggtgctgggaggatatctttgatgctataagcaaggctcagcatttgatttacatcactggctggtccgtctacacagagatcaccttggtcagggacaccaacaggccaaaacctggtggtgatgttactcttggggagttgctcaagaggaaggccagtgaaggtgtccgggtgcttatgctggtgtgggatgacaggacttctgtcggcctgcttaagaaggatggcttgatggctacccatgatgaggagactgcaaattacttccatggcacggatgtcaactgtgttctgtgccctcgcaaccctgatgattctggcagctttgtccaggatctgcagatatcaactatgttcacgcaccaccagaagatagtagtagtcgaccatgagatgccgaaccagggatcccagcaaaggaggatagtcagcttcattggtggcattgacctttgtgatggaagatatgatacccagtaccactccttgttcaggacgcttgacactgtccatcacgatgacttccaccagccgaactttgagggtggatcaatcaagaaaggtggcccaagggagccatggcatgatatccactcacggttggaagggccaatcgcttgggatgttctttacaactttgagcagagatggagaaagcagggtggtaaggacctccttgtgcgtctcagggatcttcctgacattatcatccccccttctcctgtgatgttcccggaggacagagagacatggaatgttcagctcttcagatccatcgatggtggtgctgcttttggcttccccgagactcccgaggaagctgcaagagctgggcttgtgagtggaaaggatcaaatcatcgaccggagtatccaggatgcatacgtaaacgccatacggagggcgaagaacttcatctacattgagaatcagtacttccttggaagttcatacggctggaagcccgaaggcatcaagccggaagaaatcggtgctcttcacttgattccgaaggagctctcgctgaagattgtcagcaagattgaagctggggagcggtttactgtttatgttgtggtgccaatgtggcctgagggtgttccagaaagcgcttctgttcaggcaatccttgactggcaaaggagaacgatggagatgatgtacactgacatcgcacaagctctcgaagccaacgggattgaagcaaaccccaaggactatctcactttcttctgcttaggtaaccgtgaggtaaagcaggagggagaatatgaaccagaggagcacccagaacctgacactgattacatccgggctcaagaggctaggaggtttatgatctatgttcataccaaaatgatgatagtggacgacgagtacatcatcattgggtccgccaacatcaaccagaggtccatggacggtgccagggactccgagatcgccatgggcgcgtaccagccgtaccacttggcgactaggcagcctgcccggggccagatccatggcttccggatgtctctttggtacgagcacctgggaatgctggaagacgtcttccagcggcccgagagcgtagagtgtgtgcagaaggtgaacgaggtcgccgagaagtactgggacctgtactcgagcgacgacctggagcaggacctcccgggccacctcctcagctacccgatcggtgtcactgccgacggcagcgttaccgagctgcccgggatggagaacttccccgacacccgcgcccgcgtcctcgggaacaagtcggattacctcccgcccatcctcaccacatagagtgcacactgcaggcagcgccatggctgctctcctctctggcctcaccttggtgtccctgtgtttgtgtttgggacactggaggttcagattgcagtgttgatattatatcccccctccgtccagagggattcgacgttattgagtcataataaaatgcattgtgcacggtgggagactgggaggataggaattatagttgtttattacagtacgactgcttactgcatccagattgtgttgtcccttgtctggtgtagcttctgttgcttgctgcgttgcagtgccggaagtgactccagatttcagaacttaaacatgattgcttgttcaagtgtgtgctgctaaatgtcaaactgtcgatgtcatgctacaacaacaatattgataatctctcatctttctgggggaaaaaaaaaaaaaaaaaaaaaaaaaaaaaaaaaaaaaaaaaaaaaaaaaaaaaaaaaaaaaactcgagagggggc

SEQ ID NO: 111445 - DNA, 1685 bp, Zea mays
  Clone ID: MRT4577_33127C.1
agcaaaccccaaggactatctcactttcttttgcttaggtaaccgcgaggtgaagcaggagggagaatatgaaccagaggagcacccagaacctgacactgattacatgcgggctcaagaggctaggaggtttatgatctatgttcataccaaaatgatgatagtggacgatgagtacatcatcattgggtctgccaacatcaaccagaggtccatggacggtgccagggactccgagatcgccatgggcgcttggcagcatttttctatccccgcgtggccgcgtgtagtgctagtctcactccggcaccatcatcatcaatcacggcggcgaccccgccccgcctcgatcgcccacgctgcccgactggaaccggtaatccacttcgctgtgccgcctcgctcagatcccacgttggctgttgttgttgctctgctctcctcggcccgggaaaggtgggcgcaggggcacccgtggctccgttggctggcgccgctgccgtctttccgttcgtttcgccgttgcgcggggctcgatctgcgtgcgcgcggcggcctctttgcttgctgtccctagtgtgtgtcctgtcctgtcgctcacgctcttccgcgggcgtgcgttgtgccgcttccgcaggacgctgctgctgctgctgctgctagtaggctgacagcgacgacgagggggaggacgaggcgaggggagccatggctcagatcttgctccacggcacgctccatgccaccatcttcgaggccgagtcgctctccaacccgcaccgcgccaccggcggcgcccccaagttcatccgcaagcttgtggaagggattgaggataccgtgggtatcggcaagggcaccaccaagatatacgccaccgttgatctggagaaggcccgcgtggggcgcacccggatggtctccaacgagcccgtgaaccctcgctggtacgagtccttccacatctactgcgcgcacatggccgccgacgtcgtcttcaccgtcaagatcgacaaccccatcggggcctcgctcatcgggagggcttacctgcccgtcgaggacctcctgggcggagacgagatcgacaagtggcttgagatatgcgatgagaagcgcgagcctattggggacagcaagatccacgtgaagcttcagtacttggacgtcggcaaggaccgcaactgggccaggggtgtccggagcaccaagtaccctggtgttccttacaccttcttctcgcagaggcaggggtgtaaggttactctgtaccaggacgcccatgtcccggacaacttcgttcccaggatcccgctcgctgatggcaagaactacgagccacacaggtgctgggaggatatctttgatgccataagcaaggcccagcatctgatttacatcactggctggtccgtgtacaccgagatcaccttggttcgggacaccagcaggccgaaacctggaggcgatgttactcttggtgagttgctcaagaggaaggccagcgaaggtgtccgtgtccttatgctagtgtgggatggtaggacttcggtcggcttgcttaagaaggatggcttgatggctacccatgacgaggagactgcaaattacttccatggcacggacgtcaactgtgtcctgtgccctcgcaaccctgatgattctggcagctttgtccaggacct

SEQ ID NO: 111446 - DNA, 263 bp, Zea mays
  Clone ID: MRT4577_33128C.1
ttctagatcgcgacggccgcgctcattagtcttgttgcgaaagctgactctaatgatcatcaccttcctagctacaggtcaacaattagtgtcgttgatactccatgacgaagcgccttcctctgttgttcctagctatggtgatgctgtccgacgcttgtagtgcggctgatcacaggtgtggagttttggtgctgaatgtgaaggtggagtcgacgtgggcgcccgtgacgttggttgaccatcatgattcgatgattagg

SEQ ID NO: 111447 - DNA, 453 bp, Zea mays
  Clone ID: MRT4577_33129C.1
attcggctcgaggcttgcactacctgatttattggcaaaaccgataccgtcacagttgcgatgactcactgtcactatacagagcatgcctctgacgcagtcacaacgggcacaacagaggcatgcatggctacgcacatttagatgtaccagacatccacccgtagacctattcaccagtcttcattcacaagatacaccccagacgtacgtggctttatgcgtagactgagccaggactatctgtttgtacgggaatttgatgcattcatagcatgtgtactgatcaaatgctgcaggcaaaaagacaattcggacatgtaattcatgctggatggagtggtgtacctgagcgacgcgatctcttggcatatgaacgaaacttaccgatggatcgtatatctagcccgagttacccccttaatagccagcctagagtgccacagcattatt

SEQ ID NO: 111448 - DNA, 281 bp, Zea mays
  Clone ID: MRT4577_3312C.1
ttacgatgcacgcgcacgtacgtaagctctgaattcggctcgaggtataaggacgacctgaactcttcatgggtcagactctcagttgtagagacgggtgtctgcaccatggcaactttctattctgtatttggtgatgcgaacatcaaaactgactcttttagctaagcccccactactgtgcgcgaaatcattggcgatgtcaatggggtcaagatcagaatcatctattcacctggccttcgtgccaacgttatggaccaatgatcaaacagaaagat

SEQ ID NO: 111449 - DNA, 448 bp, Zea mays
  Clone ID: MRT4577_33130C.1
ttcggctcgagctacttcttgggttaaggatttttaaccacagggagctggggtccgcggacggaaaccacgagagctgcctatgtcatggtcttccaccacggttgatgggcctttatgtcacggcggggcttctcaatcccgccttaaatgaggccgaggtcggcctaagcactaagacccctagcaccaatatctggcttgaagtaatcgtgcgccccggaataaagagctggcgtaatcgatttgtctaaggtcgggaggtgcaacaaaccgactcgccaacaggggcgtcctcagttgctcagaccgtaaagccgatcgcgctccctgctgagccaaccatcggcgattgttgctgccaggagacacgcaagcccttgattcccacggacgatgggcgcctaaaggtttccatctacgcctactatatggaagatccggactt

SEQ ID NO: 111450 - DNA, 257 bp, Zea mays
  Clone ID: MRT4577_33131C.1
ggaaactcctcactcactcacatgctcagcaccaaggacgagcagtccttccggcgatgtgggacaggaacaggtccctttcgctatgcacaacatccagacagattccaccgacgcgcccacggaggcggtggaactacgacaactcctgccgctctacaccaacgactttttttgccgcgtgatactaggcgcgtcacaccggaaccaatgccggaacaggctgttcagcgagctgacaaaaatcaacgtgtccc

SEQ ID NO: 111451 - DNA, 501 bp, Zea mays
  Clone ID: MRT4577_33132C.1
cccctcctcgagtttttttttttttttttttttttttttttttgttttttttttttttttttttttttcttttttctgtgttttattggtttaaactctatgttttttttgtttttttactctccccagcaccgaaacatgcaaaaaaaactaccttaatgccgttccttgtataggaaacaggaagaatcttttacattgttagaacgaagacaaaaaggctaaaaaaaaaggggaaacacccttactcggtgaagccacagggttttttaaaaagccaaactcggtgttccaagaccccaaaaaccccccacgcgggtggcaaaccaaaagggggaaaaatctggttgagggggggggtgggcccctttttaggaacttaagggccgaaagaagggcttttttttttttgaggcaacagtttttaattaaaaaagaccccaaaaaaagcaccctggcaccggaaggggcccccctcccacaagatgctttttttttttt

SEQ ID NO: 111452 - DNA, 279 bp, Zea mays
  unsure (1)..(279): unsure at all n locations
  Clone ID: MRT4577_33133C.1
gggtgatctactacctaaaacacatggacgcgcatacgaaagtgaccatctttcccaaacatcaacacaacctagctggacatggacgctcttgtggttctgccggagcagcacagccaccaccatgaccgccaccctggtacccgcagcaagtgatggggtccatacttttgatgactgactaactgtactggcttccgcggaatgaactgccagtcttttcactattngtcgtgcgtcagtgctattccattcccaacaccttctggtgggaactac

SEQ ID NO: 111453 - DNA, 533 bp, Zea mays
  Clone ID: MRT4577_33134C.1
gaggcttccggttgcttcactgtacgcgggttccccaatgaaagcctaaccagagcacgcatccctcctcgcgtaggctcgagccgggctcgggggcctactaactgtgagcggcagggacctataaggctccggtagtgtccagaaaacatctcatgtgttgctgagagaccaagaggaggagagataacgaggtagcgaatgatggagcgtaagagagaaacacggtagcatgacaggggaggcagaggaggcggaagtgaatgatgaactttaggctggatatcacattgggccggagcgctggaactacatcaccactacctgacacgaggctgaagatcgcgtcgtcacacgggggcccaaagattaataaaacatactaaggctgatagtgatgagaaactaataagagccggcaaaaatctagaaacagacaagaatgatgcacagtgcatagctcatcacggcgagctgcccagtatcgctatcaccaagcatggtgaggcacaaccatcggcagggaaatcaaa

SEQ ID NO: 111454 - DNA, 754 bp, Zea mays
  unsure (1)..(754): unsure at all n locations
  Clone ID: MRT4577_33135C.1
attttcttcaccactgaatcggctagactggtctctcatcagctcaacgatttaggcatttagccctgcgggcagcagttgcgattgcgagcaaaggccaaagaacacagaaagctaaggttatccacacaggttagctttacttcttcagctagctgatttcctctgcgtttgaagctcttgttgccgttgccggtcagggtattcgggctactcgccttgttaattcagtcaggagatagatagtaacctcatgcagtcatgctcgtgcgcgtttcttctgtatatcgatggaatgatcagtaacttttatcgattcagagattttgttcgggtcgattcctcctccatgctgtttgcattaggtatctcaggaagaaaatatgtttccttttttttccctgaaggattgggattgcaagctcgttcctgattttgactgtgctgttcatccaactaacttgcttatgtgacgcatgccatggcgcagagtctaatcaagcttacagcccggaagcgtcacagacatggggnaacgcagcagttgcaatcagtacgatacatccatctctggcaccgtgtatcttgtttcatcatcttagcttgcagtagtaataactcgccaattggctgctccattttcgatgttcttcagtatcttcagtctcggcaactgcgacgntagtagtaatgatcgccctcatcagaaagtgccgcgtcgtgnggaaagagataaagaagaaatcgtaaagaa

SEQ ID NO: 111455 - DNA, 514 bp, Zea mays
  Clone ID: MRT4577_33136C.1
ccataacatttcctctcttccatatccaggaacattcagaactcaatacacagatggtacttcacataaagaataacattatctgttaaacatttttcctttccattaaccaatttaacaatatgcctctggtataaaaggaatagacaaatgactaaatcttctgatatctgagttctgactgtagaaaaataccacttcagtcatattgtttgttttcctttaaactttcatcttttgttacttcatttctccttttaaaatgcaactggagcctatgcctggtgtatcgtagggccactgtccctgtcaaccttccctctgagggtgattcacaatcattcttacgggggctggccttgcctcccttgaggacaacagacgtatatgtatatgagaaagtgtctgtaaacgtgaggcattccagagaggtatgtgtctaaacatgtattcctcaggcctcccacatgccaggccctctggaaaccatgctcctagcctcaggccagtaata

SEQ ID NO: 111456 - DNA, 296 bp, Zea mays
  Clone ID: MRT4577_33137C.1
cggacgcgtgggcgtacgcgtggggggggcgggcatcgcatgcgacgcccacaacgcatacgtgctcccgcgccggcttctcccaggcccacggcgacccaccatgattgatagaggcatgagactgtggacatcattgctattgcgattcgattactggatatagtgtaggtggtaaagcatcacctgtgcacacactcttcgagctgttggtgcatcaagggccacctacacgaagatgctctatttgtcgtcttatgtcacattaaatgtaacccaacgctcattggtatctt

SEQ ID NO: 111457 - DNA, 264 bp, Zea mays
  Clone ID: MRT4577_33138C.1
ccggggtcgcacccacgccgtccgtctccacctagcccctcctcgctctcacggaaaaggcgacaggctcaagggccaagggccacagccgcgccccgtccctgccttctcctctacctctacctcttcctattcctgctccactgctctaggcaggccaaagggcgaggctcgaaggatcctgccgcgcgcgaggatcgccttaccaggtcccatgcagctcggactgtcacgtctgagtcgcgcactcgggacagacgcgcg

SEQ ID NO: 111458 - DNA, 331 bp, Zea mays
  Clone ID: MRT4577_33139C.1
ggaagaggttttacctaaactatgtcagagacatcttctaaatgcttaacatatggactgaaaacttctcagttctctaaagagattgatgaaaccatcttattcgcctatatctatcgtgagatagaatctgtacacaacggtgttcaaagcacacatatctttaggatctccaaggctgatgtttatttactttgtctctgcttcattgcaaaacttattgcatcaatattcttatatgatattgccttattgctggatgctggatcttcttatcagagaacagactttattgtgcttcccatgatacactagcgatcaaattgctgcc

SEQ ID NO: 111459 - DNA, 451 bp, Zea mays
  unsure (1)..(451): unsure at all n locations
  Clone ID: MRT4577_3313C.1
cggacgcgtgggcggacgcgtgggtttttttaaaagaaaggcggatagcaacataggaagttcagatagtcaccacatggagaggactacatgctcaaaatcaacaggaaacattgaagaacttgctgttgcagctacgtcagcaatggattgtacattatgtaaagaaaatcatttgagcatggaggaactccggatgatacatgttgcaaaatggaggacactctttcaacataacagattgcgccattggggtgttaggagaagtcctaagattcagttgtttcttgagctaaggctacaaaagccctctacgcctatagcttctgatagtatgtcaactccaacaaaagaacagtcatccctagagagcacaggaaaccttgatatcaccaaacttctggatgaactngaaataccatctcggttctagaatagcacatcgtcttca

SEQ ID NO: 111460 - DNA, 221 bp, Zea mays
  Clone ID: MRT4577_33140C.1
tgctcactggagaatttactatgcattcaaagtgaaggttgtactcccaacagcgggaggtgtttcacctgccccagcagcaaatgctttatcgaaagccggcgctagttttttctttctgtgttacatgttatcacatttggtgaaaagtaattcattattcgtcatagatttagcttcctattctattttatgtaacggaaaaaatttttgcatccttt

SEQ ID NO: 111461 - DNA, 226 bp, Zea mays
  Clone ID: MRT4577_33141C.1
cgaagcgccgcccgctcgctcgcctccgctccggcagcgagctctatcccccgcgacgagcagcagctgccaacgaagcacgcagaccggggaataaatattggtattggtagtgtgatatctataagaagtcaagcccttggtgagaggattaggccagttctcacggtgaacaagatggacaggtgcttccttgagcttcaggttgagggtgaggaagcttatc

SEQ ID NO: 111462 - DNA, 2832 bp, Zea mays
  unsure (1)..(2832): unsure at all n locations
  Clone ID: MRT4577_33142C.1
gactaaaatagagtttttaaatagaatttctaggaactaaagtttagtacctaaaatttaggagagtgacttaaaagaaccaaacgccctaaagatcggttgaacacatgccttctacggtaaattagatgaagcgctaaataaaacaaggtacatgtaaccaacgggatgagtttgttacatctaaaagggtaaagtaactgccaaagctatttacattttgttaattcttcaaatattgccccaaccttcagttctaaatgcatcagttagcgcaatgccagcagacgccagttgtgaccctgacgtgttggtattagtcccagcacattaagcagaacgtaaccgaagagaagcagcagcttacccaaaggatcagtgttcttccccatttgtacaatagtatatgacgagtcaatgttacatacaataccaagcaaacaaaaaagcaaaccttttttttctgtacagactacagagctacgcctgacatgttgtctgcaaatcaccccattacacaataccgacgaagaagaaaaaataaatatatgaacagctctacttacaaacaagggaaatttggatccataccattaaaagatcaccactttagatccataccattactatctcacttacatgtgggtccacatgagtcaatgacatatgaggtccatggtatatatctaaagtttggatcttttaatggtatagatccaattgttcctacaaacaacccattaacatgtacagacacagccctgtcggcacgtggttcctacaagaacagaacaaggaaactcaaccacatccttcaatgacacattactgcagggttcgttagtcagcacaggtgaaagctgtggtgtgggtgacattcagaatgtagcagattctcatcgaaatgcacactctaaagagtctaagctctgaatctcagcgacagagtagttcttcctttcatcagcatgagacttcatgtaaagcctggaggaattgttgaactgttccgtggaggcaaccaaaaaccaaccgtggagcatgaggctatccgggtctgcaaaaccaaacctgttgcagtggtagtactcaactctcgacaacagtccccttcagaaagactcacgccaagcgacgaagattcctcgcaaaattgacagcaagcatggaaagaatggtctaatccatgcatccattcaaagatgcctgcagaatttggccggctctgtattctagttctcacgggcaccaaccttaacagtggacttctgaatgttattaccttcaccgcaaactttgccgttaggaacggatagaagtcgcgggacatccaggcaatcgttccttccagagctactgctgctgccagaaccttcagtacgatccttctcgaattcccctcctctgacagtctccttcctcatgtctgggaagttcaaaataagcgactcagcagcatgttgagcatcaggaacactggtggttcgtcggtgtgtctttgcccttggggtagacgggcaggtcttagaatcctttgtggaaggcgcatttggatcataaggatgtgcagctaggtaagacagtgcagtgacaacgtctcctatcagcggccgggatgctgcttgctcctgcaaacacatagctgcaacagctaaggcctggtacaaaccccttttcgggtagccgccatgcaacaatggatcagcaagctggcagaacttccttcggtctctgaaaagtggacgagcccatgcgacaaggttttgctcccctgaaggctgggtgtgatcgattgctttgcggcctgtaataagttcaaggaacacaacaccaaagctgtaaacgtcagactttagcgtcaactgccctgtcatggcatactcaggagcgcaatatccatatgttcccataactcgtgttgatacatgggttttgtcaccaactggaccaagttttgcaagcccaaaatcagacagcttagggtagtagtcttcacccagaagaatgtttgatgatttgaagtctctgtatatgactggtggatttgccttgtcatgaaggtactccagacccttcgctgcaccagcagcaatcttcatccttgtattccagtcaagaggttccttgcctgctggaccaaacagacgattttccagtgatcccaacaacatgtattcgtaaactaagaggcgctggtcaccatcggcacaatagccaattaatctgaccagattaggatggtgcaagagacttagcatgagaacctccacaagaaattcacgatttccttgaaaaccatttctatcaagttgcttcacagcaatgacctgcccattttccatatgtcctttatacacacgaccaaagccaccttctcccaacaggcaatctcttctgaaatttttggtggcaacagccaactcccggaaactgaaaatctgtgccgggccatgtgcagtgtttcctcctctgcgaacaggtacagaatcttccttcctggagctcgaagcacgtgaatttgatcgaactggtgccgccttggccgcaggccgggggctcggcgagagcgccgccaagctcttgtcctccttccccgaggaaccggagcacggtaagcagctcatctccccgctcctgagcacggacacacagttcctgcgaatgccagcagccaatccgccaagaagtccagctcaagactcgtcctttcctctccaccggccgatagctctcccgtgaaaccagctgaatttggggggagatttccggccgccccgccgggaagagagagagaggaaggaagggagaggggaagtcaagactggngagaaa

SEQ ID NO: 111463 - DNA, 1163 bp, Zea mays
  Clone ID: MRT4577_33143C.1
gggaaaaaagcactcgcctcggccagaatggtgccgagttccttctgtccagcccacgtttccctcatatccgtcgcgcccaggatcattttggtatgcctgtcgttttcctggctctcctcacgccgatggtcgctgctccccaacgtgccgaaacgtgccgagctcctcactgtcgtgcgtcgctacgggcttgcttccggacgcagctgtctccatcacttgcgtcagctcgctagcccagcagctctttacgccaccatcttatattgctgtcgatcctaccgtcaaacgttgtgtgtggcgtcatcattgcccctgtccactcgtttaggttctcgccgtgccatggccgcacgggaaggctggcaggggttggccatggtggtcaggcactgctattttcgtgtgccacgctatggccgcacccccttccatgctgttgtgtcgtggttgtccccgtctcctttgtcgtgcattttcaacttcaagcactgcttgcagcatcgtcgatgccgcgccttctttatacttgacgcgtcaaactccttcccgtcgtgtgccacttgtccggttaaatgtgagacttggccgtcgacacgctggccgtctcttgggattcgacgtcgtcatcgcttcagccgccagatgctcgatgaaacgctcgaccctcggaactgtcatcattccaacagcttcgccgcatcttgcgtccccgctggtgagactcgcagtcctcgctctgtttaatttctcatcagacgccgatgtggctagctgtggatttatgtgtgtatgtgtgtttgcgtggaggcccctattcgctgtccacctattgcgcaatgaaaggctcgaactgggcatcgttgtcaatctcgcggtgtcaagtcagatttaggtaatagtagccaattcgttacttccgtatttggtcggatgaatttagttaaacatattagttgtgtcatttctcttgtcgacaacgtgtgcgtaatggtcataagaataatgtctattgaaatgttcgagtcacttgctgtgatagggtcgtgtgtacggtcaaatgccttagttacttgtgatgctagtcgtattttgtaattgtcatttatatatatatatatataaaaaaaaaaaaaaaaaaaaaaaaaaaaaaaaaaaaa

SEQ ID NO: 111464 - DNA, 214 bp, Zea mays
  Clone ID: MRT4577_33144C.1
cccacgcgtccgcggacgcgtgggctaatacataccgaggccacactccaactgcttctccatggcgatcctgtaaaaggcaccggatctctatgctgctcgcgctgaccgttgctctcttcacccgggcggaggacgagcccgtccccgcggcggatggccaggcccctctcacccttgaagtctacagcttccacgaggacgtagccaagca

SEQ ID NO: 111465 - DNA, 398 bp, Zea mays
  unsure (1)..(398): unsure at all n locations
  Clone ID: MRT4577_33145C.1
ntaacttatactccctcagtgccaagtgttgttctcgctttcggagtagtcaaatatatacaacgacaacatagttttttgtcccactgcaaaaaaaagatagaaaaaaacgctgaaaggtaaatgaaagacggtagagttaatggtaaccctgcctatgagttgtcaggttattctcattctttaacagccatgcggttagagatcactttctcctttctcctactgcttggaaactcagcatggcttcgtgttctatttcactgccattggggtccacatttgggactcatgtttgtccggtgaattgagtttctatttttttacacttataaatctcactctatcttgttttttgatattaaaaaaaaaaaaaaaaaaaaaaaaaaaaaaaataa

SEQ ID NO: 111466 - DNA, 272 bp, Zea mays
  Clone ID: MRT4577_33146C.1
cccaagcttgtactgtaacggagcccctggtttgctgcctagcttgctagattactcattcaacggcgataagtaacgtattgtcacccatcaacatgggtggcggcgtgagcaatgacctgaatgaaccattgcaatggccaggaagaatctttaaggaaaaaagatgattggtaaaaggaaaaaagatgattggaaaaaaagctacgtaaatagccaggggtttcaaaacatagtttgaaccccggccggggccagtcgttggaaggggc

SEQ ID NO: 111467 - DNA, 280 bp, Zea mays
  Clone ID: MRT4577_33147C.1
ttcccgctcgaccacgcgtccgtttttcgtccactttattactgatcgcatgcatctgagcacggctgctaccagaaagggcaggttcgatcggtctagtgtgaactcggctttgaataactagtctgtggacaagggctagttcggtgatgtgtatggaacggtcgtcactgagtcatgcacgatttggtatccacgtgattatggtcgacggtttgaggaactctctgatccatcatgacacaaagttgatgctgcgcgaacgaccggatatcattct

SEQ ID NO: 111468 - DNA, 425 bp, Zea mays
  Clone ID: MRT4577_33148C.1
gaaccgggggacctacagggtcgagtgacattcactctggcaacagtcttttagctcgcacttcaccgtgaacttaaacgagcagaacgggttctgcaactctgggttcgcggttcacctacatgaaagctgcagggctaggaggggtccacacacccgcacatgagcgagcaggcaggacatattcactcagctctgctgtggctgcgcagcttacctggaccagtaagtacaactgataacttctggcgccctcgccgggctcaccatcacacgttcttattctgatgatgaagcatgccctgcttctaagctgaaccatcaccggtttctaagcccttgtagagccaccttcattcttattgcgaccaggcctgctgctgcccgtccaaatgacttggtggctttgaacaaccctcacctct

SEQ ID NO: 111469 - DNA, 352 bp, Zea mays
  Clone ID: MRT4577_33149C.1
gtccaaggccgacataagctgtcgagaaacgatcgttgaacagttcataggttcttctttgccgcgggggacactaggcaggcacgcttccccgagggctgcgcgccaccccgcagggatgtccaatacccatagtagcatggacgtggcattatagaccagctcagtaatgataacagaagtgccagcaccttaacaggagcatactgcagccgggagccacgtggctaaacagcataacataaatgtatcgccagcaacaaactcggcagtaactaggagcaacgataactgctgaaccattcagagctcgctaaataaagaaaaagggaaatggtagggagccataagc

SEQ ID NO: 111470 - DNA, 553 bp, Zea mays
  Clone ID: MRT4577_3314C.1
acaagctttttttttttttttttttttttttttttatttttttttttttttttttttttttttttttttttttttttttttttttttaaaatttggaaatataactttttatttttagggggccacatacatcaacaaaaaaacttcatttttgaatgacaactaataagcaatctaaaaggagggcccccccaatgatgtgttgttggtaaaaggctgctgggtttgtcaaaacaaggtggacaaagggcaacaactggtgcagttgaaaaaagggtggggggttagccacaaactggtggtaaaacggaagcaattgttgttgtgtcaaaaaagaaacggggtttgttgtaactagctggccaaatgggagtagtatttgctggtggaaataaacaaaggggttcagggcggccaattggttaaatggaaaaaattgttgctgctgaaagtaggcaataactacctggctgaatgggaataattgttgttgctgcaaataaacagcagggtttaatgtaaacagttggttgaatggaaaaaatgttgttgc

SEQ ID NO: 111471 - DNA, 842 bp, Zea mays
  Clone ID: MRT4577_33150C.1
gccggccggtactggcttcgaggttgtcgaggagggcgtctactccccgctgtcgtcgctccccgccttgctctatcgcggccgtgcctcgccgccacacgtccaccgcccgagatcccggtcgacgctccggcctgatctccatttttggccttcggttggagatcggcacttttcggtgacgtccctttggctgcacggccacccgatcgggtgtttgggtctttgatttgggtctgtagcgttggagataccccccttcaaactgctgtcggtccggaagtcgtgcctcctagccgcccacgctcgccgtccgtgatccgttctcgactgttggtgctccggactcacagttctcccatattgatggctacattatcatggtggatggaatggtcggtggagaatgttcgtgaggcatttttctcctatttcggggaaaatcagcacgtgaggttgccatctaccccagtgatccccgttgatgatccgagcgtgccccttcttcatacatgtttgcaccggttcaaggggacccttggtggcagagagaggcatcgcacctgcttttcgctgaggtgcattattgcaagtggtgacgaagatttgattgaccgcttcagaattgacgctactttccatcgattcacggagatccttgggaattggcctcatgggtactatttcaaggaggaagctatcggcttgttattcagtcttctcaccgagaaatacaagttacctcagtctagaatatatgcctcatactttagtggtgatatgtcctcttgtttgagttcggtcgacgagtcaagaaataccttgcagaaatatataggagc

SEQ ID NO: 111472 - DNA, 426 bp, Zea mays
  Clone ID: MRT4577_33151C.1
ctgggtgggggtattctatctactatctttactactataacacactacttttaatagttccagtcgtggtttttgtgcgtcgcgcccccacccgctcgctcgttttccacgctgtgctatccaggagcgtccgtccgctctctgacatccacaaacactatcctttgagcattacatatctttttgaactgatttagttgtgcattaccattttattcaaaattttgtatgccgtcgcaacgcacgggcacttacctagtaccttgataagaccaggaagaggttcctttgggcaagaggagaaaatccaacgagagggaaatgcaaagtcgtccaataaacctcgtgcggcttaggaatgcttgattcagaaagatttgctagagcgttgtgattacgttggatgtggctgcaatgggctaaacc

SEQ ID NO: 111473 - DNA, 230 bp, Zea mays
  Clone ID: MRT4577_33152C.1
gcgggtaacaacgcaagtacttgtttttattttacataggatctgtaaaaaaattcggtggaaaaaacaaacggccataatcaaacggaaaaaatggcgacatgaaaaacagcagccctaatattggggggtcatcgtctattgtatttccaggcatgccatctccctgatggtgaccactgtggatactcgctaccctaaaggtagctggctgtaccctggtaagggga

SEQ ID NO: 111474 - DNA, 293 bp, Zea mays
  Clone ID: MRT4577_33153C.1
gtgttttatactttgcaaagcactttattagctcacacctgtccactcacatgaaactcgtgttaggccctgggaggccgacggtaactctcaccgtgccctcagatgaagcacagagaggttgttacttgcccgggccatccagtgggctggctgggtcttgtgtccccatctgtggacccctctagggtctgagatgagatgagaagtgtctcctgtatccacctcttcctggcctcccttcccccacttcctggtccctgtccactcctcaggttggtgctctcacttct

SEQ ID NO: 111475 - DNA, 1887 bp, Zea mays
  Clone ID: MRT4577_33154C.1
tttgggtacccccgggtccggccgggattgagctcgatccaaacagccggttgtggccaaatgggtatcgaaatattgtgcctaatcttcatcttcctcctcatccgcgtgctcaccaggagctacgccgcctccccatcgccgcccgccatgtccgcggaggcgccactctggctgccaccggggccatggcagctgccgctgatcggcagcctgcaccacctcctgctgtcacggttcagcgacctgccccaccgggcgctgcgcgagatgtccggaacatacggtccgctcatgctgctccgcctcggctccgtgcccacgctggtggcctcctccgccgaggccgcgagggaggtgatgcggagccacgacgtggccttctgcagccgctacctgagcgccagcctggacatcatcagctgtggcgggaggggcgtgctcttctccccctacaacgaccgctggcgcgagctccgcaaggtgtgcatgctggagctcttcaacccgcggcgcgtgctctcgttccggagcgtccgggaggaggaggtggcgcgcctcctgcgctccatctcggaccagtgtggcggtggcggcaggcacgccgccgccgtcgtcaacctcagcgaggccatctgccgcatggtgaacgacgtcgtcgtgcggaccgccatcggcgacaggtgcaagcaccgcgacgagttcctgcgcgagctcgacgaggcggtgcggctcaccggcgggttcagcctcgctgacctgtacccgtcgtcgcgcctcgtgcgctggttcagcgcttccgccagagacatgggaaggtgccagaagaacgtgtacggcatcatcgggagcatcatccgtgagcgagacggcgcgcgcgtgcctgggcggcgggaggacgacctcctcggcgtcctgctgaggctgcagagggaaggtggcctgcagttcgcgctcaccgacgagatagtcatcgccgtcatcttcgatattttcgctgccgggagtgagacttcatcgacggtgctagcgtgggccatgtcagagctcgtcaggaacccacgggtgctgcacaaggcgcagtcagaggtgagggagacgttcaagggccaggaaaggctaaccgaagacgacatgcccaggctgagctacctgcacctggtgatcaaggaggcgctacggctgcacgcgccggtgccactgctgctgccccgggagtgccgggagccgtgccgggtcatgggctacgacgtgccggagggcaccagggtgttcgtgaacgtctgggcgatcgggagggacgacgggttctggggcgacggcgaggtgttcaggccagagaggttcgacggcggcggcggcggcgtcgacttcaggggcaacgacttcgagttcaccccgttcggggccggcaggaggatctgccctggcatcgcgctcgggctggccaacatggagctcgcgctcgctagccttctctaccatttcgactgggagcagcccgcggacggccctggaactggaagcagcggcagcctcgacatggcagaggccttcggtataacgctgaggaggaagtccaagctcttgctcaaggccacacctcgtgtcgaaaccaagtagttgttctatgctagtactatgatgcatcggcagggcagtccgatccgtttgccgcttctacttgtagtagagccaatggatcaaagacactgcttggttgggaccaccacgtgtgtatcgtttgatatttaagtctcgcgatcgagtacttattagagcaaggataataagctagccggctgccggtttgtatagtcttgacacgttgcttaaaacaaatgcttatataagagcatctctaagagactcttcatttttttcccc

SEQ ID NO: 111476 - DNA, 826 bp, Zea mays
  Clone ID: MRT4577_33155C.1
cttcgatattttcgctgccgggagtgagacttcatcgacggtgctagcgtgggccatgtcagagctcgtcaggaacccacgggtgctgcacaaggcgcagtcagaggtgagggagacgttcaagggccaggaaaggctaaccgaagacgacatgcccaggctgagctacctgcacctggtgatcaaggaggcgctacggctgcacgcgccggtgccactgctgctgccccgggagtgccgggagccgtgccgggtcatgggctacgacgtgccggagggcaccagggtgttcgtgaacgtctgggcgatcgggagggacgacgggttctggggcgacggcgaggtgttcaggccagagaggttcgacggcggcggcggcggcgtcgacttcaggggcaacgacttcgagttcaccccgttcggggccggcaggaggatctgccctggcatcgcgctcgggctggccaacatggagctcgcgctcgctagccttctctaccatttcgactgggagcagcccgcggacggccctggaactggaagcagcggcagcctcgacatggcagaggccttcggtataacgctgaggaggaagtccaagctcttgctcaaggccacacctcgtgtcgaaaccaagtagttgttctatgctagtactatgatgcatcggcagggcagtcatccgatccgtttgccgcttctacttgtagagccaatggatcaaaggcactgcctggttgagtgcaatgcaactgtagtttccaccagtttgggaccacctcgtgtgtatcgtttgatatttaagtctcgcgatcgagtacttatt

SEQ ID NO: 111477 - DNA, 223 bp, Zea mays
  unsure (1)..(223): unsure at all n locations
  Clone ID: MRT4577_33156C.1
aaagataaaaatgtaattttttttaaattttttaaattaatttttagggaacactttttttttnaaacaaaaataattgaagggggggggggggggggaaaaacactactcgactgatgtctagggggttttacacagggaacgaacagtcactcccaaaaagcatctgaaagttcaacacttgcaaagcataattattttaaaaccccgaaatggcaacaca

SEQ ID NO: 111478 - DNA, 216 bp, Zea mays
  Clone ID: MRT4577_33157C.1
ccaatccattttggcgttatgggctgagcgggaactacacgtgatctaccattatcacaaaactgtaaccactttgcaggatatgtgctacagtgaccgtacaaaattcaaatggtgaatcggtcgcagatggcccatttgaactgcttctcggagtgttaaatcttcgttgccatgaccaaacagtcaatcaagactgagaaagcgttgagacca

SEQ ID NO: 111479 - DNA, 336 bp, Zea mays
  unsure (1)..(336): unsure at all n locations
  Clone ID: MRT4577_33158C.1
gtacaattactccccactcgaggctcagattcaaactgccttagccgaccaccgccatggaagctacggtgccttctgcggcgaagtctggatgtccttggcaaccttccagaaagagcgaggcggcagatctgaagcagcaatagcagaaggtggcagcgaacgcccctcccgatgcctacaaccagcgccgctatggcttcaacaggacgatctcctgcatgacgagcaccatcaacttgtcgcccgcgttgaggcagacacgtctcttctacagcaccctcgacatgctaaccgagaatattagctangnacaggcacgttcccactcttgga

SEQ ID NO: 111480 - DNA, 245 bp, Zea mays
  unsure (1)..(245): unsure at all n locations
  Clone ID: MRT4577_33159C.1
aaaatantagagcccatgccttgccctagaaataaaataatgtccaaccataccattctggaccaatgtcgtgtctgaagggtgctgcntttacccgatgntcttgagtgtttcatcttgnccctctctgattgttggctcagggtggcnntncgctcttgcttgggtgccnccctcgtttccttccccgctntccattcttcgnctgcccttgcgggggctacctngtccgctcccccccctgc

SEQ ID NO: 111481 - DNA, 667 bp, Zea mays
  Clone ID: MRT4577_3315C.1
ctcgaggccggccgggccgggcttcagagctgttcagggaacacacacactggggaacggagagggacaccggcgccatcgcaagtacgcactcggattggggagcgacagaggaggcgcatccctgttgcctcgccagctccgtgactctctctctctctctctctctcctctcccggtgcaagcaagcaagcaagctaggcttggacaacgacgacgacgatggcgtgcgggtctcgaagccggaccaacgagatggttgacgagtacgagaagctggttctcagaatgaaccctccaagggtcaccgtggacaacgactccgacatgactgccaccttgctcaaggtgtattgtgccaacaagtacgggaccttgctggaggtggttcaggtgctgaccgatctgaagcttaccatcaagcgggcctacatttcctccgacggcgagtggttcatggacgtgttccatgtcgtggatcaggatgggaataaactttatgattgccaagtcatcgacagaattgaacagtctctgggagcgggatcgctcagcttccgcgggccgccggagcgggcggtggccgtggaggcggaggcggaagaggcgcacaccaccatcgagctggtggggcgggaccggccgagcctgctgtcggaggtgttcg

SEQ ID NO: 111482 - DNA, 363 bp, Zea mays
  Clone ID: MRT4577_33160C.1
aatggcaatcagggctttactgcgactaacattcaccttaaaactctggggaaaaaaatgttagcatcgatgacgcggctctataaaggatgtgttccaggcttacatcttccagacactaagttagaacaattcctcctatacaggaggagttgacaacacgaataacaactcagcgaggaaaataccatacgggacaacacacgctgaggtgtgagaacgacgtatgactagtaccctgaacatgtctctaaagaagctttgttgtgctcctcgggtgcagcctcgattgccttgtcaacatcagaagccttcttggccgctctactctcactatttcgagaccatgcgtatggcccttaa

SEQ ID NO: 111483 - DNA, 180 bp, Zea mays
  Clone ID: MRT4577_33161C.1
tagcaaagtaaagaccgaagtacaagcttttattattaaaggcttttctttgtctcgttacctcttatgggcgtcttctgggcatttccttgccactggcggtcgcttccgcttgctttccgtgggccctcttccccttttgggggggcgttttgcctttctctggccgccgtttttccc

SEQ ID NO: 111484 - DNA, 281 bp, Zea mays
  Clone ID: MRT4577_33162C.1
gggcacaaatcccaaccagaacacaaggcaaattgagcagcgcaaacagacccgggaaaggatacaatattcacaacctgggcaatggtttgtcctggggaactgagccctcaaaaaacattggaaacggggcatcccaaaatccccagggggtccggcctatacaagcattgggggcgcttcctggacaaaaaaacaagagggcgccccacaagggtagaaacaggctcgggttcactcccacaatgggccgataagaagccgggcctactctttaccct

SEQ ID NO: 111485 - DNA, 344 bp, Zea mays
  Clone ID: MRT4577_33163C.1
gaccagcaggcaccttagaaggtggattccattaccaccattggagcaccattggcaaccaagattttttccttcctaaggctcctggttcttcttccaggggtggttacgccaccatttttccttaatggttacaaggttctatatggttccttttttccccatatactttcattaattatatggttagagtgtgagaaccccgatctttaaacctatatgcgttaacacgcgctctcagcgagcgacatacccttatagcccctgtggttgtaacaatcaccagacctatatttggtgcagacattggtgcaacaccatcatggcggcacaactgctgcaac

SEQ ID NO: 111486 - DNA, 683 bp, Zea mays
  Clone ID: MRT4577_33164C.1
gccggccgggtcgcgaaagaaacaccatgcttagcccaatagaaacacatcttgccgtcccggttcatcgtcatctcgtcctcttcctcttgttaggcctcgcaattgcgtctttggccaccggagacgaccagtttgtcgtcaccggcttcacccaatccagcttcaacctcgagggcgccgtcacggtcacaaatggtggcctccttgatctgtctactggcacaagctacctcaaaggccacgccctgtacccgacccctcttcattttcgcaagacgcccaacggcaaagtgcagtccttctcagcctgcttcgttttcagcatcgtcaacacgtaccctctgctcagcgacgacgggatggccttcttcatcgcgaccgccaacactagtttcgctggcgctacgccgaggatgtacttcggcctcgtgaacagcaaggacgacggcaagccgagcatcaggatcttggcggtggagctggacacctacaagaacagttagctgcgcgacatgtgggccacccatgtgggaatcgacagtaagggtgccccctccctgtcctcagcggccgccgactagtaagtccacgagagcggcggcgctttcaggaacctgacactgaacgaccacagcgagatgcagctgtgggtggactacgacgagaggagcacgcggatc

SEQ ID NO: 111487 - DNA, 509 bp, Zea mays
  unsure (1)..(509): unsure at all n locations
  Clone ID: MRT4577_33165C.1
ccaggccctacgtcaccctgggagcctaccccagaatagtgtcgccaggaacgctggaacatgaacatgaacaaaaacaagacccgcccgcgtctccccgagcttactctccgttaggactactaccctcgccacactgaagtccacaaccgaaggaggcctattcatttcgagaacaagataatgatgaccgagaagtagtacttgaaggttttgaaggtaatgatcattgtacaaatcatagtcatacttgcaatcttcgagaaggtcattgtaattaaccggaaggttaacgttcaagtgtaagacgttgaagttatcgagatcgtcatgatcatcttagtcgtggtaatagtgtaggtcgtggaggtcaaggaggtattcaaagagagttagaaggtctataaggtcgtcatctataatattattcttttcatcattctcaaggttaagtaattggagttcattntctaggtcattgtcatattcttaaaggaactgaagttaat

SEQ ID NO: 111488 - DNA, 303 bp, Zea mays
  unsure (1)..(303): unsure at all n locations
  Clone ID: MRT4577_33166C.1
agaacacgtatgcggacaaccagaaaactttagtattgaattacaactactaagtaatgggtcatagggcgtagcacaacagtctccaagggcccacgttgcaatcttagtggtccttgccctgactctgagaagaaagcctgatgtactgattaatgttactacctagatactgangtcacagtgattatctgagacaacacaatcttgccatcatcgtctgcgatactgctcaatcctctgacagtgacctaccgtctggcatgctatgatgatctcattctctatttcccacattatgtt

SEQ ID NO: 111489 - DNA, 212 bp, Zea mays
  Clone ID: MRT4577_33167C.1
acgaaaactagctcatagaaaatgtttttaaatacaatcaataaactaaacgctgcgggtttttaatttattataccgcgcaagaccaaaaataaattataaatcaaatgaacaaaacacttttataaaatcaccaactaactattcaagaaaatcactcagacacacactccatatgtgacacactatattcaattacataaatcaatata

SEQ ID NO: 111490 - DNA, 361 bp, Zea mays
  Clone ID: MRT4577_33168C.1
cggcgcaaatggtttggttgtgtttttagcatcagaggggagtaaaaatttcagtattatctgttacgctgtaaagcaacatgtatccctttttgagagaatccgaaaaatggagagagagagagagagagatttcaagaagaaacaagtttgtctaccatcacaaacttgtccacaaaattcccagccggctcgatctcttcaccgtctatatgatggatggtccactctatattcgtttgagattggccttccagattgactcatcaccacacgttcacacccttcttttatatgcctggcactacttgaattgattcttgtcaatctttgcaaggttgaaaattcttagacgaggcaa

SEQ ID NO: 111491 - DNA, 1626 bp, Zea mays
  Clone ID: MRT4577_33169C.1
gcgcagattgacatggcattggggaggtttgatgctgctgttgctgcagctcagaaggctagagatcttgatcccgggaatgcagaaatcgggatggttttgaataacgtgagactagttgcaaaagccagagagcaaggaaatgatctcttcaaagctgccaagttttcagatgcatccatggcctatggtgaagggctcaagtatgatccctcaaattcagtgctccactgcaatcgagctgcttgttggtcaaagctagaaaagtgggaaaaagctgttgatgactgcaacgaggcactaagaatacaaccaaactatacaaaggctctcttacggcgagctgcatcatatgctaagcttgagcgttgggtggactgtgtgcgggactatgaggtgcttcggaaggagtttcccagtgacaaggaggttgctgaggcattgttccatgcccaaattgccttgaaggcgactcgtggtgaggatgtatcaaatatgaagtttggaggagaggtggagatggtttccaatgtagagcaactccatgctgccataagttcgcctggggtaactgttgtctacttcatgtcgacaatgaatcagcaatgcacacaaattacaccatcgatcaacactctatgcactgaatgcccctcggtgaattttctcaaggttaacatcgacagcagcccaacggtggcaaaggcagagaacgcgcggatagtcccgacgttcaagatatacaaaggaggggtgaaggttaaggagatgatctgcccgagcttgcatgttctgcgctactccgtgcggcactattctgtatccagttcttgagaagctttaggtacccgtaccccaatttcccatttttcgctaatgcatagagctctccgtcaaacttgcaaacaccactagcagcctccagaacattttcaccaccagcataactactcccctcccccattgagcatgagcataataacgggctaaaactgtctggtggaagagcccccccaattccccacctctcctgtcaatttcgccttttcaccgttcatataccaacccattcaattcaatatctttgttcatgttccgggctctctccacctcaatttgtactttgaatactccatttggattcacctcatcgtagtccatatgccagtaccctgcttctcaaggaaaagggaaatgtttgtaatgtcgtgtagggtttagcggtagcgtttatacattagggagaggggggacggcgggagccctgggggttgcagttttcgttacatgtacatagcttataggaaaaacatgagaggaatccattggaagattggttccctggcgaaaagagagatggtggcatcagattgagctgagatttcggcggttggggtcaggtacagggctagtagttgttctgagtttccactggagtctttatctataactatctatctttagaggggagagagacagcgagaggtgttatagttaactgatgatgcagagatggttggtgtccattgaagacgatgacatgtcgttttgctgcttctgttgggttttatggcgctgataccatatatgctaccgtttcaaaaaaaaaaaaaaaaaaaaaaaact

SEQ ID NO: 111492 - DNA, 791 bp, Zea mays
  unsure (1)..(791): unsure at all n locations
  Clone ID: MRT4577_3316C.1
gcttcttcagagctcaggagaacccacggggccgcggggacggagagagacactagcgcctgtgcaagcaagcaagcaagcaaagcgagcgaggtttgcacagcgatggcgtgtgggtcgcgaagtcgtcgaaccagcgagacggtcgacgagtacgagaagctggttctcagaatgaaccctccaagggtcaccgtggacaacgactccgacatgactgccaccttggtgaaggcaagcgccgccgcagctctgcagagctcttcttattgtttcttctcctctctcttagcgggtgttcgttcgatctctgcctgctgcaggtggacagcgccaacaagtacgggaccttgctggaggtggtgcaggtgctgaccgacctcaagctgaccatcaaccgggcctacatttcctccgacggcgagtggttcatggacgtgttccatgtcgtggatcaggatgggaataaactttacgacggccaagtcatcgacagaattgagcagtctctggggagcggggtcgctcagcttccggggcccgccggagcggctggtggccgtggaggcggaggcggaggaggcgcagaccaccatcgagctggtgggcagggaccggccgggcctgctggtcggagggtgttcgcggtgctggccgacctcaggtgcaacgtggtgngcggtcggaggtgtggacgcacgacggccgcntgggcggcgctggtgcacgtgacggacgccgacaccctcggcgccatcgacgacccggcgcgcctggacacggtcaagcgc

SEQ ID NO: 111493 - DNA, 256 bp, Zea mays
  unsure (1)..(256): unsure at all n locations
  Clone ID: MRT4577_33170C.1
ggaacataaggagcacaggctttaatttcaaacatcaaacttattcatgatttgtcatagttctgggtagtacgcacacacaacacaaccggtccattattaaaccaacaggggcacgactcatgacacgaacagcagatactttgacaaccttcatatggagagggggcaccagacgactcaggctcatttgcagtttaaacgacccatgacttactgaccaccacngataccgtacacaagggggggggggccc

SEQ ID NO: 111494 - DNA, 474 bp, Zea mays
  unsure (1)..(474): unsure at all n locations
  Clone ID: MRT4577_33171C.1
gggggtcgggcgtttcacttttccaattggggtcccgcatgcggtttctaagggggggagtagtccttcctccgggggcattgggctttttttttccttttaaaaaaaaaaaaaaagttttagcgcagttataaatgtcctgatacaaattcgggacctgagcaaagttaggtgtcctgtccgggcccccgttttttggctttgaacaaacagttcccggatgccctggaccggatggggggcctaccaattttggggatcggatttttttcaaaaaaattggatggccggagctcaaaccccccgttgagcgttggcatcaccgggaagtccccctgggagggtttggggggcaggcccagcgtgtaccaaaacacgatttcctggtccctgatcccccggttcctcctgttccaccccctaaggttgtnggccccggtgttttggtcggaaaacacccccgccccccacttt

SEQ ID NO: 111495 - DNA, 206 bp, Zea mays
  unsure (1)..(206): unsure at all n locations
  Clone ID: MRT4577_33172C.1
cccactcattcgcggacgcgtgggcggactcgtgggctttccacctgctggccgacccggggtctccggcggctaagccggcgcagcggatctcacaattcnctctgccttcgtcgtcctcccgcggtccggccccgctcctcgcgttcacctaggaggcggtttatgctctcaatgtgttcgtggccccgcatcttgaccccatc

SEQ ID NO: 111496 - DNA, 261 bp, Zea mays
  Clone ID: MRT4577_33173C.1
atccgctccaacccggtcgcgctccgcccacctccgtcttcattcttgtgggtaggtcgtggctcgccacggccagcttcgcatcggaggcgctctcgtgctgatatgctagggtctggttacgcgcggacgcacacgcagctactgcgggagaggtcgtaggctggtgtgttccccttatcgaattcgatgccgcacgaatccacggcgtctgcaaccctctgcgctgtcgcggcatgggcgccgagcctccgaggctcc

SEQ ID NO: 111497 - DNA, 622 bp, Zea mays
  Clone ID: MRT4577_33174C.1
atccaaactgtaatctgttgtaaaagtttctaaaattatttatatttgttgaacggtacactaccatcacagccacaacactgttccatgcattacaccttccaagaacgcaggtacaacaggcctaactgtcacgacgccgatgcacggatgggatggctagctcctgattgtttatccaggagcgtgttgcacactctttagaagggcttggagggcaggttcgtgttggccaggaagtgcttgaacagctcgagcgcttgctgcggctgcgtggacgggaccatgtgcccggcacctctcacggtgacgaatgtcaggccgtcgtacaccacagtccagccgccaacctacaagcaggggcgggcctggctcaattcaatggtattcaattgaatacccattattttgacaaaaacaacatatacatatatatatatatatatatagtatgtatacataggaaataagaaatgaatcaaataagtggaggaatttctgttaacttagaccaaaatatttctaatctccttgctacttcccatacccacctagcccaataaattgttgtatgattgtgtccaatgagatccaatggagtgatataacccatcttagtatc

SEQ ID NO: 111498 - DNA, 135 bp, Zea mays
  Clone ID: MRT4577_33175C.1
attttaataaagaaaacacggataaaaagaacaagcatgggtagggtacattagtgtgattcatgatattacttattcgaggaagtctaacataagttgccaacaatcaatacacgcgtgtaaagggcaagacag

SEQ ID NO: 111499 - DNA, 999 bp, Zea mays
  Clone ID: MRT4577_33176C.1
ctcgagccgattcggctcgagggcatcggtcattgcctctcgcctgtagtttctatgccgctatgaggggtggtggcatttcctcaaatacgttgcatgtatcactgtaactgttcttccccttccgttaccattaacccatgcatctaattacttgtatattttacgttaccgttttcctgttctcaacatttcagattctagatgatggtacgacaaattattttaggagtgctttgccataatttaaagcttggaagggagctttctatgatttatttttctgactgtttcgtcacatgttctttccctagatgaaagtcttgatttatttttggttctgcaggatcattgcgtctctgcgagctaatcagctctgtgagcgtctcccttgccccaatggcgagtcaactattgattgccatcagatctcaaagatgccaaatcttgcattcgccatagcaaataagagtgaccttgtcaaaatgacgtgctaaattcaggccaatgctatgccagtgagatccaacagcagtgatactgataaccatgtctctaaacatcttcttttttgaacgaaaataaacatctttttttccctcttccttctcagcgaaaaagcagaggacgatacaagtgatggatatccacgacataccgaagccgaagaacaggaacaccttcgtgcgcaagagcggcagcagcgccggattcccggcaaagcaccggtgatctctgcctgaccaccatcggatctgtagcggactcagcgtatttatttctgtactagcaaaaagaaaaaaaagaaagaaattttaagaagcaaactcttgttttcccagtttgatttgtagccccccagcccagctcactgatattatagggatatatatactgcctagtccatgaggctacgcttttgtacctctctttaagattggagaacagaaggaaagcaaattgtgttattattcaatgacattcacattcctgcctgat

SEQ ID NO: 111500 - DNA, 469 bp, Zea mays
  Clone ID: MRT4577_33177C.1
ccctccaggcctgccggactctatgggaacgcttactggcccaacgctactcacatttgctactgttgctggctagtgcactagcgcagcccgtgtgccactcctagcaggcatgctcggactctaagatggcggatcctgctcctgaacatagaccgccgggagagtttgtccgagagaacccactccctaccctaatccctgaagacaccactctataaacctactgccatgaaacaggtacacggctggagattatcgccccgaactttcgcgttggccctgatgaacacgaagtgcatgcctccatgaggccaccctcgctcctgcagccaatgaaacctgtgaacacagagaccgatgaacgcccttgcagcagctattactagtacatgcctgctgtcacatgactgacgattcgtcatctactaaccctatagctcgcggggggagacacacatatcctgtg

SEQ ID NO: 111501 - DNA, 328 bp, Zea mays
  Clone ID: MRT4577_33178C.1
gcgattataagagatcgatgtgtgcgtctaaacaagtagccgctcttctagtccttgtaacggattcttctaccaatcccagcctcctgaggggtggtaagccatcattgagcgaagaacagaaggacaagattctagaggaatgcgaccggatcatacgtgtcggctaccccatctatgttgtggcccacgcatagttcctgttgcgatgctgtacgagcgggtgagaacacaaacatggactatgtggttctcctgctgacaaacgacgaggaggacatgtgcggcatcactaaaatcctggcgctccatgggctctgcgaacttt

SEQ ID NO: 111502 - DNA, 708 bp, Zea mays
  Clone ID: MRT4577_33179C.1
aaccacaacgccccgccgttctccgcccgcttcgctgaggcgctcggctactacgcagcgctcttcgacagcctcgacgccgtggcggctgccactgccactgccagtgccgccggcgaccgggcgcaggtggagaggatggtcctgggggaggagatcaagaacgtgctgctctgcgaaggagccggccggctcgagcggcacgagaggctcagccagtgggcgatgtacatggacgcgtcagggttccgccgcgtcccgctcagcttccgcgccattagggagagtgagctcaagctcgcgagcttcgggatgagtgggtgccgctaccaggtggaaagcgacggccttctgctggggtggggctccacgcgtctctactctgtatcggcgtggaggccaaacaagtctgggaccagagagtgtacgtttaggagttgatatgtctgaatgtctgatgctgtatctgagttacttaattcataacaagcatcagttttagattgttatctggaaagaaaggaataggagaatctttcaagggaaaatcagcttcttgttgcccttcctatctgagaggtttctctagtttttcttaaggttgctgtgtgttttcttctgtttcttcttttcagttttgttgtggctgtgctcccattagcttcgtggtggtttgtaattgttgtatgtgatgtgatctctttcttt

SEQ ID NO: 111503 - DNA, 362 bp, Zea mays
  Clone ID: MRT4577_3317C.1
gatcgctcagcttccgcgggccgccggagcgggcggtggccgtggaggcggaggcggaggaggcgcagaccaccatcgagctggtggggcgggaccggccgggcctgctgtcggaggtgttcgcggtgctggcggaccttaagtgcaacgtcgtggcgtcggaagtgtggacgcacgaacgccgcgtggcagcgctggtgcacgtgacggacgccgacaccctgggcgccatcgaggacccggcgcgcctggacacggggaggcgcctgctccgccacgtgcttggccgggagcagccgcgacaagaaggccgcccgccccgccgtcttggcgcgcgtgggggagcacgcgccgcgccggct

SEQ ID NO: 111504 - DNA, 587 bp, Zea mays
  Clone ID: MRT4577_33180C.1
ccacgtttccgcatgactggtgtgaagggttctctacttatccaaggacatatgaccttatacattctaatggcatcttcagcttgtaccaaaacaaatgtcagtttgaagatatactcctggaaatggacagaatcttacgcccggagggtgcagtcataattcgtgacaaggttgatgttcttgtaaaagtggagaaaatagccaatgccatgaggtggaagacaagattggctgatcatgagggtggccctcttgtacctgagaagatactcttcgcggtcaagcaatactggaccgttgcaaaaacaagcagctaacattattcgtattttatttttttctccagtcacagagatgcagaagacatgccaaaaggatcaattgaccttgcactagtgactcatatctgatcggacagatgcagctgcttataattggaaccctgcagcagtccaggaagttatgaactagcagtggacttacagttttgtataggatactcatttacctctacacgcacctcttttttttgttgttgtatctcagaatctcatcaaatggattgcatgtggaccaaaaaaaaa

SEQ ID NO: 111505 - DNA, 1222 bp, Zea mays
  unsure (1)..(1222): unsure at all n locations
  Clone ID: MRT4577_33181C.1
gttgagtcatttgtataggacaataacctttggcggaaacatgttgaggcttacaagaaaatcaataacttgcttgatactggaagatatcgcaatataatggatatgaatgctggtctcggtagctttgctgctgcactagaatctccaaaagtatgggtcatgaatgtcattccaacaattgcaaatacttccactttaggtgtaatctacggacgcgtgggcgagcgtggattaataggaatgtatcatgactggtgtgaaggattttctacttatccatcgacacaaggacgaacacattctaatgatatcttcagcttgtaccaaaacaagtgccaatttgaagatatactcctggaaatggacagaatcttacgcccagagggtgcagtcataattcgtgacaaggttgatgttcttgtaaaagtggagaagatagccaatgccatgaggtggaagacaagattggctgatcatgagggtggccctcttgtacctgagaagatactcttcgcggtcaagcaatactggaccgttgcaaaaacaagcagctaacattattcgtattttatttttttctccagtcacaggtaacttggtccctggatgtgtttattggggggaaaatctgccggtttgaaaatcatcatcccatgtttgttactgaaaatagaaaacaagcttacaatcaccctggaggatggtaagttatgcgggacctagttgtgaacttgtgatttgcttattccactgttgcagagatgcagaagacatgccaaaaggatcaattgaccttgcactagtgactcatatctgatcggacagatgcagctgcttataattggaaccctgcagcagtccaggaagttatgaactagcagtggacttacagttttgtataggatactcatttacctctacacgcacctcttttttttgttgttgtatctcagaatctcatcaaatggattgcatgtggacctataaggtctttttcggtgttaaatattgcataattcaccatatgatgattcgtgtggtaggtttatttgtaataaactcgaaggaataattgtgatggtgtatagaacaaaggacacaagatttaaatatatccatgcagccaaatcgttgtactcaaaaaaannnnnnnnnnnnnnnnnnnnnnnnnnnnnnnnnnnnnnnnnnnnnnnngaaaaaaaaaaaaaaaaaagcggcc

SEQ ID NO: 111506 - DNA, 248 bp, Zea mays
  Clone ID: MRT4577_33182C.1
gtcaggttgtccccgtctaataaagccgtatttacctacgaggtagtcaaggaggtgcctgatgaatttgccagtggtgaggagctccccccctcgcgcataatctagccactccgcccgtccatggatcgcgccagggaaattcatgagattaaaacaggaggctcactcgattcgacaaatagagacatgcatcttatcaacagaggatgcaaacattacctaaactcatatcatattcccacttt

SEQ ID NO: 111507 - DNA, 1462 bp, Zea mays
  Clone ID: MRT4577_33183C.1
cccacgcgtccgcccacgcgtccgcccacgcgtccgcccacgcgtcctgtcgtgcgctccccgcgtcccgcccaagcaaaaaagcaaagcctgcaatggcatctgcagccaccgccgtggcgctcgtggttgttgccgccctggcctcgctgacgcagctggccgcgtcggagtgctcggcggcggaccgcgacgcgctgctttcgatccgcgcggcgctgtcggaggaggagcggcagctgggcgtgttctcgacgtgggcggcgggcacggactgctgcgccgggtggtacggcgtggcctgcgacccgaccacggggcgcgtcgcggacctgtccctccgcggggaggccgacgacgcggtgatggcgcccgcggggcggcccgcgtcgggggtcatgtccgggtacgtctccgacgctgtgtgccgcctggaccgcctctcgacgctggtgctggcggactggaagcggatctcggggcccatcccggcctgcgtcgccacgtcgctcccgtacctccgcgtcctggagctcccggggaaccgcctcacgggcgccgtcccgccgctgggcggcgggcagtcgcgcctcgccgtgctcaacctcgccggcaaccagctgtccggcggcatcccggcgtcgctcacgtcgctcaccgagctcaagcacctcgacctcgccggcaaccggctcagcgggcgcgtgccgccggacctcggccggctccggatgctcagccgcgcgctgctggcgcgcaaccggctgtcgggccccatcccggcgtcggtggcgtcgctgccccggctcgccgacctcgacctctccgagaaccagctgacgggcgcgatccccgagggtctgggtgccggccccgggaatagcggcgtgctcacgacgctgtacctcggcgggaaccggctgtcgggcggcgtcccggcgagcctgcttcggagcggcgggctcgggatgctcaacctcagccggaacgcgctgggcggcggcgtccccgacgcgttcacgccgcgctcctacttcatgctgctggacctatcgcggaaccggctcacgggcggcgtgccgcggtcgctggcctcggcggcgtacgtgggccacctggacctcagccacaaccggctgtgcggcaccatccccgccggcccgccgttcgaccgcctcggcgccgagtcgttcgtcggcaacagctgcctctgcggtggcccgctcggcaagtgcacgtgacacccctagcccgcccatacgcgggaagcatgtagacatattcgtgcggcttggttaacatgacatgcatcatgatgatttcgcggtgctgcatgtgcctgtctttttctttctttctttttatttatcttcttttatttacttttttaaaaatgcttgtggtttgtccatgtgtctgaacgaatggaagcaaaaattaagctcgtgtgtggataatgccc

SEQ ID NO: 111508 - DNA, 330 bp, Zea mays
  Clone ID: MRT4577_33184C.1
attttcctgctttttttattttttgtttcttttctttacctttttgttttttgttttttcactttgaaacggcccactgtttctttgaatcggggaaccctcaatgcacggaaaaacagcgctgataagaaaaaaaacccctaccgggggaaaaagccccaaccccagggcaaaccgaggaaattgctacgggcgggccccacccggcagcccaaaggctcatgggggctctgccaaaccaaaactctcccccggctggttgggcagaaactagggggcactttcacataagcatctggacctctgatgggacgggggcccattccccag

SEQ ID NO: 111509 - DNA, 781 bp, Zea mays
  Clone ID: MRT4577_33185C.1
gacccacgcgtcccgcggcgtgctcacgacgctgtacctcggcgggaaccggctgtcgggcggcgtcccggcgagcctgcttcggagcggcgggctcgggatgctcaacctcagccggaacgcgctgggcggcggcgtccccgacgcgttcacgccgcgctcctacttcatgctgctggacctatcgcggaaccggctcacgggcggcgtgccgcggtcgctggcctcggcggcgtacgtgggccacctggacctcagccacaaccggctgtgcggcaccatccccgccggcccgccgttcgaccgcctcggcgccgagtcgttcgtcggcaacagctgcctctgcggtggcccgctcggcaagtgcacgtgacacccctagcccgcccatacgcgggcgggaagcatgtagacatattcgtgcggcttggttaacgaatactagtactataggtttggggccggtgggtatacatgacatgcatcatgatgatttcgcggtgctgcatgtgcctgtctttttctttctttctttttatttatcttcttttgtttactttttaaaaatgcttgtggtttgtccatgtgtctgaacgaatggaagcaaaaattaagctcgtgtgtggataatgctcaaaaaaaaaaaaaccgtgatgtgtcgttagagtcgccgtcacgttcacccatcccgagtctatcaggcccttcgaatacgggccacgcttggggtttgtccatgtgtctgaatgaatgaaagcaaaaaaaattaagatgtgtggtt

SEQ ID NO: 111510 - DNA, 502 bp, Zea mays
  Clone ID: MRT4577_33186C.1
ctggctcgcggggccgccgtctcccgcctacgacgccaagccccgctgcggtgatatggcccccaaacgcaggcggcaaggcgccgcctccggccaaaaggagactgatcaagcgaccaaccctgtatctagagaagagccgagaaaggctccgtttgggggagcatgtaccggatcaacatctcacctggcaccggcacagtcagcgtgaagcacgggataataacgtagcaagacgacagagcacaggtgctctagtacgcccctccggtggcaagaagaacatatccacctcggttcctctaaaggagtacacaaagcttcaagcttcatacacaacagtttttaaggcccatatgcatgctctgaagaaaagggagaggaaagacaagatgaagactgaagatgctgagaaggcaattgcagaccgctcccaagagacagaagagagcatcttcaaagaaatcttctgggcccaacttataaggcgctcacagaactc

SEQ ID NO: 111511 - DNA, 489 bp, Zea mays
  Clone ID: MRT4577_33187C.1
attctttttcttttttttaaaattttttttttttacatttcttttatttttttttttttccctcttcttctttttttttttttttttaaccaaaaaaacaccctttttttttaataaaaaaatggggtcaccatttttttttgcaacagaaccttgctttcctggggtacccacctacccacccgaatctcttgcctttttatactaaaagtcaccctggtggaccataccatgacgcatccatccttacaagcaaaatttttttaaaacattccaccggtctcataggtccaccgggtaatccccgaaaattccctccaggcccaccaggtttccctatattgccttttattagagctagtcaaaatcatggaaataactggctcctgtgtctactggggaaaaattctcaaccccacacaatctaccaccacttaccaccctgagtaaagactgggttgcctggggagtgctctaactcacattacc

SEQ ID NO: 111512 - DNA, 296 bp, Zea mays
  Clone ID: MRT4577_33188C.1
gaaatacaatcacccacagacacaacatacgtaggatggttaaaagggttttattgcagaagggatggattacaaagttattggagcaatattaccttagaaaggattacacagagacatgttccttaaacagtcccggattaagaagaggggcttaggctagccttcgaagccgtagagggtggggccttggcgtttgagcgcgtagacgaagttcatgggggtaacggttttgcggcgcgcgtgctcggtgtaggtgacggggttgcggatgacgtttttgagaaagattttga

SEQ ID NO: 111513 - DNA, 404 bp, Zea mays
  Clone ID: MRT4577_33189C.1
ctgagatcacgtgcgatccatgttctcatgtttatgttttacacgacaacagtcatcaatgttggggggattattttatgaaagacgggtgcgtctgcgatactagatgcatgatactaggaacaagtcacttggctgataatgatgaagagaaacgtatgaagcaccacgcattggcacatggcacataatgccttaagcactgcgacgacaatgctgactgggcgaatcctatactagtggtgctctctattcataacaactgcctacatgatcaactcatgccataacatatcgttacttctacaacaatcatgtctttagcgtgaataccaaagtgtcccatggtgagtcccacatcatcacattatcgcacaggcaactttgctacgtcattacctatc

SEQ ID NO: 111514 - DNA, 218 bp, Zea mays
  unsure (1)..(218): unsure at all n locations
  Clone ID: MRT4577_3318C.1
ggccgcttttttttttttttttttgcgatgcgatgcgttgccttgagcatttcgacnacaacagactagatgcaagactgctgcttgccattctttganctatatatatgattctgatgcaggaaaagataagatatacatacnngacgtgnatgaggataatgatgatagataagccatggncatgtgtattttaagcaannatgcatatgtatcta

SEQ ID NO: 111515 - DNA, 218 bp, Zea mays
  Clone ID: MRT4577_33190C.1
tcacttcaagcagctattgctatcataattaactcatggatgcatatacatatgccacctgcgacccatatttattggtccctccccttacactgaatcttctttatcctcctcctccaccaccttaaatatttcctagtgtttgcttctcccttccttgacctttgcttataaccattcataattacttatatttcatgtatctcatcatcttaata

SEQ ID NO: 111516 - DNA, 435 bp, Zea mays
  Clone ID: MRT4577_33191C.1
aaagaaccaaaaagcccggctttttaaaacccgcaaggtttccaggggtttaaaaccccccaagccactggggaaaggggcgggggggccccttaataaaaaggcccacaaaggcttttgggttttaaatttccacatcacgggggggggggttttagtccataggggggccgccaaccggggatgggggaaaaaaaatatcgcatccatatatgagggggggccggggaaaattaaaacactggggccgggggccttggggtaatgcaggggtgttttttgggaccgggcaaaaaaaatgacccagtttttttttaacaaggccggggaaaaaacgggtttttaaagcggggggccaactgggttttaggggggaaattaaaccaaaattccagaacactaacggggttttgacatgttctgcttgtttttcca

SEQ ID NO: 111517 - DNA, 339 bp, Zea mays
  Clone ID: MRT4577_33192C.1
tgccgcggcacccttggccttgggcatattgcaggccagccgtgcccgcttggtgggggcttgctgtgcgcggctaggccccaggtggaggcttcccggctcctggacgtgcccacgggtcgactcgacgatatgggcccggggctggacgcctgcggccgggggagcggcctggcagaggggctacagcgcagaggtgaagactgaggacgagctgcgggtgcggtacctggaggaggagaaccgaggaattgtggtgcttggaataaacagagcctatgccaaaaattcattaagtaaaaatcttataaaaatgctttcaaaagctgtggatgcttt

SEQ ID NO: 111518 - DNA, 1395 bp, Zea mays
  Clone ID: MRT4577_33193C.1
atggatcctaaggggaagggaatcgtgatcaatgataaggaggagtccttcgtcaacgagccgaaggatgacaagcctaccgactcgggctcgggtcacaaacgaaaggatgggaagaagaagaagacaaggcgcatcaaggagatcgtctactacgactacagcgacgagtccacttcttcccaaaaggacaacgacgacaacgactacaggaaaccgatctgggacaccctcaggatctcacatgaggggaacgacgtcaccttactcaccaaaatggagttggtggagggcgagcttggaagattcgcaatgatcaggggagaggagccaacccaaacatacaaccggctcaagaccctcatcaacaagataaggagctacggaagcacacgatggacgaaccacgacgtcgttcgtctaatgctaaggtcctttactgtacttgatccacatttggtgaacaatatccgtgaaaatcctaggtacaccaagatgtcgcccgaagaagttcttgggaaatttgtaagcgggcgaatgatgatcaaggaggcgagatatgtcgacgacgcgttgaacggtccaatccatgagcctcaacccattgctctcaaggcaacgaggagcaaggaggcgctacctagcaaggtggcgcaagttgaggcggccgggctcaatgatgaagagatgactctcatcatcaagcgcttcaagacggcgctaaagggtcgcaaggggcagccaagcaagaccaagacaaaggggaagcgctcatgcttcaaatgtggtaaggttggtcattttattgctaattgtcccgacaatgatagtgaccaggaacaagggaacaagagggagaagaagaactataagaaggcaaaaggcgaggcacatcttggcaaggagtgggactcggattgttcattgtctgactccgacaacgaaggactcgccgccactgccttcaacaagtcatccctcttccccaacgagcatcacacttgcctcatggcaagggaaaagaagggtctagatagaaccaaggtggataaaataaatgaattaattgatgctttgaatgataagaatagattgctagaaaagcaagaggatctcttatatgatgaacatgataagtttgtagaagctcaaaaatcccttgctttagaaataaagagaaatgaaatgctttcttgtgaattgtctacatgccatgactctatttctagtttaaaaagcataaacgatgacttgaatgctaagttagaaatagctaataaatcaacatcttgtgtagaacatgttgtggtttgcactaggtgtaaagattttaatgttgatgcttgtagtgaacacctagtttcaatttctaaattgaatgataaagtggtgtaa

SEQ ID NO: 111519 - DNA, 272 bp, Zea mays
  Clone ID: MRT4577_33194C.1
cagacggtgggtgagaaaactacggataaagggtttgtttggtttgaagaatgaggtgacccatcagcaatcacatgccctcacattcttgttcgttttgaggaatggaatgggatgaacatcatcagcctcattcctcatgtgcacatgattaatatagggacggaatagtcccgccaaaaaatggctttttaggctttcatccatccatccatcaaacaccctcaaagtattcgtttactcattttgcatgttatgtagtacagtgtcta

SEQ ID NO: 111520 - DNA, 198 bp, Zea mays
  Clone ID: MRT4577_33195C.1
tctgtcaccgtaaccctagcagcatatcggccagcggattttggcgacctgggtggggacaaccgtcacctccgccttcttcgcctccctcgagcgctgctcctgcatcaacctctccaccgacgacgacgactacgactaggaccacgacgaggccaaggaccggaccctcattctcttcgcggcctacgccacgac

SEQ ID NO: 111521 - DNA, 1567 bp, Zea mays
  Clone ID: MRT4577_33196C.1
ggggctcaggctatttcctgagtacctctccttcgcattcggtttgccttctaaaaccgggtgtgacacgggctcgggccacaaacgcaaagatgggaagaagaagaagaagacaagacgcatcaaggagatcgtctactacgacgacagcgatgagtccacttcttcccaaaaagacaacgacgacaacgactacgagagaaggaaaccggttaattcgaacttttcttttgactactctcgtattccgcaaagtacaaatgctcatttgctctccattccacttggcaaacctcctcactttgatggagaggactacagattttggagccacaaaatgcgtagtcacctgttctctctccatccgagcatatgggagattgtggaaagtggaatgaaatttgatagcttggatagtcctatgtttatcaatgaacagattcatagaaatgcacaagctactattgtgttgttagcctctttgtgtagggacgagtatcataaggtgagcggcttggacaatgccaagcagatctgggacaccctcaggatctcacatgagggaaacgacgtcaccttactcaccaaaatggagttggtggagggcgagcttggaagattcgcaatgatcaggggagacgagccaacccaaacatacaaccggctcaagaccctcatcaataagataaggagctacggaagcacacgatggacggaccacaacgtcgttcgtctaatgctaagatcctttactgtacttgatccacatttggtgaacaatatccgtgaaaatcctaggtacaccaagatgtcacccgaagaagttcttggaaaatttgtaagcgggcgaatgatgatcaaggaggcaagatatgtcaacgacgcgttgaacggtccaatccatgagcctcaacccattgctctcaaggcaacgaggagcaaggaggcgctacctagcaagcgcttcaagacggcgctaaagggtcgcaaggggcagccaagcaagaccaagacaaaggggaagcgctcatgcttcaaatgtggtaaggttggtcattttattgctaattgccccgacaatgatagtgaccaggaacaagggaacaagagggagaagaagaagaactataagaaggcaaaaggcgaggcacatcttggcaaggagtgggactcgaattgttcgtcgttcgactccgacaacgaaggactcgccgccactgccttcaacaagtcatccctcttcccaaacgagcatcacacttgcctcatggcaagggaaaagaagggtctagatagaaccaaggtggataaaataaatgaattgattgatgctttgaatgataagaatagattgctagaaaagcaagaggatctcttatatgatgaacatgataagtttgtagaagctcaaaaatcccttgctttagaaataaagaggaatgaaatgctttcttgtgaattgtccacatgccatgactctatttctagtttaaaaagcataaacgatgacttgaatgctaagttagaaatagctaataaatcaacatcttgtgtagaacatgttgtg

SEQ ID NO: 111522 - DNA, 330 bp, Zea mays
  Clone ID: MRT4577_33197C.1
atggccctcatcatcaagcgcttcaagacgacactaaagggttgcaaggggcagccaagcaagaccaagacaaaggggaagcgctcatgcttcaaatgtggtaaggaacaagggaacaagagggagaagaagaagaactataagaaggcaaaaggcgaggcacatcttggcaaggagtgggactcggattgtttgtcatccgactctgacaacgaaggactcgccgccactgcattcgacaactcatccctcttccccaacgagcatcacacttgcctcatggcaagggaaaagaagattgctagaaaagcaagaggatctcttatatga

SEQ ID NO: 111523 - DNA, 2555 bp, Zea mays
  Clone ID: MRT4577_33198C.1
cgcggcctctctccttctgccttcccacttcccacagtgagacgtcctcctcaccccattcgcagtcgcccactgactgtccgtgccggctaacaacatgaagtggaacctcgaattccgggccgccggcggatctcgccgtgctttgcgcgaccctcctcctgctggacggcgaagaatccccgagcctacacggctcgccacccacacttcgactgccatgcggcccagctcttccagctgcggtatacgtctttaccctctgatgtgcctagtggagaattcctagcgcagcgggatcggtttgaagcctggcaacctcgctcaccgtgctcttcgcttgctactcggctcgaagtcgacgtctgcgagttcgtcgtgtgcgccgaattgtacacgacgtctaacgcgatcgtggagcccaggaatgccgctgctggtcgtgctaagaagaagatgtgtaatgggggttgtatgaattccaacctcagcacgcgacctgtgtaagctgtagatggaaaccttcctgtgctgcaagaggacgatgcgatatactagggtgttagtgcccacttagatttggtttcctagcaatctcgccgttttatacgtttgatgtcagcgtttttttctcttattaatactattttgacgtattgtatgtatgattttcacgtattatgttaactgctgtgtacgtgaaatacctgatcttgtcacgtacatggttcgctttcggtttgccttctaaaaaccgggtgtgagaaagactctcacggctccctcccgctggccgcttctcccgccttctggttccgcctagcgccgacgcatttgggctggagtacgagacgacgattgactcgtcgatacaaggaccccccggttgtctaaataccgagacgatcctttctacaaattgcaaaggaagcattgccagtgtgataatttatagaaggttcattaatcttcctaggaacatgagtaacatttctcttaggcatatgatgaatgacatttttcctagtcaaatttctatcatgcataatagaagaactagaagcagtcatggcatgagaattaaaagcatcataacttctataattattcctagaatgtctcctatcatggtacatgaaagcatggttcttttgaacactactagacataggggccttccctttctccttggcggagatggaaaccttatggcttgttaagttcttgacttccctcttgaagccaagaccatccttaattgaggggtgtctaccaatcgtgtaggaatcccttgcaaattttattttatcaaattcactcttgctagtcttaagttgggcattaagactagccacttcatcattcaatttagaaattgaaactaggtgttcactacaagcatcaacattaaaatctttacacctattgcaaattgcaacatgttctacacaagatgttgatttatttgctatttctaacttagcattcaaatcatcatttatgctctttaagctagaaatagagtcatggcatgtagacaattcacaagaaagcatttcatttcttttaatttctaaagcaagggatttttgtgcctctacaaacttatcatgttcttcatacaaaagatcctcttgcttttctaataatctattcttatcattcaaggcatcaatcaactcattaatcttatcaaccttagttctatctaagcccttgaataaacatgaatagtctatttcatcatcgctagattcttcatcacttgaggaagcgtaagtactagtattacgagtgcttaccttcttttcccttgccacgaggcaagtgtgatgctcgttggggaagagggatgacttgttgaaggcggtggcggcgagtccttcattgtcggagtcgaacaacaaacaatccgagtcccactccttgccaaggtgtgcctcgcccttagccttcttgtacgcctttttcttttccctcttgttcccttgttcctggtcactatcattatcgggacaattagcgataaaatgaccaatcttaccacatttgaagcatgagtgcttccccttcgtcttgttcttgttaggctgccccttgcgaccctttagcgccgccttgaagcgcttgatgatgagggccatctcttcatcattaagcacggctgcctcaacttgcgccaccttgctaggtagcgtctccttgctcctcgttgccttgagagcaatagtttgaggctcttggattgggccatttaatgcatcgtcgacgtatcttgcctccttgatcatcatccgcccgcttacaaactttctaagtatctcctcaggcatcatcttggtgtacctaggattctcacgaatattgttcacaagatgtggatcaaggacggtaaaagaccttagcattaggcggacgacgtcgtggtccgtccatcgcgtgcttccatagctccttattttgttgatgagggtcttgagccggttgtacgtttgggttggctcctcgcccctgatcattgcgaatctcccaagttcgccctccaccaactccat

SEQ ID NO: 111524 - DNA, 590 bp, Zea mays
  Clone ID: MRT4577_33199C.1
gatcaccgacaaccggagcacaatcgcctcgccttcccttccccaccaccccccgtctctctctctctctctctgtgctctctctcgtagccgcggccatctcgcagcagcaagtagagcgcgaccacacagtggccgcctctaggagacggcggagctgctgccgcggtggcgtccaacaacctggtgatgtcgttcggcgagatgctgatcgactacgtccccgacgaggtcgtgatggcgctgaacgacaagcgcgctctcaacattgccaccagaaagcttgccactcacaacaggctgaacaataacagagatgagatgatgctccgcctccggaagatgagatcgggatgaacacacactgaccataataaagaacgtatttcaagataatgaatgggacacccagagattatcgactgtgtattttccctacctctagaatctacacatggaaaagcatttttgaccgaaacattgattgctagtaatgcattgaaccacctcgggacatgttgccccaacttgcaatgcatgaatcgggttgctaaaaaaaaaaaaaaaaaatggccctatacgcctccatc

SEQ ID NO: 111525 - DNA, 2200 bp, Zea mays
  Clone ID: MRT4577_3319C.1
aggccggcggggccgggcgggaatctgtctgacccattttccccaaaacaaaacgactcgttctttcccgggggaggggaggactggagaagcctggccagccatggacccgcccaaccctaaccccaacgatgccccgtcgctcccagccgaatccgcggccagactcgccgccctctccctttgtggcaccagggaccttcccccggacttccacaccgccgagatcctcgacgacgacgagggctacctcacctccgcgtccagaggcgggagcagcacctccgcgtggaaggaggcgcccgagggactccacgacgatgacaaggatggggacgatgtctcccagcccagccccagaagcagcggatacgctggcgagcgcggaagcagccttgatgacgacgccgaccccgaccccgaccccgaccaggattgggcgcgcggcaagaagcatccccacgaggacgatgcttcctcttcgtggaggaagaggaaaaaacatttcttcattctgagcaattctggcaagccaatatattccaggtatggggatgagcacaagctagccggattttctgctacgctgcaagcaatcatttcctttgtcgagaacagtggcgaccatatcaaatttgtgagagctggcaaacatcagatagttttccttgtgaaggggccaatatatttagtttgtataagctgcacagaagagtcatatgaaggactgagggggcaactagagctcatgtatggtcagttgttgcttattttgacaaagtcagtcaataagtgctttgagaagaaccccagattcgatatggcaacattgcttggtggcactgatgcagttttcctatctcttatacatgcattcagctggaatccggctacttttcttcatgcctacacatgtcttcctcttgctcaatcaacaaggcaggcagctagtgcagttttgcaggacatcgctgattcaggggttctatttgcgttattgatgtgtgagcacaaggttattagtcttgttggagcacaaaaggcaactttgcatcctgatgatattttattacttgcgaatttcattctgtcctctggatcttttagaacttcagagtcttttgtacccatatgtttgccaagatacaatcctatggcctacttgcatgcttatgttcatttttttgacgaacatacatatgtgactttgcttactacacgatcagatgctttttatgatctcaaagattccagggcccacattcaaaatgctcttttaaagtcaaatgtcctcatcgaagtccaaagatctttacatgagaatgcattgcgtgttgaggatctcccaaccaacccgtcttctcaatctgcatcacaccctccagagtcctctcaagacattagttcacaatctttgtcttctgaaatggcaattggaggaccaggtggactatggcattttatatataaaagcatttaccttgaccagtttgtgtcatcagaatttccctcacccataagtaacaaaaagcagaagaagggattgtacaaagcttaccaaaaattgtatgcatccatgcatgataaagcaactggtccacacaaaactcaattcagaagagatgaggattatgttctattttgctggataacccaggatttcgaactatatgcagcctttaatccactggctgataagactcaagcaatcaagatgtgcaatagagtatgccaatgggtgagggatttagaaaatgagatattcgtgtatggagaaagcaccctttcctggtgatatgttgtcctgtgtgtaataacttgttatgcctatgttacattttttttgttgaaagttttttttgatgttacttgtaccgacacaggcagtaccatcgttgttggggaggtgtatgagggggctaagtttgtcgcacttttgacattttctcaggaatggtgctccttttttttatctgtaaaaaaaactggaggttttttttcttcttatcattatatgtctacggcaccatttcctatctgtttgtagcagcccgttaaatttattaatttgggaagggtctattctgagggaaggagtagagcaataccatgtaacctctgcccgcagttgctggtcttcaaatttatagagaagggggatgttgatgcaaaaaaaaaaaaaaaaaaggcccctagggcc

SEQ ID NO: 111526 - DNA, 2253 bp, Zea mays
  Clone ID: MRT4577_331C.1
ctctctctcgctcatcacatccaccgtcgtatacgatggagatggatccttcgtcggcccctccctccctgggcggcctcgttccgggggccttgttccgacttcgcgccgcgggtgccccgcccgggacaggggaaagaagaaaggaatgtcgcctcttctttcggcttcaagagatcaatccactcttggcggccttgttctgggggcgtagaacgaacttcgcgccgcgggtgctcagcttaaggatctggctgccgtgtcatcggcgataggttcctcagccctgcggcgcacacagaattgagcatcgcagagataggcgtcttcgtactcgcctacctccgcggctcaaacctttcccccttctcccaattcccgccgccgctccatcccgtaacgcgacaccatgagggagtgcatttcgatccacatcggccaggccggtatccaggtcggaaacgcgtgctgggagctgtactgccttgagcatggcattcaggctgacggtcagatgcccggtgacaagaccattgggggaggtgatgatgctttcaacaccttcttcagtgagactggtgctgggaagcacgtgccccgtgctgtttttgttgaccttgaacccactgtcatcgatgaggtgaggactggcacctaccgccagctcttccaccctgagcagctcatcagtgggaaggaggatgcagccaacaactttgcccgtggtcactacaccattggcaaggagattgttgacctatgccttgatcgcatcaggaagcttgccgacaactgcactggtctccagggcttcctcgtcttcaacgctgttggtgggggaacaggctctggccttggttccctcctcctagagcgcctgtctgttgactacggcaagaagtcccaagcttgggttcactgtgtacccttccccccaagtttctaccttcggtagttgagccatacaacagtgtactgtccacccactccctcctcgagcacactgatgtggctatactgctggacaatgaggccatctacgacatttgccgccgatcccttgacattgagcgcccaacctacaccaacctcaacaggcttgtgtcccaggttatctcatcccttactgcctccctgaggttcgatggtgctctgaacgtggatgttaacgagttccagaccaacctggtaccctacccgaggatccacttcatgctttcttcgtacgctccagtcatctctgctgagaaggcctaccacgagcagctctctgtggctgagatcaccaacagcgccttcgagccatcttccatgatggccaagtgcgacccacgccatggcaagtacatggcctgctgcctcatgtaccgtggtgatgtggtccccaaggatgtgaatgctgctgtggccaccatcaagaccaaacgcaccatccagttcgtggattggtgcccgactggcttcaagtgcggcatcaactaccagcctcctagcgttgtgcctggtggcgacctggccaaggtgcagcgtgccgtgtgcatgatctccaactccaccagtgttgtggaggtgttctcccgcatcgaccacaagttcgacctcatgtacgccaagcgtgccttcgtgcactggtacgtcggtgagggtatggaggaaggtgagttctctgaggcccgtgaggacctggcggcgctcgagaaggactacgaggaggtcggtgctgagttcgatgagggcgaggatggcgacgagggtgacgagtattagagaagtttgctgatgacgcagcatcaggccagtgtgctgcccttatcccgtgatctgccgagagttgctcctgctatcgtgttatgtgtgtctgttctgaagtattgtgtggtttacaacacctgatgttgtaagagttgttaattcccctgcattgctaccgggttattgagaataattatggctgtttacgttgttgcttcatctcggagatgctttacatttaccaccttgttcatcttttgtcatcagtaaaatcgagtcggcggatgattttcttgcgaaaaaaaaaaaaaaaaaaaaaaaaaaaaaaaaaaaaaaaaaaaaaaaaaaaaaaaaaaaaaaaaaaaaaaaaaaaaaaaaaaaaaaaaaaaaaaaaaaaaaaaaaaaaaaaaagggggcggggcgttttaaaaggacccaagtttacttcccgggtgcatgcaaaggtaaaagtttttttttatggggccacccaaaattaaa

SEQ ID NO: 111527 - DNA, 2110 bp, Zea mays
  Clone ID: MRT4577_33200C.1
ccgaaccatgggataaaccactgggccatctctgtgattgatctcttgtggttattgtgttttgttgagactcctctctagccacttggcaatactgtgctaacgtttaaccaagtttttgtggcattaagttcaagttttacaggatcacctattttccccccccctctaggtgctctcaattggtatcggagccgttctcttcaagaaagggactaaccgcccaaagagatggatcctaagggcaaggggattgtgatcaatgacaaggagaaggagtcattcatcaacgagcccaaggatgacaagcctaccgactcgggctcgggccacaaatgcaaagatgggaagaagaagaagacaagacgcatcaaggagatcgtctactacgacgacagcgatgagtccacttcttcccaaaaggacaacgacgacaacgactacgagagaaggaaaccggttaattcgaacttttcttttgactactctcgtattccgcaaagtacaaatgctcatttgctctccattccacttggcaaacctcctcactttgatggagaggactacggattttggagccacaaaatgcgtagtcacctgttctatctccatccgagcatatgggagattgtggaaagtggaatgaaatttgatagctcggatagtcctatgtttatcaatgaacagattcatagaaatgcacaagctactactgtgttgttagcctctttgtgcagggacgagtatcataaggtgagcggcttggataatgccaagcagatctgggacaccctcaggatctcacatgaggggaacgacgtcaccttactcaccaaaatggagttggtggagggcgagcttggaagattcgcaatgatcaggggagaggagccaacccaaacatacaaccggctcaagaccctcatcaacaagataaggagctacggaagcacacaatggacggaccacgacatcgttcgtctaatgctaaggtcctttactgtacttgatccacatttggtgaacaatatccgtgaaaatcctaggtacaccaagatgtcgcccgaagaagttcttggaaaatttgtaagcgggcgaatgatgatcaaggaggcgagatatgtcaacgacgcgttgaacggtccaatccatgagcctcaacccattgctctcaaggcaacgaggagcaaggaggcgctacctagcaaggtggcgcaagttgaggcggctgggctcaatgatgaagaaatggccctcatcatcaagcgcttcaatacggcgctaaagggtcgcaaggggcagccaagcaagaccaagacaaaggggaagtgctcatgcttcaaatgtggtaaggttggtcattttattgctaattgccccgacaatgatagtgaccaggaacaagagaacaagagggagaagaagaagaactataataaggcaaaaggcgaggcacatcttggcaaggagtgggactcagattgttcgttgtccgactccgacaacgaaggactcgccgccactgccttcaacaagtcatccctcttccccaacgagcatcacacttgcctcatggcaagggaaaagaaggtaagcactcataatactagtacttacgcttcctcaagtgatgaagaatctagcgatgatgaagtagactattcatgtttattcgagggcctagatagaactaaggttgataagattaatgaattaattgatgcattgaatgataagaataggttattagaaaagcaagaggatcttttgtatgaagaacatgataagtttgtagaggcacaaaaatcccttgctttagaaattaaagggaatgaaatgctttcttgtgaattgtctacatgccatgactctatttctagcttaaagagcataaatgatgatttgactgctaagttagaaataggtaataaatcaacatcttgtgtagaacatgttgcaatttgcaataggtgtaaagattttaatgttgatgcttgtagtgaacatctagtttcaatttctaatttgaatgatgaagtggctagtcttaatgcccaacttaagactagcaagagtgtatttacaaactaaaattgcaagggatcccgaa

SEQ ID NO: 111528 - DNA, 346 bp, Zea mays
  Clone ID: MRT4577_33201C.1
aaccagatctatacccgcacaagaaggggggcacctggaacctttaaaacgctttggggtacaacaaccccaagcaggcgaagaaaacagagggcaccaccccagagacaccacaagacaacgcggcacgaaaccaccccaacaacatttgctacaccacagcccccaagcccacggacagccaaacaaaaaaccgcctcaagaagaagccccacaacaaagacgacggccccgaagaccaacaacgaagaagcaccagaccgggacaccgcaccagagcccaaaggagacaacaaagggacggccgcacggacaccacacccggagcgaggaaacacccccagac

SEQ ID NO: 111529 - DNA, 174 bp, Zea mays
  Clone ID: MRT4577_33202C.1
gtcgtggaccacaactccacttgttatcggtccacagcatactgccagctagcaaagagctgaacggtcctcatggacaccaatcgtttgccgagagaacaatggatgcacctggggtcatacaaactaacggaccgggagactgaccgctaaaggtcgcctcaacgtcaacag

SEQ ID NO: 111530 - DNA, 5136 bp, Zea mays
  Clone ID: MRT4577_33203C.1
atggatcctaagggcaagaggattgtgatcaatgacaaggagaaggagtcattcgtcaacgagcccaaggatgacaagcataccgactcgggctcgggccacaaacgcaaagatgggaagaagaagaagacaagacgcatcaaggagatcgtctactacgacgacagcgatgagtccacttcttcccaaaaggacaacgacgacaacgactacgagagaaggaaaccggttaattcgaacttttcttttgactactctcgtattccgcaaagtacaaatgctcatttactctccattccacttggcaaacctcctcactttgatggagaggactacggattttggagtcacaaaatgcgtagtcacctgttctctctccatccgagcatatgggagattgtggaaagtggaatgaaatttgatagctcggatagtcctatgtttatcaatgaacagattcatagaaatgcacaagctactactatgttgttagcctccttgtgcagggacgagtatcataaggtgagcggcttggacaatgccaagcagatctgggacaccctcaggatctcacatgaggggaacgacgtcaccttactcaccaaaatggagttggtggagggcgagcttggaagattcgcaatgatcaggggagtggagccaacccaaacatacaaccggctgaagacccttatcaacaagataaggagctatagaagcacacgatggacggaccacgacgtcgttcgtctaatgctaaggtcctttactgtacttgatccacatttggtgaacaatatccgtgaaaatcctaggtacaccaagatgtggcctgaagaagttcttgggaaatttgtaagcgggcgaatgatgatcaaggaggcaagatatgtcgacgacgcgctgaacggtccaatccatgaacctcaacccattgctctcaaggcaacgaggagcaaggaggcgctacctagcaaggtggcgcaagttgaggcggccgagctcaatgatgaagagatggccctcatcatcaagcgcttcaagacggcgctaaagggtcgcaaggggcagccaagcaagaccaagacaaaggggaagcgctcatgcttcaaatgtggtatggttggtcattttattgctaactgtcctgacaatgatagtgaccaggaagaagggaacaagagggagaagaagaagaattataagaaggcaaaaggcgaggcacatcttggcaaggagtgggactcggattgttcgtcgtccgactctgacaacgaaggactcgccgccactaccttcaacaagtcatccctcttccccaacgagcatcacacttgcctcatggcaagggaaaagaaggtaagcgctcataacactagtacttatgcttcttcaagtgaggatgagtctagtgatgatgatgaaatagattattcatgtttattcaaaggtctagatagaaccagggtggataaaataaatgaattgattgatgctttgaatgataagaatagattgctagaaaagcaagaggatctcttatatgatgaacatgacaagtttgtagaagctcaaaaatcccttgctttagaaataaagaggaatgaaatgctttcttgtgaattgtctacatgccatgactctatttctagtttaaaaagcataaacgatgacttgaatgctaagttagaaatagctaataaatcaacatcttgtgtagaacatgttgtgctttgcactaggtgtaaagattttaatattgatgcttgtagtgaacacctagtttcaatttctaaattgaatgatgaagtagctagtcttaatgcccaacttaagactagcaaaagcgaatttgataagttaaaatttgcaagggatgcctacacgattggtagacacccctcaattaaggatggacttggtttcaagagggaagccaagaacttaacaagccataaggctcccatccccgccaaggagaaagggaaggcccctatggcaagtagtgctaaaaggaaccatgcttttatgtatcatgatagaaaacagtcttataagagttgtaatgcttatgatgcttttgactctcatgccatgtttgcttctagttcttcctatatgcatggtaaagatatgtctaggagatatattgttcatatgcctaggagaaatgttgttaatgttcctaggaaagttaatgaaccttctacaatatatcatgctttaaatgcttcctttgccatttgtagaaaggataggaagatagttgctagaaaattaggggcaaaatgcaagggagacaaaacttgcatttgggtccctaagacaattgtgactaaccttgtaggacccaacaagagttgggtttatgcatccgggggttcaagctggattatcgacagcggatgcacaaaccatatgacgggggagaagaagatgttcacctcctacgtcaaaaacaaggattcccaagattcaataatatttggtgatgggaatcaaggcaaggtaaaagggttagatgtgtctgtcattagaagaagtgatggttcactagcttttaagggtgtattagacgacacactttacttagttgattttgcaaaagaggaggccggtctagatgcatgcttaattgctaagactaacatgggctggctgtggcatcgccgcttagcacatgtggggatgaagaaccttcacaagcttctaaagggagaacacgtgacaggtctaactaatgtgcaattcgaaaaagatagaccttgtgcagcttgtcaagcaggcaaacaggataaatctgaaacccaagggaccctcaagcgcttcctaaggagagctcaaaacgagtttgagctcaaggtgaaaaagataaggagcgacaatgggtccgaattcaagaaccttcaagtggaggagtaccttgaggaggaagggatcaagcacgagttctccgctccctacacaccacagcaaaatggtgtggtagagaggaagaacaggacgcttatagacatggcgaggacgatgcttggagagttcaagacccccgagcgtttttggtcggaagccgtgaacacggcttgccacgccatcaacagggtctaccttcatcgcctcctcaagaagacgtcgtatgagctactaaccggtaacaaacccaatgtttcgtattttcgagtttttgggagtaaatgctacattctagtgaagaagggtaggaattccaaatttgctcccaaagtcgtagaagggtttttgttaggttatgactcaaatacaaaggcgtatagagtcttcaacaaatcatcgggtttggttgaagtctctagcaatgttgtatttgatgagactaatggctctccaagagagcaagttgttgactatgatgatgtagatgaagaagaagttccaacgaccgcaatacgcaccatggcgattggagatgtgcggccacaggaacaagatgagcaagatcaaccctcttcctcaacaatggtgcaacccccaactcaagatgatgaacaggaggcgtgtgatcaagggggagcacaagatgatcatgtaatggaggaagaagcacaaccggcacctccagcccaagttcgagcaatgattcaaagggatcatcctgtcgaccaaattttgggtgatattagcaagggagtaactactcgatctcgattagttaatttttgtgagcattactcctttgtctcttctattgagcctttcagggtagaagaggccttgctagatccggactgggtgttggccatgcaggaggagctcaacaacttcaaaagaaatgaagtctggacactggtgcctcgtcccaagcaaaatgttgtgggaaccaagtgggtgttccacaacaaacaagacgagcacggggtggtgacaaggaacaaggctcgacttgtggcaaaaggttatgcccaagttgcaggtttggactttgaggagacttttgctcctgtggctaggctagagtccattcgtatattgctagcatatgccgctcaccattctttcaggttgttccaaatggatgtgaagagcgctttcctcaacgggccaatcaaggaggaggtatacgtggagcaaccccctggcttcgaggatgaacggtaccccgaccacgtgtgtaagctctctaaggcgctctatggacttaagcaagccccaagagcatggtatgaatgccttagagactttttaattgctaatgctttcaaggctgggaaagccgatccaactctttttactaagacttgtgatggtgatctttttgtgtgccaaatttatgtcaatgacataatatttggttctactaaccaaaagtcttgtgaagagtttagcagggtgatgacgcagaaattcgagaggtcaatgatgggcgagttaagctacttccttgggttccaagtgaggcaactcaaggatggaaccttcatctctcaaaccaaatacacgcaagacttgatcaagcggtttgggatgaaggacgccaagccgcaaagactccaatgggaaccgacggacacaccgacctcaacaaaggaggagtgtcacttagtggctgtgaagcgaattcttagatatttagtcgctacgccttgtttcgggatctggtatccaaaggggtctacctttgacttgattggatattcagactctgactatgctggatgtaaggtcgataggaagagtacatcggggacgtgccaattcttaggaaggtccctggtgtcatggagttctaagaaacaaacctccgttgccctatccaccgctgaggccgagtacgttgccgcaggacagtgttgcgcgcaactactttggatgaggcaaaccctcagggactttggctacaatctgagcaaagtcccactcctatgtgataatgagagtgctatccgcatggcggataatcctgttgaacacagccgcacaaagcacatagacatccggcatcactttttgagagaccaccagcaaaagggagatattgaagtgtttcatgttagctccgagaaccagctagccgatatctttaccaagcctttagatgagcagaccttttgcaagttgcgtagtgagctaaatgtcttagattcgcggaacttggattga

SEQ ID NO: 111531 - DNA, 1110 bp, Zea mays
  Clone ID: MRT4577_33204C.1
tcgggaaaagatgtcaccactattcagccttttaggtatgatccggatgctagtcttagaaaattctatttagcagtaatcatgcatgagtacccattcaacattgttgagcatgattattttgttgatttcatcaagtcgttgaggcctaattttgccttcaagtctagagtgactgctaggaaagatatacttgacatatactttgaagaaaaagaaaaattgtatgcccaattgaaaaatgtaacatgtcgctttagtgcaacaatggatatttggacatcatgccagaacaaatcatacatgtgtgtgacattgcactggatagatgattcttggcatattcagaagagaattgtggggttttttcatgtagaaggaaggcatactggtattaagttggcacagtgctttactgaagtgatggtaaaatggtttgctgagaagaaattgttttcattgaccttggataatgcatcaaataatttagtggcagtcaaagacattattcaagatcttagagtgaatgcttcttcttgtttgatttgtgatggaatattctttcatattagatgtgcatgccacatactcaacttggttgctagagatgggcttgctgttatttcaaaagcactggaaaagataaaagatttggtactaactgtgaagggctctcccttgcaatgggaggaacttatgaagcgtgctactgagtgtggattggatacatcaaagggaattcaactagatgtttccacaaggtggaattcaacttacatgatgctaagggatgcattgcactatgtgtgtttgatgtccgagatagtgattcccaattcatgaatgaagatggcgagctgtgaagaaatcttgcaaatgtgtgtttgatgtcatggactcatgaagacattgaagaacttatattgtgtccatatgtgtgtgtccgtgtgtgactgagactattattttgttaactattattgtgtctggactgaatttatgtaagtttacttgttggatttggatttgtgctatgtgctcatgtactattgtggacttattttcttgttgttcaaaaaaaaaaagaaaaaaaaaaaaaaaaaagcggcc

SEQ ID NO: 111532 - DNA, 342 bp, Zea mays
  Clone ID: MRT4577_33205C.1
ggtctcgtgggtcgatacaattctctagagtgagtcgtattagtaggtgcattgcttcggtggtccaccatggcgcaccgagcggtggccacgatgacgactaataagcccctcctcctcgtcgccctggcgtcggcgctccttggtgcggcgccggccgccgcgaactctcccggtggggcgttcatcacttgggtggcgatgattcagcagagctacgcgctgtccgcgcagaattccatcggggatgggggcactgagcccttggacgagaagctgtctgacgcggagaagaataaggtcacatacgtggtggacccgagaggtactggctactacacc

SEQ ID NO: 111533 - DNA, 106 bp, Zea mays
  Clone ID: MRT4577_33206C.1
atacaagtgacacaaacacatgattttgccttcaaatactcgccccttatgtttgtttgtaatgtgcaacttgccaaaagatagcaatctaaatcattgcttggtt

SEQ ID NO: 111534 - DNA, 825 bp, Zea mays
  Clone ID: MRT4577_33207C.1
atgtctctccgcctcctcctccacctcgcggcagcctgctcctccttttccctctccgccgccgccagacgccaaggcctccgccctttcgaacgactgccaccgacgtcccacatagagcctctagtttcttcagtatccctatccgcgccttcaccggtgtctcgggcatggcggcggggacgcaccagcggaccgtggaggttagggagagcgtggagctgacggaggaggaggagcgcatcttcgctaggctgctggacgtcgtccgccacttcggactcggcacccagctccgcgtcgccgggggatgggtccgggacaagctattggggaaaggctctgctgacattgacattgcacttgataatatgacgggccaaaatttctgtgagagagtaaatgagtactcaaaattcatgggtgaagagcagaaagggatcggtgttatccagtgcaaccctgatcaatccaagcacttggaaactgcaagaatgcttatatatggcatatggattgattttgtcaacttgaggtctgaaaagtatgctgaaaacagtcgtattcctactgtggagattggaacagccaaagaagatgcactccgcagggacctaacaatcaatagcttattcttcaatatcaacactaaatcagtggaagatttaactggaagaggtcttgaagatctgaagaagggcctcattgatactcctttacctgccaagtcacctttcctggatgaccccctcagggttcttaagagcaattcggtttgctgctagattcagctttacattagctgaagatttgaaagagccgctt

SEQ ID NO: 111535 - DNA, 318 bp, Zea mays
  unsure (1)..(318): unsure at all n locations
  Clone ID: MRT4577_33208C.1
attatcaatctaacatgtctggattcataatttttttgatgaatttaattacaacaagtcatccataaacaanaaaaaaacattttaccccatcatattcctaccacacaatttttgcaaaaaaatccctggaacccgaccaatgacaataataaaccgtgccgtattgtaaaaaacacatcctaaccctcaaaaaattcgcctcttttatattaccataattgaccaattccccttggatgatttttttttatttataagcccctacctttcttattataaaacctttttttttctaaaaaaacactaacatttttt

SEQ ID NO: 111536 - DNA, 699 bp, Zea mays
  unsure (1)..(699): unsure at all n locations
  Clone ID: MRT4577_33209C.1
caatccgaagcagctattgaaacagattgctaccatctatgtccacattgcaaggggtgataaggaagctgtcttcccagctgcaatctcaaaagacggaaggtcatacagtgagcagttgtttgctagcgcaactaatattttgtggaagattggggtagacccccaaatcatacaggagtttatgcaacttgcaggtaaagcaaaagctgctgccgctgaggccatggacgctgaggctatccttggggacataccagacgaatttcttgatccgatccagtatactctgatgaatgatcctgtgatactaccatcgtcgcgggtcacagtagatcgaccagttattgttcggcatttgctcagtgacagtactgatccgttcaaccgctcccagctcactcaagacatgttgataccagatacagatctcaagttgcgcattgaagaatttgtcaggtcccagcagtcgaggaagcggagggctgtcgacactcagaccggggagcctgatggtgctgctgatatggtggagtgaactgctaaaagctgggatggacagtagtttcaggcctgatcatttgtcggnaaatggcgaagagtgctccctgcaaatcnnagcttgaacactttgtaatgcattgccttatcatggaccgttagggtatgtcaagttcacttggataaaattttatcttt

SEQ ID NO: 111537 - DNA, 448 bp, Zea mays
  unsure (1)..(448): unsure at all n locations
  Clone ID: MRT4577_3320C.1
tgggggggtggggttncgtggtttgtgggggttngttttgtttttgggttggtgtagttttgtgtgctggtggtgtggtgaggttttggtgtgttggtgattgntgtctgttgntaggagaggatatggtttgtggttttggtgtccttggggtgggggggggtgntggttctgttcgttccattggtatgcaggcctgtggatctacttgtcctttttggtcggttcggccctgttcgggatgtttacctgccctgctgttttctctctgtggtgccttgaggttttgggttcgtggtgttcgttgttgcttatgccgcttgtgtggccngttcctcttgtttcgcctgatgtttgctgggcgtgttcttcctgttgttctttttgctgttgcccggttggggcctgaggtcgtgcgttgtcgttcttggccaagtagttattcttg

SEQ ID NO: 111538 - DNA, 400 bp, Zea mays
  Clone ID: MRT4577_33210C.1
ttttacttataaaaatttaaattatatattctttttatttttttattttttcttattttttaattttttttttttttttttttggaactaaataaggaaagaaaaaaattttttgcctggccaaacctaatattaaaataaaaaattttttttaaaaaaaacgggataaaaccattgaaaaaaaaaatatccttaatcggaaattaaaaatggccagaaattttatggtccaggcaaaaaaactaattaaagccaaatctatttcccggcaaaaaattggtacaactcactataataaaaaggaacttgcaagtcttaaaactctaaaacttagtagctacaactaatgaaaaaaattatcctggtcgcgcggattaattaaatacccaatttacaaaat

SEQ ID NO: 111539 - DNA, 291 bp, Zea mays
  Clone ID: MRT4577_33211C.1
ttgttggtgctggggaaccatgctatgctgctgtcctgaacgccgcactctccaaactgctcaaggggggaccacctcgaggacagggaccccggtgccctgaacgacggctgcatggacggtgcgagggacgggcacgggcagatgccactcggggaggcccgactgatggaacggatgtcgctgactctagagccgctggcccggcttgatgagagcccatcatgcctgccttacagaggtgtcgtaacattacaagatctgagcgtctccacaccaacgtgaccagac

SEQ ID NO: 111540 - DNA, 842 bp, Zea mays
  unsure (1)..(842): unsure at all n locations
  Clone ID: MRT4577_33212C.1
cgggcctgaatgttagttttatttatattaaaaactgatcacctggaatagttctaggtcctaatcctagctaaccgaacgggcacttaggctttttggttcagtacaagtacgacctaaaaacagaagtctaaagcacggtacgacacaaaaaaatggatcgggctagcacgactcgaaagcaggcctagtccgagccttaaatttcagcatgttggcccccgacacggctcacacacataggtcgtgtttgggctggcacggttcaacgaagcctatattatttaatttatttaatttagtaacctacaaactttatattattgtaatatttagacttttatgtggtcaaatgatgctaccattgtttaatatctttaatttagtaagacatgaactttatatggttgtaatatttggattttatgcggttcaaatatataggctggcacgtcgtaacgaagatacggagtgctttagggcggaggctgggtcactgtttctactctttagaccggcacggcacgatcaaaaaaatttgggccttcttgactcaaacccgtttggctttaagtacggaccgacctagtcagatccaattcccaacactagacaagagccacatagctagcacgggagcaccaattgagtgattagttcatctgattggtttgtttccttgtattttttgccccatgctctatgcttggcaacaagatcctatacagcactctgaatttgaggtcactgacgtataagtataatctaaatttggccccatacgtcagtgacctaactgcagttgcatactgcagggatctggtttnctatgctnattactc

SEQ ID NO: 111541 - DNA, 358 bp, Zea mays
  unsure (1)..(358): unsure at all n locations
  Clone ID: MRT4577_33213C.1
gcaaaagcggcgggtgtgcgctgcttggattgcagccattaagagagagaaacaagggtagaaggacgtgggtccattcgcgggtgagaattgagctcgtccgcaaccttcacgcatgccagacaatggtgcatccttgcactacgcgaggactcgcccacggggtcactgtgtcggagaccgggtgcctcgttgtcgacgtcaagagatccggcgcgccaccagtctccgtggacaactacactggtgcctcgaaaacgcacggttgggcaagctcgctccaggaatcaaatcaatctggtgctcaatcccacgaatgggaggacattctggaggtaactcagagggannaacatct

SEQ ID NO: 111542 - DNA, 265 bp, Zea mays
  unsure (1)..(265): unsure at all n locations
  Clone ID: MRT4577_33214C.1
ttgttcggtgtaggtctgttgcttgtatgtgcccaggggcggagtctcccgctggatcaggtactgttactacggcggcccgggtaggagctggagctgccaggtgctggtgggctctttttttagggagtgatgagcgtgctggggggggggcgtttgattgctggggtccgttctttttcttgttccgctgtgtggttattggcgtcgtgccgggatggctcccgaggataaggttgggctgcggnggggggggtggcctgcc

SEQ ID NO: 111543 - DNA, 239 bp, Zea mays
  Clone ID: MRT4577_33215C.1
ccgggcgcgacccacgcaggcgggccagcagtctgtgtgtcctgaataaggcagaaacactagcgctttgcactgtggcgttcatgtctggggagggggacggcggccggagggcctgcacggggtgtggggtggttctttgatatgaggaaaccggcgcctgtcaaaccggcatcccgtgccaagccgactgacaccgacgcacgcactggctaggcgaggcgggaggcctttttttt

SEQ ID NO: 111544 - DNA, 271 bp, Zea mays
  Clone ID: MRT4577_33216C.1
ggaaaatcgagggtatacctagggtggcggtgaagtcgggctagtggagctgaggcgggacagtgtagtggcaacgcgacgcggggcaggcagactcgcagcagcgaggaagacctctgcaaaaaaaataaacataagcctatcaacaaaaaatcggcaacacctcccccatacagggaagtttccaaaacctgtaaataaaagtaacaacatgatgacgaacgttcacatatgtttcaacggcacgatagccaaaaatcacatatatatt

SEQ ID NO: 111545 - DNA, 375 bp, Zea mays
  unsure (1)..(375): unsure at all n locations
  Clone ID: MRT4577_33217C.1
cgccgttccncnccgcgccccnncangggggggggcggcatgggcaccgccaccaccaacggcncggcggagcaggcgnccgcgcccgngccggcgcccaagnnccncaacnacggccgcacgggcnggaacggggggcngcngggcggccncngcgccgcgcgcgggaaccccancgncaacggcgccggcaggcncgagaaccgcgcccagcncgaggccgacancgacgccgccgcgcccacccacgngnncaacgccgcgggcgncacgggccgccccaacgncgacgggngcgagacgcaccgcgccgagaccaaccgcgccaacgnncggggcacgcccacgcncgccgacancngccggggccgaggg

SEQ ID NO: 111546 - DNA, 1329 bp, Zea mays
  Clone ID: MRT4577_33218C.1
atggaccaccctgtgagaaataagaggccatcaacgtggcggcttatctgccacgccttaaagcctgtataggaggtgatccgtgtgatggtgtgcccgtcacctcctgtttttgctgatttgttttacggggacagaaaataatgttttgctctcgtggacctgcactgcacgtgacgaggagagttcagttgtcgtgagcgatgtacgttggggatattgtgatgtggtccttttctaaagaaaaaaaatgttgacggtcaaggagaaaaaaaaaaaaaaaaaaaaaaaaaaaaaaagcctcatctgctctcttcccccgtcttcttcccaagctgccacgttgcctccctccgctccagcggcccatggcctccatggcgttcgccctggcgggggccttcaagggcctctccctggcgcccaccaccaccacctcctccttcccgcgctgcgaccgcgcctcgctctccgtcggcggcgcagcgggcgtgccggcggtgccggtgccggcgcggcggctcaccatccagatggcgcacaagaagggggccgggagcaccaagaacggccgcgactccaagggccagcgcctcggggtcaagatatacggcgaccagctcgccaagcccggggccatcatcatccgccagcgcggcaccagggtctatcctggaaataacgttggaatgggcaaggatcacacactcttttctttgatagatggactcgtcaagtttgagaagtatgggccggacaagaaaaaggttagtgtttacccatatgagaaggagcctgaaaacccaaacagttacagagcaaggaagagagagtacttccgcatgcggcgtgaacggaagaaggcgagagcggagggcgccgctgagcctcagttggtactagctgctgttgatgaaaactctgaggtcagcgcggactgctgataagtttcctgtgtggtgtttctctttttcacagcccttgttacactttttcttccttaattgtaagaccacatgatctataaaggtcatatttacatgtgttgtttagataaatggatatgttctacttgtacgttttgtggggtagttgtgctttagagtcacagtggggtctattccaacttcctagaccactccacgtagggcgtgtttggttcggctttttttctgaatacgctttttctgaaaagctggttgttgagaaaagctggctgttgggaaaagctggtggttagaatttaggtgtttggttcgccagctgtgcagaaaagttgttcgttagaatctaggtgtttggatacacagattctcagattgcagattc

SEQ ID NO: 111547 - DNA, 382 bp, Zea mays
  Clone ID: MRT4577_33219C.1
atgtgattgccatcctagataaaaaaaaagtagcactagaatcacatggccttaatgaaaattagcatcaggaactagatgtaccaaactttgctcctgcctgccaaatttcaccgagttgcacatttttgctttattcatctacccctgccaccaaacactatcggttttatacccctgcttcaatcttggcctgtttggttttaatccaggcagctttgcctggctcttcatgcaattccaggctttggaattttttgtgtacctggggtgtagactgcttactggcatgctttgaaccaaacaagcagaccccaaaagcattgttgaactgaggttaggtagctgaacatacatatgtacttgttcgattccattgttg

SEQ ID NO: 111548 - DNA, 297 bp, Zea mays
  Clone ID: MRT4577_3321C.1
cccacgcgtccttccactcgtcagtcctctcttcctaccacgcttccgctcagttcgcgtgggtattatccaaattaagaccgaagctccttgaccgtctgatctcctgtccaaatacaacctactaatcactatcgaccaacatctcttttatgccacggtctacacccgagcaaagttcattttaccagtggatccctactaataaaggaagatgattgcgatctcatcttgtggatctatactaactccctactcactttcgctacacatgatgtacactcataataaatgtat

SEQ ID NO: 111549 - DNA, 589 bp, Zea mays
  Clone ID: MRT4577_33220C.1
ctagtagctcttagctctgcttatcttctcttccctcgatttcagtacttccatgctctggttccctgagaacagagacagtagaccatctatatgtgcactgctgcccttgtgtaaatgtggatcagcgctggcatgcggtggtgaaagtgttaatgcatgagcctgactgagaagtaggtgctgcagctgcatcaggtgtcactccagatatttcatcactagcaaaaaaggctattgctacatactatatacattgtagggtttccgcagctctctgtcaggcaagggaggaacagcagttgtgggaaatggcgggagctaagggtctctcctttcttgcagccaccacatgtgtctcttagctgctcgttgtagggttgtaattgtttcttctagaatcatggatagtttcttatttctttgttgtaaacctccttaggagggtattcgtgtaccagggtctattttggacctttttccttcttaatataatgatgtgcagttctcctgcacgttcgagaaaaaacatactacatacattatatcagttccggtatatagaggatgatctacgactagggttgac

SEQ ID NO: 111550 - DNA, 348 bp, Zea mays
  unsure (1)..(348): unsure at all n locations
  Clone ID: MRT4577_33221C.1
ccagggcgccgccgncagcgacatgacccagcgccttctgctcgccctctcgctcatcgcatcagagaccgccgtgcccgatgtcatacagcacggcacgggacgaccctaccggagcctcctctggcgcggcagcttttcctacggcggcgaaggcnacagcnggaggctcgcggagtttttttcaaacccggcccgtggagcgccgtgcactcccgctggggggctccacagcgcgactacacggagggacctcggtacgcgtctgactccgccgccgacagcgtcgacgtgctagacataagctccgaagccctggccgccgcccaataggaccgctcggcgagc

SEQ ID NO: 111551 - DNA, 311 bp, Zea mays
  Clone ID: MRT4577_33222C.1
ccacacccgtccgggaaacgggccctgggtttaattaaaattggttccactatctgtccatgtaggaaggatgggaatggtggggcttcttcataaggcttttgcttactttgcccggacccaggagggttttttggaaatcgatgaaccccgggggtcattagctgttgcccttggccagataaaggaaagggttttcaatgccattttccgggccgtatcccccgttatggttggcaggttaggctccgataagtttgcagcgttattgaaggccggaccagactggaggaaagcgttgggccagtttt

SEQ ID NO: 111552 - DNA, 274 bp, Zea mays
  Clone ID: MRT4577_33223C.1
aaaaaaaaaaaaaaaaccccccttacttacctagaaagacgggtttttttttgggggcaatggccccctcaccttgggctgttttttttgcccggggtcaggaacaaccccacgttcgttcgtaccccctttttttggttccaatcacatcgccggaaaatttttttttttttttgtggaacaaaaacatgattccctctttaaaagaacaacaaggggggcttggcaaaggggttttttttgccattccaacccccattttacccccgggttt

SEQ ID NO: 111553 - DNA, 330 bp, Zea mays
  Clone ID: MRT4577_33224C.1
ctgacgcgtgggctctgggacttcctgctttaggaggtgatccaagatcacggggataggaagaatctgaacggcaacagggagaatgaatcagacgacttcatttacatattactctacagatactaagagtactgcttcaccatagataacgttaagtgccttctcatgaacttgttctatgcaaccatcgagacctcatatctggtgctggaattcgccatggccgagcttatgaaccacaggaccgtcatgaagaaactgcaagctgaagtacaggcgtactgagcttataacaagctggacatgatcagtgaggactaccttagc

SEQ ID NO: 111554 - DNA, 189 bp, Zea mays
  Clone ID: MRT4577_33225C.1
cgggaggctgcgcacgcgccatcgaggatgtgcaagacagggagttcacggggaggatttgcggtgctctctgtcgcagccagcacagctgttgttggatgtccaagggtgaggatgagactacacatacacggaggtcgtgtacactggagttagtactaccatcgacggctctctgtgatataacat

SEQ ID NO: 111555 - DNA, 246 bp, Zea mays
  Clone ID: MRT4577_33226C.1
ccaaccttcgcttatatagttcctggctttctacacctttttcatgactgatatacacagcgtactctcgatcaatcatacaacaatagaacaccaagcctaaaatccactccttcttctgccctactgcctactactccttgtcctcatcctcactccgatcatcatactcgagcccactccaacaatcctacaccatgctatccaccatcagcattacccaccacctctgaatctcatctcctt

SEQ ID NO: 111556 - DNA, 326 bp, Zea mays
  Clone ID: MRT4577_33227C.1
atgaagaccatactttttaccaatctttttacgcattacaggccgaggaaaactgggacttttcatatcttctagacatacttatatgctctggtttcatagttagtagacttggtagctcatttgtcggtcatgtaactagcctggttaccctggtggtcttgatgtatttgatagggtagaaaggaaatactataaaatcgtaacatggtcttatgctgaaaggaggtttgtttctgacctaatgaatttaattttttcctaggtccttgctccatggggtgcagtgcactcttgtgtgcagcctatttgacactgtttgtttt

SEQ ID NO: 111557 - DNA, 1333 bp, Zea mays
  Clone ID: MRT4577_33228C.1
ccggttaaaaaaaaaaaagggggaaaaaaaaaaaatcatgcatcagcagcagcagcacgaaaccctgtagtagcctgccatggctacgcgctgctgcctggtcgtcgccactctcctcgcggcgctgctctcggtcagtgccagcctcgagttcggtttctacaacaagacgtgccccagcgccgaggccatcgtgcagcagaccgtggccgccgcgttcaccaacaactccggcgtcgctccggcgctcctccgcatgcacttccatgactgcttcgtcagaggggctgcgacggctcggtgctgatcgactccacggccaacaacaaggcggagaaggactcgatccccaacagcccgagcctgaggttcttcgacgtggtggaccgcgccaaggcgtccctggaggcgcggtgccccggcgtggtgtcctgcgccgacatcctcgccttcgcggccagggacagcgtcgtgctcaccggcggcctcggctacaaggtgccgtccggacgccgtgacggccggatatccaatgccacgcaggccctgaacgagctgcccccgcccttcttcaacgccacccaactcgtcgacaacttcgcctccaagaacctcagcctcgaggacatggttgtcctctccggcgcacacaccatcggcgtctcgcactgcagcagcttcgccggaattaacaacacaggcgaccggctctacaacttcagtggctcatccgacgggagcatttgcccgtcaaacagcggccggttcttccccaacacgacgacgttcatggacctcatcacgccggccaagttcgacaacaagtactacgtcggcctcaccaacaacctgggcctcttcgagtcggacgcggcgctgctgaccaacgcaaccatgaaggcgctggtcgactccttcgtgcgcagcgaggccacgtggaagaccaagttcgccaagtccatgctcaagatggggcagatcgaggtgctcacggggacgcagggcgagatcaggcgcaactgcagggtcatcaaccctgctaatgccgccgccgacgtcgtccttgccagtcagccagattcatcaggatccactggagtggctgcaagctgatgtgtttggtgtgggatgtgatatatattgcaataatctagaaaactgaagaagaagcaggtgatgaccacactctgtagtgcatcacgcggtgcgtgttcatttaaccttggcgtttgattgtgacgatgaaataaaacacatgtatgaccatatctgattattagtgatacaaaaaagcttgattaaacatgaccaaaaaaaacaaaacaccgcccgc

SEQ ID NO: 111558 - DNA, 1630 bp, Zea mays
  Clone ID: MRT4577_33229C.1
gacgaaggcgggcccggaaacaaacccggctctctcacttgcttcaaggccgacgggctatctcactgatagtgataggaacagaacccgtgcatatttcagtcgtcgctcgcggagccgtggcgcatcgcgactcaggcactcaccgaccgcggatatggccccgtcgccatggcctctccttgcgacttccctcctcctcatcctattccaccactcgcctcgcgccgcggcggcgtttccgccgtctctgggcgacggcctcctgggcgccgcccgcgcgccgggtttcgcggcgtggctgcgcggcttgcggcgccgcatccacgagcgccccgagctcgccttccaggagcaccgcaccagcgagctcgtccgcgacgagctcgacgcgatcggggtgccgtacgcgtggcccgtcgcgcagacgggcgtcgtggcgaccatcgccggcggcagcgatggccccgtcgtcgcgctccgagccgacatggacgcgctacccttgcaggaattggtagactgggaacacaagagcaaggagaatggaaagatgcatgcttgtggacatgatgctcacacaacgatgcttcttggggcagctaaattgcttcatgctcggaaggatgatctgaagggtaccgtgaagcttgtcttccagccaggagaagaaggctacggcggcgcttaccatgttctcagagaaggtgtcctggatgacgtgtctgccattttcggcttgcatgtggatccaggacttcctgtaggcaccgtttcgtccaggccagggccgtttctagcagcagcaggtagatttctggtgacggtcactggaaaaggcggacatgctgcagggccacaggatgctgtggatcccattgttgcggcatcctctgccatcgtcagccttcagcttcttgttgcccgcgaaattgatcccctccaggctgcagtggtctcggtcacgttcatgaaaggaggtgatgcttacaacgtcattccagagtcagcatccttcggcgggaccttcaggagcttgacaacagaaggcttttcgtatctcatgaagaggatcaaagagatcatagaaggtcatgccgccgtccaccgctgcaccgccgccgtcgacttcatgcaggagaagctccgcccgtacccagccaccgtgaacgacgaagggatgtaccgtcacgccagagaagtggcagaggccatgcttgggcaggacaaggtgagtgtaggcgcgcagatgatgggcgccgaggatttctccttctacgcggagaagtttgcaggggcgttcttcatgatcggagtccgcaacaagagcatggaggaggcaatgcatcctctccactccccgtacttcgtgatagatgaggacgttctgcctgtaggagctgccttccactctgcagtagcgatggagtacctgaacaaatactcaacgacccggcaaactgagctgctgcgcattgagctgtgatagattattgcttgtaataagggttaccatgccgaggtcatgttgcacaaaagaaagtttgcattgtgcccatggaataaatacagtttctccttgctcaaaaaaaaaaaaaaaaaagcggccaaaaaaaaaaaaaaaaaaaaa

SEQ ID NO: 111559 - DNA, 880 bp, Zea mays
  Clone ID: MRT4577_3322C.1
tctgtggcaacgacacttcatggactacgaattaccagcagggagtgtttacgagtcccaaaaccatctcaagagaagcctgtcctccaggatttgggtctggggagaaccagggcaatggcactccatggtatatgagcagcaaacagagagcgtttacgagtccatcatttacgagtcctacaaccatctcaagagaagtaggcctgccagggtatggacaggaaaatcagggcaatggtgcttcttggaatatgagttatgagcagggagtgtttatgagtcctacagacatctcaagagaagtaggcccgccaggatacgggcctgcggaaaatcagggcaataccacttcgtggatttcgaccggcaacaagcagagaatgtttaccgcttcaaccatcccgaacgaagtcggcctgccaggatatagccctgtaggaatccagggaactggtggttcaaggagcatgaacttggaagcctttccaccaggatatggacctggagaaaaccatcttggtggtgcttcagggagtgtcataaacccccaagctcggtctcaagagagtgtagaattttcagacgagactagaagaaaggctatacagcgggagctgagacggcggcagaagttcaggtgatgccgtgatgtgaacttttgatcctccgcatcgaattttgactacggattactttaagactacatatccagtcttgatggctgaatgagtgacgaccttagttgtcgagaagcaaaaaccctttgttgttgtagcagctgcgtatgtgtttcttttagagacttgcttggcttgtcaataatttcttatgtgaacctcttgaacctgaagtattcaacgtgcttgtgaatttgtgc

SEQ ID NO: 111560 - DNA, 223 bp, Zea mays
  Clone ID: MRT4577_33230C.1
atttgctctagctctggcttttgcaggctgtcggcgaccattttccaaagctccagctctatgcttcttttcccgtccttaccagcgggtcttcgatgtgaaaacccaacttaaccctcagaccacagatcacagtggcattaccttataccctgtctcaacaatatagcctattacatagtccttgggcttattgccaaacatagcacacactcacactggc

SEQ ID NO: 111561 - DNA, 1029 bp, Zea mays
  Clone ID: MRT4577_33231C.1
tgcatcagcagcagcagcacgaaaccctgtagtagcctgccatgactacgcgctgctgcctggtcgtcgccactctcctcgcggcgctgctctcggtcagtgccagcctcgagttcggtttctacaacaagacgtgctgatcgactccacggccaacaacaaggcggagaaggactcgatccccaacagcccgagcctgaggttcttcgacgtggtggaccgcgccaaggcgtccctggaggcacggtgccccggcgtggtgtcctgcgccgacatcctcgccttcgcggccagggacagcgtcgtgctcaccggcggcctcggctacaaggtgccgtccggacgccgtgacggccggatatccaatgccacgcaggccctgaacgagctgcccccgcccttcttcaacgccacccaactcgtcgacaacttcgcctccaagaacctcagcctcgaggacatggttgtcctctccggcgcacacaccatcggcgtctcgcactgcagcagcttcgccggaattaacaacacaggcgaccggctctacaacttcagtggctcatccgacgggattgatcctgcgctgagcaaagcctacgcgttcctcctcaagagcatttgcccgtcaaacagcggccggttcttccccaacacgacgacgttcatggacctcatcacgccggccaagttcgacaacaagtactacgtcggcctcaccaacaacctgggcctcttcgagtcggacgcggcgctgctgaccaacgcaaccatgaaggcgctggtcgactccttcgtgcgcagcgaggccacgtggaagaccaagttcgccaagtccatgctcaagatggggcagatcgaggtgctcacggggacgcagggcgagatcccgcccccccccagggtcatcaaccctgctaatgccgccgccgacgtcgtccttgccagtcagccagattcatcaggatccactggagtggctgcaagctgatgtgtttggtgtgggatgtgatatatattgcaataatctag

SEQ ID NO: 111562 - DNA, 314 bp, Zea mays
  Clone ID: MRT4577_33232C.1
tcgcgatctataacgaggagggagagagagagagggagagaccggacaggcgggcagcaagcaacgggcacgaaccggcgccgaccttttacaggcggaggaaggagggaccgagggagagacgcttttctcttttttttttttacacacacacgcacaggtccatggtcgcgcacgccggaacatccggattcggattcggcttcttcctgtgaggcggcgagcgacgccccgcaaattaaggtgtcgtccaagaagaaaccggcggcggaacaacaacgggaggagacggaagaacaagggtcgtcgggggc

SEQ ID NO: 111563 - DNA, 1450 bp, Zea mays
  Clone ID: MRT4577_33233C.1
ctcgaggccggccgggatcatgcatcagcagcagcagcacgaaaccctgtagtagcctgccatgactacgcgctgctgcctggtcgtcgccactctcctcgcggcgctgctctcggtcagtgccagcctcgagttcggtttctacaacaagacgtgccccagcgccgagaccatcgtgcagcagaccgtggccgccgcgttcaccaacaactccggcgtcgctccggcgctcctccgcatgcacttccatgactgcttcgtcagaggctgcgacggctcggtgctgatcgactccacggccaacaacaaggcggagaaggactcgatccccaacagcccgagcctgaggttcttcgacgtggtggaccgcgccaaggcgtccctggaggcgcggtgccccggcgtggtgtcctgcgccgacatcctcgccttcgcggccagggacagcgtcgtgctcaccggcggcctcggctacaaggtgccgtccggacgccgtgacggccggatatccaatgccacgcaggccctgaacgagctgcccccgcccttcttcaacgccacccaactcgtcgacaacttcgcctccaagaacctcagcctcgagggacatggttgtcctctccggcgcacacaccatcggcgtctcgcactgcagcagcttcgccggaattaacaacacaggcgaccggctctacaacttcagtggctcatccgacggggtaaatttcccctccgaccatcttcccatccctatcgcgggctcatacaattaatgcgacctgctactgctatatatatgctctactgacgggattgatcctgcgctgagcaaagcctacgcgttcctcctcaagagcatttgcccgtcaaacagcggccggttcttccccaacacgacgacgttcatggacctcatcacgccggccaagttcgacaacaagtactacgtcggcctcaccaacaacctgggcctcttcgagtcggacgcggcgctgctgaccaacgcaaccatgaaggcgctggtcgactccttcgtgcgcagcgaggccacgtggaagaccaagttcgccaagtccatgctcaagatggggcagatcgaggtgctcacggggacgcagggcgagatcaggcgcaactgcagggtcatcaaccctgctaatgccgccgccgacgtcgtccttgccagtcagccagattcatcaggatccactggagtggctgcaagctgatgtgtttggtgtgggatgtgatatatattgcaataatctagaaaactgaagaagaagcaggtgatgaccacactctgtagtgcatcacgcggtgcgtgttcatttaaccttggcgtttgattgtgacgatgaaataaaacacatgtatgaccatatctgattattagtgatacaaaaaagcttgattaaaaaaaaagaaaaaaaaaaaaaaaaaagcggcc

SEQ ID NO: 111564 - DNA, 1635 bp, Zea mays
  Clone ID: MRT4577_33234C.1
ttgggtacctcgaggccgggcgggggagagctcctaagaccctccctcagacgcgtggcgtcccatcctacgatccaaagctctctctgtgtcgcaggtcgcagccatggcgaagattacccgaccgtgagcgccgagtacagcgaggctgtggagaaggacaggcgcaagctccgagacctcatcgccgagaagaggtggggcccggtcatgctccgcctcgcgtgggactcctatagggcgattggttgcctcgaggccggccgggccgggatcatgcatcagcagcagcagcacgaaaccctgtagtagcctgccatgactacgcgctgctgcctggtcgtcgccactctcctcgcggcgctgctctcggtcagtgccagcctcgagttcggtttctacaacaagacgtgccccagcgccgagaccatcgtgcagcagaccgtggccgccgcgttcaccaacaactccggcgtcgctccggcgctcctccgcatgcacttccatgactgcttcgtcagaggctgcgacggctcggtgctgatcgactccacggccaacaacaaggcggagaaggactcgatccccaacagcccgagcctgaggttcttcgacgtggtggaccgcgccaaggcgtccctggaggcgcggtgccccggcgtggtgtcctgcgccgacatcctcgccttcgcggccagggacagcgtcgtgctcaccggcggcctcggctacaaggtgccgtccggacgccgtgacggccggatatccaatgccacgcaggccctgaacgagctgcccccgcccttcttcaacgccacccaactcgtcgacaacttcgcctccaagaacctcagcctcgaggacatggttgtcctctccggcgcacacaccatcggcgtctcgcactgcagcagcttcgccggaattaacaacacaggcgaccggctctacaacttcagtggctcatccgacgggattgatcctgcgctgagcaaagcctacgcgttcctcctcaagagcatttgcccgtcaaacagcggccggttcttccccaacacgacgacgttcatggacctcatcacgccggccaagttcgacaacaagtactacgtcggcctcaccaacaacctgggcctcttcgagtcggacgcggcgctgctgaccaacgcaaccatgaaggcgctggtcgactccttcgtgcgcagcgaggccacgtggaagaccaagttcgccaagtccatgctcaagatggggcagatcgaggtgctcacggggacgcagggcgagatcaggcgcaactgcagggtcatcaaccctgctaatgccgccgccgacgtcgtccttgcccgtcagccaggttcatcaggatccactggagtggctacaagctaaccatatctcggtgtgtctgcagtgtgtttggtgtgggatgtgatatagtatattgcaataatctagaaaactgaagaagaagcaggtgatgaccacactctgtagtgcatcacgcggtgcgtgttcatttaaccgtggcgtttgattgtgaggatgaaataaaacacatgtatgaccacatctgattattagtgatacaaaaaaaacttgattgaaaaaaaaaaaaaaaaaaagcggggcggc

SEQ ID NO: 111565 - DNA, 512 bp, Zea mays
  unsure (1)..(512): unsure at all n locations
  Clone ID: MRT4577_33235C.1
gggccgccaacaaaaacacgtcgcgcggcctgtgggcgcgcgtgttctggccgtcgcccgagtcgtccgcggccccgctcccagccgagggatacttacacagagttgtcggtacttttcncnctgcggcctcntacgtggaggaggccgtgtgccttcgggtctgccgcgagctgggcgccgtgggggggtccttcaactaccgcctggcacccaagcaccggtggcccgccgggtaccaggacgggggcgccctgctccaatacctcggctccgcgggcctccccgacagcgtccacgtgccggtggacctctcccgctgcttcctcttcggggacagcgcctgcgccaacatctcccaccacgtggggcagcgctggacgaccgcctcctccccgccgtggggcatccccgtccgcctcggtggggcccttctggtgcaaccgttctttggcggggaggagcgcacggaacctgaggtcaggctggaccgtaacctgcccgtgggggac

SEQ ID NO: 111566 - DNA, 526 bp, Zea mays
  Clone ID: MRT4577_33236C.1
gggggggttttttttttttttttttttttttttttttttttttttttttttttttttttttttttttttttttttttttttttttttttttttttttttttttttttttttttttttttttaaaaaaaagacatgtccaaacccaaaaattggggcgtcggggggaaaacacaactcctattgggtaaaaaaaaaacccttttttttttgaaaatccccccaaaaaggcccaccccccaaggcttttaattatttaaaaattttgaccccccttgaaaaaaaaaaaaaagggcccccccccccatttaattttcccaccccaacagagggctttgggttttcccaaataaaggggaaatgtcgaaatgcgggtaaagctaaggctaaggctcaaactaaggttaaaccaaagggtaaaaaactttttccctaatttaagggaaaaaggtgccaaaaaccactttaacgggccccgctttttttaagggccccaccctccaaaacttgggggggaacttttcccccc

SEQ ID NO: 111567 - DNA, 378 bp, Zea mays
  Clone ID: MRT4577_33237C.1
aatagttgtgaaaaacatatacacacgggtgtctgcatatagcccttggaaacaaatacgacctatttccgacacacatggctaatactaacgttcaacgccccataatacacacacacttgactatgcaacgcaatgctatgcaaacacatgacatgcatctaacgccataaaaaaacacaggaacttgcactctctaaaatccaaatgcacacttaatatacatacatatcaccagcactactgaataattttacaacaaaggtcgtggcctaggacactgcatagcgcgttgaacgagatatcgatgtagcgcaagacaagctcttgacatgacattaccctgcaaccatggcttggatcttcaacctcaacata

SEQ ID NO: 111568 - DNA, 408 bp, Zea mays
  Clone ID: MRT4577_33238C.1
acaaatgcgggcccgtgtaatgcccccttttttttttttgggccaatccaaatcagaatttttcctgggaaagccaaatcacttgcccatgcaaatgccgagccttttccggccgatcacgggcagaaggggacttggtagttgctgttgcccccccatgcatgggtttttatgtgggggggggtgggggacccgttggggcatccaggggccgtgcccaccaaccccaccccggtgtttcaggaaaaggccctggggaggttttacccctccttgacccaaatgtcctaaaagtcctggctgccccccttggggaactcggccagggtcaggggggggtgcccccacagggtgcaggccaacgcgcccccccaatcgcctgtttgggagctccccctgttgcccttg

SEQ ID NO: 111569 - DNA, 338 bp, Zea mays
  Clone ID: MRT4577_33239C.1
gctcatttaacatttactgctgactataacacccgacattgcgcgcattattgtgtcaacggcacactataactctccgaaccacacgtatgtatagaccatcttaagagcgaggtagagttgaatgattgatctaatcactgattacctagatgtattatatcttacagctcggatttatacagagagataaacatgcttggttgcaaaattttggtataagaatccgccccattgaaaggacattacgatcgtagtcggtcaccagattcaacaagcttgaactcctacgatccacaggacgtggacccttgactcaaactattatcctaactaaa

SEQ ID NO: 111570 - DNA, 845 bp, Zea mays
  unsure (1)..(845): unsure at all n locations
  Clone ID: MRT4577_3323C.1
cattgggaccctcgaggccggccgggctatgcatctgtctgatcccattttccccaaaacaaaacgactcgttctttcccgggggaggggaggactggagaagcctggccagccatggacccgcccaaccctaaccccaacgatgccccgtcgctcccagccgaatccgcggccagactcgccgccctctccctttgtggcaccagggaccttcccccggacttccacacctccgagatcctcgacgacgacgagggctacctcacctccgcgtccagaggcgggagcagcacctccgcgtggaaggaggcgcccgagggactccacgacgatgacaaggatggggacgatgtctcccagcccagccccagaagcagcggatacgctggcgagcgcggaagcagccttgatgacgacgccgaccccgaccccgaccccgaccaggattgtgcgcgcggcaagaagcatccccacgaggtgagctcgttacagacctccgtcaatccccatcaacttgggcttcgcctcaagcggccgtggacctgccgctctcatgtttcaggacgatgcttcctcttcgtggaggaagaggaaaaaacatttcttcattctgagcaattctggcaagccaatatattccaggtatggggatgagcacaagctagccggattttctgctacgctgcaagcaatcatttcctttgtcgagaacagtggcgaccatatcaaatttgtgagagctggcaaacatcagatagttttccttgtngaggngccaatatatttagtttgtataagctgcacagaagagtcatatgaaggactgagggggcaactagagctca

SEQ ID NO: 111571 - DNA, 368 bp, Zea mays
  Clone ID: MRT4577_33240C.1
gtaatgtgatggcccagagcaggaggaaggggtccagtttttggaaggggacaacaaagtggaggaagtggaggagggtgaggaagttgattcttctgatgcaaccacagggtctgcagctgttttgggtaacagctgcaatgatcctaacgtggaggaagtggtggctgtcatggaggaacagttcacagagccccatgaaggaattgtgaaagagcaggaccctatcagtgttgatagatctgcttcagtggaagtcatggatgattcaccattcctaggtgtgattgagaagaaacacgatgcctcatttgaagattgtgaggacttggctgacttctaacctgcaagggaaatgactaatgaag

SEQ ID NO: 111572 - DNA, 462 bp, Zea mays
  Clone ID: MRT4577_33241C.1
ggccaaccagaaataagaagttacatttccagattctaatgtgaaaaaaaaaaaaaaaaaaaaaaaaaaaaaaaaaaaaaaaaaaaaaaaaaaaaaaaaaaaaaaaaaaaaaaaaaaaaaaaaaaaaaaaaaaaaaaaaaaaaaaaccaaaaaaaaaaaaaaaaaaaaaaaaaaaaggtttttcccttgggccgaaacccccctaaggggaatttttgaaaatttccaaaaaattgggggccgttagaccttaattttaaaggcccaaattccccttaaaggaagcggtttaaaaattaattggccgggttttaaaaaagcgggaattggaaaaaccttggggttcccaaattaaatccttttgaaaaaaatcccctttttacaagtgggtgaaaaaacaaaaaggccccaaccaatcccctttccaaaaagttgccaaccctaaatggaaatggaaccccc

SEQ ID NO: 111573 - DNA, 335 bp, Zea mays
  Clone ID: MRT4577_33242C.1
tggatccataaagcggccgcgcctttattttttttttttttcttttttaaaaaacacttcacccgattgtggttttcacccccccacacaaaaaggggccattattaaaagaacttggcgccccccccccaaaccccaaacaaacatttttatagacccacaggaaaacgttcccccaccaccgacgcaaagaaaaaccgccctcccaaaaaaacaacaaaagtaactagaagacagccaaaccaatgtttcccctagcacaccaacaacagaaggcataagaacgaaaggggaaagacccacaaaacaaaaccgatggtccctgtcttaccacc

SEQ ID NO: 111574 - DNA, 379 bp, Zea mays
  Clone ID: MRT4577_33243C.1
aaaaagtggttttttcggccatgttttttttttttttcggaaaacgcgggaccaaagcagagaaagttcaaacgtgggcttaacccgcgacaaaaaaccccgataccaggggggggggatggcaaaaaaaaaaaaaccccccccacgccccaaaggaaagtccggggtgaactgccggggagaaccccctaaaaaaaacaagccggggtcggcccaaaaaaaacccaccgggaggggccgtttttaaaaatgaacaatggaaagaccccattgcccccccaaaaaaaaaactgaggcagagggccttcttcttcaacaaaaaaagaaatggtgaaaaacaggccccccccaaaaagaaggaaaattcctaaaaggaggc

SEQ ID NO: 111575 - DNA, 413 bp, Zea mays
  Clone ID: MRT4577_33244C.1
ggcactgtaccacaaggattttacggtggagcagggtactataaatcctcctaatggatggaaggcatactatgcggctacaaaagccattattaaccttaatgcagagttctacaatattatcagggaagggtccttaccagcaatgagccgtttttggcttaatgcggactatgtcaagtgtattcatgcgactggggagttctgcactgggggagtgcatttagtggtgcttgatctattgcttggttagcatagatgttaggtctccttgctctgagtctaagggtggcctgggattgcgaaatggatggagtatgctataagagctgataggaagccctgctgagccttgttgtgggaaattttgagcattgcattggtggagaagcagagaaattttgagtcaacac

SEQ ID NO: 111576 - DNA, 163 bp, Zea mays
  Clone ID: MRT4577_33245C.1
cccaaaacagagcatctaaagacgatggagggggtccatatttttttattatcccctaaacctatcattaaatttaaattggcgaaaaatagtgcccaaagagaacttttttaacacttcacccctaaaccatactttttactacatgttagcaagcaatttc

SEQ ID NO: 111577 - DNA, 427 bp, Zea mays
  unsure (1)..(427): unsure at all n locations
  Clone ID: MRT4577_33246C.1
ccggactcccgggccagcacagacggccgaccacactgggctttcccgcaaacgcgcggcaaagaaaacccagctccaacttccgcagcccgaggatgaatagcaagggngggagcccacaggcagcaggcttggcagcctaccaacttacagagcgacccatgcaaagccaccgccaccagggctagtcaccgcaatggctgaacgcgcagagcgaggaagctctataaaatgacactgagcacaccagccacaagggacgaagcccacatgcacatgaaagcccgagcaggtccgggaccaaacacacgcatgaactacactggacaggaacgagcgcaagcacccacagaggacagagagacacacagggagtgatgctaggcccaaaatgcactatccaggtggcgagagcgaaagcaccact

SEQ ID NO: 111578 - DNA, 496 bp, Zea mays
  unsure (1)..(496): unsure at all n locations
  Clone ID: MRT4577_33247C.1
gcaggcgtaccagcactctgtctcgatagtcggcttatccatccgacctttacttttgccattccagagcgctgtcgaacaatgtggattttataaacattgacctctctgtagagatcccttcctattcatacttagaatatgcattggcgaccccgccaccttttaatcgcagatggtgtcacggcccctgaagatacactatatatgctgtgctagcgcggccggcgacgcctgaatggctcccctttgtgcagcgggcatactattgtgtcccgccggttcctggctcgctcggggtggcccagcttatcaactcgactattctcatcactatgtgcgccgacaccatgactgatgaggaggcttttagcttcactacagatgcgngccctgccattccctgcgatttttgttgcctgctcctactcaaaaagcaactgtgacaatctgaatgtcttctcatggcttgttgctttaacttatggtgatagac

SEQ ID NO: 111579 - DNA, 472 bp, Zea mays
  Clone ID: MRT4577_33248C.1
tttttattgagctaaatcacaactggcattaaaggttgaacataatgatcttacagcacatagcatgactaccatgcgcccagggcagcagctcttgcctacaccagacatgcactccatcatagaaaatgaataaccttctcaaaggatgcacagaatatggaagtgcttacaccagtacccgcaataaatacggaaggaaacgatgaggacatgacctaatagaacactttctatagaaacggtggtaacttgcacaacgcggacggccaagacctagtccatctcggcgactcaagaacatcatgcgacggcccttctgctgtcgcttgcggtgtgagcactgaacaccacctcagcaaaatgtatcttgatccaacatccatcagcgtgcatcattgcaaaacaccacaccttacataataaaaccgttttaacgacgatagaaaaagatacattaatatctattatg

SEQ ID NO: 111580 - DNA, 482 bp, Zea mays
  Clone ID: MRT4577_33249C.1
gccgacctgccgtcatcctacctgggtgcgcagttcagtgcgctccgtctgcctcagcggcaccgtacccatcggccatggactgcttaacggacgtgcctatcttaagctcgcgtcactacagaagcacatcggcccggacgtatggatcggaggatgtaacctgggtataccgtagcaacaatcttggaccctgccccaatgcatgtaaccctgcccaggaggtgggcaagaggtactacaacgggtgcaggaaactccatgcgacgggaaagaaccgacctgtcatcctgtacctgtaggccatttacagagacccatcgacgagggagaacagcattcctatcatagtgcgattgcttcactctagcttgtagagcgaagtactaccatcactaggtagaggcgcgactagcactatagcacatatgacggcgctgccgatgagctgcggtatggcttagagcacgagtacaccctct

SEQ ID NO: 111581 - DNA, 822 bp, Zea mays
  unsure (1)..(822): unsure at all n locations
  Clone ID: MRT4577_3324C.1
gtaccctccnggtccttccgggcatctataccaccaacaaagctagccaatgacacgttgggtctggttctaaatgttcgtgtttttactggtgttcgagggaaattgagtgtggtattggcagtgaggagacgaggctttgaaaaaaaaaatacagggactagggtagataactaaatcaatgtgttgaggatctgaacaagcagtggaccacagataagagcacactgagatgattctcccccttgtttaatgaacatgacattggacaaaaatgtaggagtaactaggaatttgacctcagccattcatatgcacaatctctcttttcttacataataactggtatagaagctaaaagcattgcagcttaaatgtgggtctcttcttgacaggaacatacatatgtgactttgcttactacacgatcagatgctttttatgatctcaaagattccagggcccacattcaaaatgctcttttaaagtcaaatgtcctcatcgaagtccaaagatctttacatgagaatngcattgcgtgttgagggatctcccaaccaacccgtcttctcaatctgcatcacaccctccagagtcctctcaagacattagttcacaatctttgtcttctgaaatggcaattggaggaccaggtggactatggcattntatatataaaagcatttaccttgaccagttttgtgtcatcagaatttccctcacccataagtaacaaaaagcagaagaaggggattgtacaaagcttaccanaaattgtatgcatccatgcatgataaagcaactggtccaccccaaaactca

SEQ ID NO: 111582 - DNA, 425 bp, Zea mays
  Clone ID: MRT4577_33250C.1
cttcacgtacctgaacgacccggagtatacacggagctcgccactaatgtgagggaaatattgactatccttggttgttttttgacatttaaaaataatcgtacaagaagaaacaaatgccaaacttgttgtttcactgcagtttaactcacaggttggagctgaggggggaaaaaaccaatctcagcgccgactctgaagggcaggctgaagccatcccgttcgaataaatactgataccagtggaggtgaagtgaacctcattgtcactgccagacgacatgatcccaactcatgtattgatgtgtgggtgcagcggccctaacctgttcccggtcaccagggccgtacttatcttcgccgacgaggtcagcagcggccagctccgtcccgtcggtggttactgcctagctatcgtcaagaac

SEQ ID NO: 111583 - DNA, 258 bp, Zea mays
  Clone ID: MRT4577_33251C.1
attcggctcgaggcctgaacaatttttttgctgcggtagccgcgcctccgatccctacggcacgaacggagtcatgggtggccgctggcgctactgccacgccgaggaatgctcccgcggccttcgctggggggaaggcccagccgcggcgctccggcggatcatcacgacccctgctgcgcaccaggcgccccgccggttggacgagctcggcacgcgccaccaggagcgcgcgggagtatgccatacacgatcaag

SEQ ID NO: 111584 - DNA, 324 bp, Zea mays
  Clone ID: MRT4577_33252C.1
atcatagtagtaacggctactgttaatgaacaacccaacgagcagaatcgatcgccataaggagcagcagcacccccagaagcaaacggatcagctgaagcagcaccaccagggggcgccggctgatccgagaagcggaactcacggccgaacccaagggactgctgcaatgtccgggcaaacgccagaaacttgcagataccagcagcactagacactaccccgagcatactatatggcccgcctagaagtgaggggccctgaccaaagcaatctcatccagggggagtaccaccaccgccggaggcaaggccctgccccggc

SEQ ID NO: 111585 - DNA, 521 bp, Zea mays
  Clone ID: MRT4577_33253C.1
cccctcctcgagttttttttttttttttttttttttttttttttttttttttttttttttttttttttttttttttttttttttttttttttttttttttaaaaaggggggggccacaattaacatgggggcctggcaaaaccataatattacgggtgggggagggaagggctttttttttgccaaaaaatagggtcacaacaagggttcccccaaagaaaaaaaaaaaccggtcccaggggggccccccaaagggcctccattaccaacataaattttaaaaatacctttccaaaaccccagattttttggcccatttttaaaaacccccctttttcccttttttgaaaaagtttttttaagggccgccattttgggggctaagggttggaacaattttaaaacccggccccttgccccatttggtgttcgcgccagggaaaaaaaacaaactgccttgggaaatggctaaaaccccctttttttttcctaaaaaccaaagcggaaaaaaattggtggtt

SEQ ID NO: 111586 - DNA, 1485 bp, Zea mays
  Clone ID: MRT4577_33254C.1
gccgggagggcacacgagcaacgccaacgccaacccaacccaaccctaacccgatctcaccgaggacacacagacacccagaccaccggagcggaccaagtacgagcatgggcggcgccgcggaggaggcgttgcggcgggagtacgtggtcggcgaggagatcgggcgcggccggttcgggacggtccgccgctgctacgccgccgccacgggggagccgttcgcgctcaagacgacgcccaaggcggcgctgcgggcggacccgctggacctggcgctggcggagcaggagcccaaggtgcaccacctggcgtctgccgccagccgccacgtggtcgcgctgcacgccgccttcgtggacgccgacgccgtgcacctggtgctggacctgtgcgcgggcggggacctgttcgcgctcgtctccgcgcggggcgcgctcccggagcccgaggcggcggagctgatggcgcagctcgccgacgcgctcgccggctgccaccgccgcggggtcgcgcaccgcgacgtcaagcccgacaacctcctcttcgacgccgccgccggcggcgcgctcaggctcggggacttcggctccgccgcctggttcggggacggcaggcccatgacggggctggtcgggacgccctactacgtcgcgcccgaggtggtggccggcagggagtacaccgagaaggtggacgtctggagcgccggggtcgtgctctacatgatgctctccgggaccgtgcccttctccggcgccaccgcgggggagatcttccaggccgtgctccgcgggaacctgcgcttccctccgcgcgccttcgccgccgtctcgcccgaggccaaggacctcctgcgccgcatgctctgcagggacgtctggcgcaggctctccgccgagcaagtcctgagtcacccatggattgtgactcgcggcggaagtgtgcctggcggtagactggtttagatgctccgcgccgcatccgatgaatctccatccgaagtgtacatagtggcgtcctccatccaatccaagaggagtagagaaggaccttttgctgttgatctcttcgctatggttctggcaaatgatcgtgaatttggacactagtgctgtagttggttaccagtagcacgcagaaagaagtaatcgttaggctaagcagggatttaggagggctgcctcttcctgggtttgctctgttctgcagtaatcctgtgctcgtcttgtttgcattgcaatttgcaacccaaacccatgtatgtgtatagcacagccttcttatggctgaggaagagacgactagctctgttcaggagaaaatgcttccgggttcactgtgactgtgagtttctactgtgttggaaccttgaatgaaatatacatcctgaatgtgttaggcttcaaaaaaaaaaaaaaaagggcggccgccgactagtgagctcgtcgacccgggaattaattccggaccggtacctgcagg

SEQ ID NO: 111587 - DNA, 430 bp, Zea mays
  Clone ID: MRT4577_33255C.1
gcgcttcgcgacgcgtgtcgacgcttttgtctgtgctgctcgtgttttctttattctcggtccactgggctcgctgcgtggggggcggggggaactggtggaatccctcccgctttcctcgctttgatcgccttgccccccttcccccctttgcgcctgttggcggtaatggcccaggcggcccccccctttcgaccctttccaacagtctggctggctgatgggccacgggctcgcgccgtgtattgggcccttagggtctgggggtttggcgcttcctctccggttcacttgtccgctccctagcgccctatccttcgccttttttgctttctttcctcgccttgttggcccgttttcccggtttacctgtaaagctgtggctccgtggctggttttggggttgcgctttacggctcctcggcccctc

SEQ ID NO: 111588 - DNA, 235 bp, Zea mays
  Clone ID: MRT4577_33256C.1
catccttgctctctttgcccgatttatacgcacatcacattctcgaattattccacaatactcaattgctgctaatgcaaatcacgtacaatttatactagcaatgacttactactgctttgaaactctatctattcaagcctaccttctaaaactggcacttacagacagcacattacgactatcgaatggccaaatgcaacaacaattcttggccaattttacaaatgaagca

SEQ ID NO: 111589 - DNA, 932 bp, Zea mays
  Clone ID: MRT4577_33257C.1
tttttttttttttttttcgtaatacatttgataccacacattggagatagagcggaagacatttacaaagtatactttacattccagaactcaagttttaaatggtagaaagagatgtatttattacaagtcctgatagtactcgaagtgcataacttattacaataattggaagggtgaagcctttccataagatatatacataaacattctaagcttcaagtcatccacatgaagtaactaacccaaagataagggaataaaacttctccttattgcagaagaagatcctgaaacccttctactctggtaagtagttagataaaactccaccattaggtattcagataccggagcaaatttctcttcgatgtacacttctttacggagcttggagatggcagtggcttcaagtggggggatgttggtgctgctgcagcttgaggaggggaggcgtgagggacaggcgtgcgaagtcgcagcgaggacggcgcgtgctggtggagctcacagcagcgcgcgacggcacggtggcgcaggatgcctaggcaagaccgagcgggcgcgggcgccacggcggggtgaagatggcacaagaccaggcgcggctaggaaccaaagcctagacgcgagagggaggtgacggcacaggacgctgctccgcaggaaagcgatgccgagagggctggagctgctccagcgaactgctgctacatcttcgagtgtcggtggagaagagaggggaaagcgccgagcgttgatgggcaaggtgacaccgccacgacgattgcgaagctagcagcaagacgacagtagttcctggtgaggacaaggaagaacgagacaactctaacgcccaagatctgaagacaagaccgctagcttatacaatagggagggcgacgtgggagggacgggctcccggcccggcc

SEQ ID NO: 111590 - DNA, 748 bp, Zea mays
  Clone ID: MRT4577_33258C.1
cggggtgtgcagacacgcgggctacgtggactggcccatcagcgctttcccctctcttctccatcgacacttgaagctgtagcagcagttcgctggagcagctccagccctctcggcatcgctttcctgtggcagcagcgtcctgtgccatcacctccctctcgcgtctaggctttggttcctagccgcgcatggtcttgtgccatcttcaccccgccgtggcgcccgtgcccgctcggtcttgtatgggcatcctgcaccaccgtgccgtcgtgcgctgctgtgagctccaccagcacgcgtcgtcctcgctgcgacttcgcacgcatgtccctcatgcatcccctcctcaagctgcagcagcaccagcgtcaagccgctgccatctccgagctccgtgaagaagtgtacatcaaagagaaatttgctacggtacctgaatacccagtggtggagtttcatctaactacttaccagagtagaagaattttgggatcttctattgcaataaggcaagccccggtgcatttactaccttccttgtatttataaaatttttatcacttatatgatgcattaggtgataggagttaattgattaaacacttgatgcattaccattccttgaaagaattgattaccataccttgtcacctgttttataaaagctagagatgctcaatcatgcagatagattaaaaaaatgtttttgatctatgactcaaaaaaggaaaaaaaaaaaaaaaaa

SEQ ID NO: 111591 - DNA, 355 bp, Zea mays
  Clone ID: MRT4577_33259C.1
atttttcgtgcattcagaaacacaccgcgtgaagcacattcgcaacatcctaacaacagtggctaccaagatattatcccttcttgcgcttctcgcgctttcagagagcgcaacaaatgctcttattattccacaatgctcacttgctccaagttacattattacacagcttctcacaccagctactttagtggcattgatacaccctgttgagcgagctattaatactcaacaagcatttgcagtgagctgttttacaacaacctattttgcagctgactccacgatgctgggcatatcatacaatacataacatggcaacgtaacagagacaacaattgctaccagctctgtg

SEQ ID NO: 111592 - DNA, 630 bp, Zea mays
  Clone ID: MRT4577_3325C.1
cggacttcaacttcgtcctagctccactccgacgaaaacactccctcctagacatggccttctactatgtgagaggattgcctgcgatgctagatcgccttgtcatacggctcgacaggcactcgacgacgacatgatcgagaccaccggataacacaccacatgcttgcactatcacaacctgacaggatgagcgcgaacgtacgcgacgacttaaatgtcacatacatgatggcccgctcgcttctgcgaatacgaatcgggtatgcgatgatcccggaaatctagacaaatatagtcagtacttcatgggtaatcgctacgaacttgccgaccaacggtgaaacactcataggactgtcccttatggcggtggcccaggatgactcttctacactcagaatgcactgtgtccgtgactgtgacaaattaccatgatactggatgctatagaggacgaaactgtccatgatgacacgcatcatgaggacctttgaagcatgcatatatgcatactacactcccatgaacgaatgcaaatccgacctgcttctacgtgacgctgatccagctaacctgaagactacctatgagactactgcgacctgacatgtgtgaagctactgcagg

SEQ ID NO: 111593 - DNA, 1513 bp, Zea mays
  Clone ID: MRT4577_33260C.1
cattgggtaccgcacgagaatcgaggccggccgggacaacgttacaaggacgcatcgaggagactacctacggccatggcgaggagaaggcttctcgcgctcgcctcccggctctacgggaggcctcaggcgacgcagccgtggcggcgacccccgccccggtttctctcctcagctgcgtccggcaccctcgatcacctgaagtcgccgcctttcgcgcgtccggctgcccggaaccccgcctcctatccatgggatcgattcggaggagggcagaagaggaccatgttcatccagacacagtcgaccccgaacccgcagtcactcatgttctatcctggaaagccagttatggagattgggagctctgatttccctaatgctcggactgcgatgacatcccctttggctaagtcgctttttgctattgatggagtaaccagggtattctttggatctgattttgtaactgttacaaaatcagaagaaacttcctgggattgcctcaaacctgaggtttttgctgcaataatggacttctactcatctgggcaaccactttttctggactcaaatgctgcagcttctatggacacagcaattcacgaggatgattctgaaatagttgccatgataaaagaattattggagactcgtattcgaccagctgttcaagatgacggcggtgacattgaataccgaggattcgacccagaaacaggaacagttaagcttaaaatgcaaggtgcctgcagcggctgtccaagttcgtcagtcacattgaagtctgggatagaaaacatgcttatgcactatgtgcctgacagtcacattgaagtctgggatagaaaacatgcttatgcactatgtgcctgaggtgaaaggagtagaacaggagttcgatggtgatgaggaagctgaagtggctggatagatcgagagagtttttacaggttttgagggtcaacacagcctgatgttatagcaacttcgcacgtacggtattgccgatcctgatgtatgcaggaggcaggcttagatagcagaggcgtcaatagtctgaaataacatccgttgcactagtatccgaataaagtgacagtgaattgattttttattttaaaaaaaaaaaaaaaaaaaaaaaaaaaaaaaaaaaaaatgaaaagaaaaaaaaaaaaaaaaaacggatactggaaattttaaaggctttgttcggctgcattcggatcggagggctagaatggctgtcatttggggaaatcagttcctactgcaattgttctttatgatgggtttccttgttccgttggttttatctcaaggctttgttcggttgcattcggatcggaggggatcgatgaggattaaacccccttatattcaattttgactagcaatagatttaatcccttccaacccctttcaattcaccttagccttgtttggaagcaagggtatttgatggaattgaggggcgctagaatctcttactattcaattttgattagtaagg

SEQ ID NO: 111594 - DNA, 693 bp, Zea mays
  Clone ID: MRT4577_33261C.1
gttacaaaatcagaagaaacttcctgggattgcctcaaacctgaggtttttgctgcaataatggacttctactcatctgggcaaccactttttctggactcaaatgctgcagcttctatggacacagcaattcacgaggatgattctgaaatagttgccatgataaaagaattattggagactcgtattcgaccagctgttcaagatgacggcggtgacattgaataccgaggattcgacccagaaacaggaacagttaagcttaaaatgcaaggtgcctgcagcggctgtccaagttcgtcagtcacattgaagtctgggatagaaaacatgcttatgcactatgtgcctgagtttgtcatgctacttttgaaacaggtgaaaggagtagaacaggagttcgatggtgatgaggaagctgaagtggctggatagatcgagagagtttttacaggttttgagggtcaacacagcctgatgttatagcaacttcgcacgtacggtattgccgatcctgatgtatgcaggaggcaggcttagatagcagaggcgtcaatagtctgaaataacatccgttgcactagtatccgaataaagtgacagtgaattgattttttattttcattaaatttgctgtgtgatatgtgagttcaacgcggcaatgagcagtaacatacccgtgcaccttcgtat

SEQ ID NO: 111595 - DNA, 1179 bp, Zea mays
  Clone ID: MRT4577_33262C.1
agaggcaaagaatggcgatggcgtggaggagggccctcgcgctcgtgtcccagctcctccagaggcgggttctccccgcgccgcgcttcctctcgtcggcggccggcggcgctctagaccgcctcaattcgccgcccttcgcgcgcccggccgcgcccaggaatcccgcacccccttccccatgggatcggctcggagggcagaagaggaccatgttcatccagacgcagtcgacccccaacccgcagtcgctcatgttccatcctggaaagccagttatggaagttgggagctctgatttccctaatgctcggactgccatgacatctcctttggcgaaggcgctgtttgcgatagaaggagttacaagagtattctttggatctgattttgtaactgttacaaaatcagaagagacttcctgggattgcctcaaacctgaggtttttgctgcaataatggacttctactcatctgggcaaccactttttctggactcaaatgctgcagcttctatggacacagcaattcacgaggatgattctgaaatagttgccatgataaaagaattattggagactcgtattcgaccagctgttcaagatgacggcggtgacattgaataccgaggattcgacccagaaacaggaacagttaagcttaaaatgcaaggtgcctgcagcggctgtccaagttcgtcagtcacattgaagtctgggatagaaaacatgcttatgcactatgtgcctgaggtgaaaggagtagaacaggagttcgatggtgatgaggaagctgaagtggctggatagatcgagagagtttttacaggttttgagggtcaacacagcctgatgttatagcaacttcgcacgtacggtattgccgatcctgatgtatgcaggaggcaggcttagatagcagaggcgtcaatagtctgaaataacatccgttgcactagtatccgaataaagtgacagtgaattgattttttattttcattaaatttctgtgtatatgtgagttaaacacggcaatgagcagtaaaaacccgtgtacctgcggatactggacctggtggtgcggacatgggcgtcatcttgtgcccaccggcatgggtacagaattgtacccaacaggacgaaggtagacggtaaaaaaatagcaaacccgtatccattt

SEQ ID NO: 111596 - DNA, 590 bp, Zea mays
  Clone ID: MRT4577_33263C.1
ctgtgcggcgctcgaggcggccggttttcaacacggggcgttcttctccgtcctttcgctccattcctccactgctaggcgttaatggcgtaaacagctatagctcatcttcttggccgttttctatgcgaggtttaatgcccgtttggtcactacgacttccccccaggcccccattgaagaagcttgctacactctgctccgcaaagagagagacctgatcttcttggcgtcggtgcttaatttggattcttgcaagtgggtggcgtctcgcgttcttgcgggcttgtgcttctttaatgcgctgacgcttcttgtcctgaattgccgttgcgttttttggatacgaattgccggacgttcttgcgcgtttctgcggtaggatcaggaggctggtggtcgccggcgcagcgtctgcgaggcggcatccgaggccgagggtaccactgcacggattccccggtggccccgaggcgttcgagctcgtcgcgaggttctgctacgctgacggcggacgcggcggggcggtgaccgcggccaacgcgtgcgcgctgcggtgcgcggcggagttcctggacatggcggcggcc

SEQ ID NO: 111597 - DNA, 489 bp, Zea mays
  Clone ID: MRT4577_33264C.1
atggctgcgctgggcagagttgtgccaccgatgatcaaggacgagggcctcaacatagagagcttcatcaagaaagtccaaccaacgatgatggatggtatgatgacctttaccatgagaagggatgaagcttacaggtattttgagatgactaggggcttcggagaaagactccaccacaggcatgtcagaacaatccacaatcccaaaacaaacgatgacagggcaaatcacacccagagcaaacttcctataggccctagccccaagaggaagaggaaggagaagcttcagaggaagcaacccacgacatcagttgcttcggcaagtcattcacaagatgcatgggctcagttaccaccaccaagaccattggcgcctactttggttcataatcagcaggcagaagggcatcgccaggcgcaacaacaacgtgatactcgggaggattccgaagctcgcatagtcaatagcactgtgcccgagtaa

SEQ ID NO: 111598 - DNA, 620 bp, Zea mays
  Clone ID: MRT4577_33265C.1
atctcgagtcatcttcttcctctgctcctgctcggatcccataccctgctcctcaacccccttcgcggcgcggcgcggcgcggcacagcacagaggagtcggcggagatgtcgggagtgacggcggacgaggacaagaagcccgcgggcgacggtggaggcgcccacatcaacctcaaggtcaaggggcaggatggcaatgaggttttcttccgcatcaagagatccacacagctgaagaagctgatgaacgcttactgcgaccgtcagtctgtggatctcaactccattgctttcctttttgatggtcgtaggctccgtggtgagcagacccctgatgagcttgagatggaggaaggcgacgagatcgacgccatgcttcaccagaccggagggtgctttcctggcccttagaaggagcttgctgcagcctggctgttctatgtcgtatgctacctttagaactagagtaaaatgtaagaagtgaaagaacttgtgaggctatggttctgtgccatagcctgagggggggtctggaggtgaaacaacatcggagtactgttgatgtcgtgactgaactatcatccattgcctagtatatcatgccttgttgtgttcccg

SEQ ID NO: 111599 - DNA, 485 bp, Zea mays
  Clone ID: MRT4577_33266C.1
aaaaaggggtccattattaaaaaaacgggccaggccccctttctttggttttgggcagaaaacccaaaccggggggggggggctttactctttgaaggggaaggcctaaaaacccctggggaaaaaaacaaccggaaacgcccccccccccgctcgttcacaaacaggagggcccactacggggggggccggtcccccaaaggggggaccggcgccgaaacccccccggggggcaagagcttgaagaacagctcctttttcgggagaaaccccccgcgggaaaagagcaccccgccggatccaggggccttaataagggccacgggcggggcccccacgggccacaaaaaggaggggcccacggggctgacagggaaaacggccggggttccagcgacggggggcctgggggccatgtttttccccgggtccttggggggaccgaactttgggccgggggactcacggacttggggttaaggggg

SEQ ID NO: 111600 - DNA, 1052 bp, Zea mays
  Clone ID: MRT4577_33267C.1
cccctcctcccaacccaaacccaacacaattcccccgtgttgcctacacgcactggccacgaccaaaccctaggcgccgccgcctccggggccctcagggctgtcatacggggaaggaggaggatatcggtgaggagagaaggggatttatgtcccagcgaggtgacaggggcgaggggcacgccaggagacccggccggtccagcagcttcggcggccaccgcggaggcggagtcggcggcgcgggcaagggcggcgcgggatcctcaggccagcctcctctttctaccaaccgcagctttaggaagcccggcaatggccacggcgggcagcagagggtggtgaaccagcccgacacaaccggtttccaacctgcccccgcgcctgccccccaccaaactcctgcgcgaccgccacctgcacctcagaatgcggctgtgcatgttcccatatccgcaccatggccgcaacctcaaggtccacaagtgtcatcttcatcagctgccagcgacaggccggctaatccgccattacctaaagctactcatgctgctccaagggctccaccaaaaagctctaacccaccccttcctcagggaggatcgaaaggggaaccaccaaaggggtttaactttcagtttggtagtataaatatgaatgggctgccgcaatttcctgccaggacaagctcagctcctccaaacttggatgaacaaaaacgtaatcaggtgcttgtggaggaacttaaggttacacctacccctgtgcaaccaactccaaaacagcagctgttgcagcagcatccgcatccgctgcagaagcaacagcatcagctgccgcagctgtcgcatcagccacagcagccacagcagcagtcaacaagaaaggaaactgttggttccagccaacctaactccatcaatccccatactacatcacaactgaaaagagatgtgcacccatctccgtcggtccccaatgttacatctgttagacctaccgttcaacaaatgcctggtgttcagatgccgatcccctttcaccaccagccg

SEQ ID NO: 111601 - DNA, 824 bp, Zea mays
  Clone ID: MRT4577_33268C.1
cgctcgaggggccggccgggcccgggatcaacaaaccaacccaaccagcaatagccaccccaatccatccagctcctccaagctcagtgtccgagctcagctcagctacccacacttcactcagtagcagctaccggtagcgagaaagaaagatcgatagtgcgacgtgcgcgatgacgacggtggcgataggcattctggccatggcgtgcctcgtggcggtggcgcggggcggcaacttcttccaggactccgagatgacctggggggacggccgcggcaaggtcgtcgacggcggccgcgggctcgacctcacgctcgacaagacctccggctccggcttccagtccaagaccgagtacctcttcggcaagatcgacatgcagatcaagctcgtccccggcaactccgccggcaccgtcaccaccttctacctgtcgtcgcaggggacggcgcacgacgagatcgacttcgagttcctgggcaacgtcaccggcgagccctacacgctgcacaccaacgtgttcgcgaaagggcaggggcagcgggagcagcagttccgcctctggttcgaccccaccaaggccttccacacctactccatcatctggaacccgcagcacgtcatattcgcggtggacggcacggcgatcagggacttcaagaaccacgaggcgcgcggcgtgtcgttccccaagagccagccgatgcggctgtacgcgagcctgtggaacgccgacgactgggccacgcagggcggccgggtcaagaccgactggaagcaggcgccgttcgtcgcctccttccgcaacttcaacgccgac

SEQ ID NO: 111602 - DNA, 1214 bp, Zea mays
  Clone ID: MRT4577_33269C.1
ggaaactggagcacgacatatgctccctcttcgttctacatgacctcaaagatgagatctgggtacctcgaaggatacgagtactccatcttcgacctgacgagacctgacagggtgcaaattcagatttatggcaattcagtacagggacggatacttgacggcgactcaccgacggagctgctcaccagctacacggagtcaaccggaaggaaaaaggttcaaaaaaaatggatcacgtccggcgccgtcgtcggcatgcagggtggcacagacgccgtccgcagagtttggggccagctcaaggactacgacgtccctgtctctgcgttctggctacaggattgggttggccagaggaagacggcgatcgggtctcagctctggtggaacttggagctcgatgacgcccactacaatgggtggaaggatctagtagacgacctccgcagccacggcatccggacgatggcttactgcaacccttgcctcgtgccgatggacgagaagcccagcgcgaagaggcacctgttcgaggaagccaggaagctgggcatcctggtgagggacgacgccggcgagccgtacatgatgcccaacacggcgttcgacgtcgccatgctcgacctcaccaacccggcagcgcacgcgtggttcaagagcaccgtcctgcgggggatggtggaccgcggcgtcagcggctggatggccgacttcggcgagggcctgcccctggacgcgcggctgcactcgggcgaggaccccgtcgccgcgcacaaccggtaccccggagctgtgggcgcgcgtcaaccgcgagatcgctgacgagtggagagccagccgccgccgtgccgcggcggagggcaacgacgtcgtcgtcgacgacaacgacggcctggtgttcttcgtgcggtcggggttccgggagagctcccgctgggcgatgctgttctgggagggcgaccagatggtgagctggcaggcgaacgacggcatcaagagcagcgtggtgggcctcctcagcggctgcctctcggggttcccgctcaaccacagcgacgccggcggctactgcacggtggacctgccgccgttcctgcgctaccgccggagcgaggagctcctgatgcgctggatggaggtgaacgccttcacggtcgtgctccgcacccacgagggcaacaggccggtctccaactgccagttctactcca

SEQ ID NO: 111603 - DNA, 195 bp, Zea mays
  Clone ID: MRT4577_3326C.1
agggtgataggggcctctttcgatttatgtttttgccaggaggccatcttacgaccgagagccatggagcgagaagaaggaggacctcgcatagacatgcacataccagactaaactgatactctgcggcttgaagacacatacgtaccatgattcgatatcccacactgaagaattccaacctaacgcccagca

SEQ ID NO: 111604 - DNA, 1931 bp, Zea mays
  unsure (1)..(1931): unsure at all n locations
  Clone ID: MRT4577_33270C.1
agatcgctgtttttcctctcgctcctcctgtgggcggcgccgccgctgcgcacagaacacatcctcaccagcgtagcttctccggcgtccggccaacgcgctcactagcctcccgccttcctccacatctcctcgcctccaccccatccagttcgtgccattcgctgctccaagacaagggcatggcgctcggcggctgcggcaacgaagctgatggtgcacgagccaaccatgaaggcagtagcacggggcagcgacagcagcatggagggcgtcctcttgtttgggaaggtaatggaactgcaaataggagtggcagcggcgaccaggatgcaaatggaagtggttcccaaagaccttggaaagaaatggcacgtgagcaaaggatatcaagaagcttttggatgttgggaagcttggagctgatgcttcaaataagctgatggttgtcttttggctgtactggactatttaaactttgaactatgctgtgatggttgaactgatgctggacggttaagggtttatgtcagaggcaactttataactaatgtgtgcctgttatgttggactgttaagggttatgtgggaggcaattttataactaatgtgtgtctgctaaaaannnnnnnnnnnnnnnnnnnnnnnnnnnnnntcaaccagccaagagcagccagccattccaatctatcacaccatccaccaagctcagctcagctcagctaccacacttgactaggtagcagctagtgagaaagaaagatcgttggagcgcaagatgagggcggcggcgctcggcattgtggccatggcctgcctcgtggcggtggcgcggggcggcaacttcatccaggactccgagatgacctggggggacggccgcgggaaggtcgtcgacggcggccgcgggctcgacctcacgctcgacaagacctccggctccggcttccagtccaagagcgagtacctgttcggcaagattgacatgcagatcaagctcgtccccggcaactccgccggcaccgtcaccaccttctacctgtcgtcgcaggggacggcgcacgacgagatcgacttcgagttcctgggcaacgtgaccggcgagccttacacgctgcacaccaacgtgttcgcgcaggggcaggggcagcgggagcagcagttccgcctctggttcgaccccaccaaggccttccacacctactccatcatctggaacccgcagcacgtcatattcgcggtggacggcacggcgatcagggacttcaagaaccacgaggcgcgcggcgtgtcgttccccaagagccagccgatgcggctgtacgcgagcctgtggaacgcggacgactgggccacgcgcggcgggctggagaagacggactgggccaaggcgccgttcgtgtcgtccttccgcgacttcgccgccgacgcctgcgcctggccgccaacgcccgccgggggcgccccgtccccgccgacgcccgcgtgcgccgccgccacgggggacagctggtgggaccagccccccgcgtgggcgctggacgccggccagcgcctggacaacgcctgggtggcaaggaacctcctcgtctacgactactgcgacgaccgcaagcgcttcccgacgccgcccgaggagtgcgcgctccgggccgccgcgaccgcatcgtgatcatactatactattggattggttcgtgcatgatgatgagatgaatttttttggtttgtttgttggtgcgtaaaaccgggctgattgttgggggtggggggatggagaaaggccgtatgcgtacattgtgtgtgggcgcatggacagtccggaccgatggttgtggcgttggaacggaccatgtcggccattcttttgatacaaggatacgaggaatggattcagttttgtaccaccaaaaaaaaaaaaaaaaaaaaaa

SEQ ID NO: 111605 - DNA, 752 bp, Zea mays
  unsure (1)..(752): unsure at all n locations
  Clone ID: MRT4577_33271C.1
aattcggcacgaggaactcccagcccgtcgccggcgctgccttcctctaccgtctctctcatccatccctctctgccctcctcctatgcccccctccccaatgcctccgcggcggagctccgccaagcgacaagatttgtcccccctcccctgccaacgcctccgttgagcatcggacgcgaatctcctcaccgtccgcagcttgttcggccgtcgactacgtcccctcccgggactcatactagtggggaaatcatgatgtccgaactactagtcggtggctaaatgttgtgtgatcatcttgttttgtattgatcagggtgtctgacgatgtatttgaagcacctcaacaaaagctggagtgaatttgaaccactaaataattagaaaggtcaccctgctgcttgatgtctccctcatgtaacaccttaacgtttcttctttgcccctcccctgttttcttttgcttcccctgcaacctgtcagacaccgatcaagcaggtagcatgtagcctatgtaatccctggtcttttaggtctggcaccattcataccctttcccaaacgtaaaataaggtgggattgcacttgcacctaggagtggtaatgacctctaaattttatactataaaatttaagaatcggatcgggctctatttctattcatttttgaactaaaactaattaagggctcanacaaattgtgaaggaaacatgtggatcattcatttgagggctcaaacaaaaaatca

SEQ ID NO: 111606 - DNA, 323 bp, Zea mays
  Clone ID: MRT4577_33272C.1
aattaggtgccaacaagactggcgacagacatgtagtacaactcagcatctgagcttcgctatccaaaaatagcccgcagaccgaatgttggcggaacaaatgatcattaatatattaccaaacaaactggatatctggtgatgcgagattaaccacaggttcacagccaatgacaggataattcttactacagagggttcacaaaacactacttaatttccggggccttccttttacacctttgcagcacccagctgattggcacccttatttggtctagccttgctattgaacggtttctcggggggtttctttttcacac

SEQ ID NO: 111607 - DNA, 298 bp, Zea mays
  Clone ID: MRT4577_33273C.1
atacccagcccgacccacgcatacgcccgcgcgtaattctcatacattttccctttctaaaaaaaaaggactcttaagggcactttaaaatttaaaaagggacaggcccagctaccgttcacaatctataaccttactcgactctcaagctcctaacgtcactattattaacaaattgaagcatactattgcctgtgagaaaattcaacgtgtcatacctggaataaatatctcacatccacataaatgttattcatataacatccaacatgaaaacactatattatcccataatata

SEQ ID NO: 111608 - DNA, 175 bp, Zea mays
  Clone ID: MRT4577_33274C.1
gcgcgattcgctcgctcgatcctagcttcccttcttcgaatcgcaacacaccatggccattgacacgcgagcctgcgccgtcacgcgccatctgctggccaccgcctgggcgccatcggccaaactccgttcacatatctctcagctcgcgctaccgtaatcctgctaaatgctt

SEQ ID NO: 111609 - DNA, 288 bp, Zea mays
  Clone ID: MRT4577_33275C.1
ttatcctatacagttaacccactcttccctttttttattcttctcctaccataactctgggtgagttttatatatgagggggggcggtcttcaacatacttgttttcttttaatacacatttctttttttatcggtttcactattgtctctttttcagcatttttcaattcttcacagctcatttctaccaatctttttattgtttatctttactgctgtgattttttacttaaactaattcaaatcatttatcatcctttctatattttttcttgattctataactt

SEQ ID NO: 111610 - DNA, 387 bp, Zea mays
  Clone ID: MRT4577_33276C.1
gggcggctctctttatccttctagggattttcctgatactaacatcaacatcgtattggcgcaagatgactacaaaagcaatcattcagcttctgttctttgctttggtttttgccacatttacggcgcatggggcttggtgagagaagggttgctactatgaaaaagaaaggttcaagcgtgaatgcagcacaagctatgagcgttcaagtaagtcttgttgcgacactgtgcggtcggtcgacatgtcctgtgttcgccgtaccatgacctcctatgaggatacggtattaattgttcaaaagatctcttttctttcaatggcttgcaacaactcattgcgagtcgtcgggaaaaaatacggagatattcctaaacgaccaatgt

SEQ ID NO: 111611 - DNA, 588 bp, Zea mays
  unsure (1)..(588): unsure at all n locations
  Clone ID: MRT4577_33277C.1
ccgtctttctcacctacttcatggcgctgtttgatttgatggttgatggaacgaccgggggtttactctactactggtttttttcccttgctggcgctgtacttttctcgtcgtttcttcttgggctagctagcttccctccctcggcctcgtacgacgcccctccgctcatcttttccgaggaggcctatgccattaggggaagtaccaccacatttttttaactccctttccggcaaggactggatttaatttactgtgccattcatgaatcatcccccccccccctggaatatggcagcgcgcggcatcgtcactcgtcaggagcaggaatctaccggacggaggatccgtagttccctccaaggtgtttctgaccagatctatttctatttattactagtaccactgctcagttcttcccctaccgnactctgtctctttcttgggctcttctttcctttccaggcttactgttaggctcgagagccgatccatatacggcgccgcgtgtgtcagggataagatgagctcancagaagcananaggaggaggaggtgaggaaagagcaaggaaaggcacagtac

SEQ ID NO: 111612 - DNA, 194 bp, Zea mays
  Clone ID: MRT4577_33278C.1
tcggaaacacaggtgctgtactcctgtgctcgcccacacctgcattgatctttgtgttcaaggatcacgcccctacgcgtgttcgacgatgacgaagagacacgacggatactcacctgggcttgctggatatctaggtcatgttgtagctgcgggtacttggtctataataatggcccattctctggactaca

SEQ ID NO: 111613 - DNA, 2180 bp, Zea mays
  Clone ID: MRT4577_33279C.1
atctggttggggttgtgtctgaggagaactccttgacctattggacatagccatgtcatcaaacactgctgaaacagtcaaccatcgagagagctgatggattctggtgttgatccaatggcattaatgtcacaattagctgggctcataatggacatcattgctgggacctatagattggcagaccctacatccggccgcgtgggaagtggtggtcgaaatataactgatgctgaattggaaagattacaacaagcgttgaggattctttctgatgctgaaaaacagataagactttcaagcgagcgttcgacatggttcactgctgctttactccagcttggttccggtcacaattcagaaataactcaatcaagaagcagcagtaagcaaagcgctaaggcaaccagcgaaaccatgatggaagcaatgagagaatcttctgcaagcaggagtacagctcatcatttatccacttttcctgattcaaagaaaatagtggatctgaaaacaaccagtgggcactccagtcctcatgcttcactgtcctccaggatgagacacaatgaaaacatgatttatgccgagcatatgtctgttgatagagcattattggattctgctcaaacaagtatttcttctgagcaaaagggtatgcatagtggaatctcagataaccttacccgaatttggatgaagtgcatagagaattgccactccaagacattgcggcaacttctctatgatcatgggaaattaacatctgtcaaagaatgtgaaggtaccattgttgcttttatagcatttgaggacaatgatataaagtttcgagcccaaagatttattagcagcatcagaaattcaatggaaactgtactgaaatgcaatgtggaagtcaggatttgtttgatgcaagaatttcttgctgggggactaaagcatgagacatacccagatgagacagctgaatctgatgtcttgagttgttcaacgaacagtgaacgtcgaaagggtgttctgaatctatcaggtgctggtggagtgcagccaaacaatgttcccatgatcatctctgaggaaacttcaggaatgcatagaacaagagggcaggatgtttctattgaacagttgaaggtatcagcttttgatgaacaaaggttagagagtgcatggctccaggctgctgaaaaacccatgcctggtatgttaaatcaaggtagacctgagagaaatcaaattcttccacaaaatggtggtcagcatcatggtaggtcctcaatggccaccgttgttccgtcaaggcatgttgacaaggatctatctaatgaactgaaagccttaaagatcagtgacagtcatggaccccataatggtcaagatgtacagatggagagtggttatgccatttcaccaagccttttgcatagaaataaccatttggcaaattgtgacaatgagagcgttgtttctgagtccggagcacccggttgccatgggctgttcccatgctggaaaactgaaaaaacgaaaaggagaaagggaaaagggcagacacggttgaggtcatcttaagttggcaattgacgacgataaaaggagcattgtggccctggattgtagaggaacatttgaagagatgcacgtgcctcacgaaactgccttacttcatttcttctagaggatttatgaagaccaattcgttattccatgcatttaatgctgccgctgagggttcagcattctctacgcgtggactcagcagagggtgataaaaagttgcagagatgttggacatgcggattttaacaagccattctgatccatctatgcttcttgtacagacatttggatgctgaggcgtatacgtgaagcggtcagcaaaattaggaaacattggttagcgagttaatgaggcgcaattatttttcagcatttttagtactgtgtttgacagcatttgaatttactttgcatttgttattgtaccaattccttttttttgttagaacaaaggaagaccttgcgtcgataagctgtggttttatcaagtttgtacaaaaactggttagctcctgcatttgtgtagacttctttgtcctttcgtgtcggttgtttaaaaccctctattttactactatgctaaccctggatattctctatctaatctatactcccccagc

SEQ ID NO: 111614 - DNA, 405 bp, Zea mays
  Clone ID: MRT4577_3327C.1
ctaaaatgcgactttctcacgggaaaactgaaaggtacctgtttttaacaaacacaccctctatctcggagttgagttgggctcgtgactagcaaataactttgtacatttcacaatgcccccttcgacaatctctctccctcttttaactgctattatataattcttttacatatttgcttactcaaagatagtgctaacttatataaacaagctcaacgtctccatcctatcaggagctatgatgaagtcgacaacctctcggcaaaccgagggaggttcttcacccttccaaacacgaagggtgcctcagtgggtgaagctaccgacaatgctagctacgtaagctgttggcttggggtgttcatgcctaaccgaacgatctgtatagacaggactcggtct

SEQ ID NO: 111615 - DNA, 711 bp, Zea mays
  Clone ID: MRT4577_33280C.1
ctacttcacttcttcctctctcctctacggacgacactatcggctcgcgaccgacggacgttccgctcgaatgcatgtatcgtttttttttgaatgcctacacatggcgctgaacaggtcactctgcctgttcggtgttcacaaaagctattgctgataaatgcatccgctctatgcgtgctgattctcatgtgttccttcttgtcaactcgaaatagaaacgctacttctcgcatccgcctgaatgctgcctggattaactgacacagcactgcccctcaatgatcgctataaggacatccatgctgacgctgtgaaaaacaggcgccgcgctaccctaaacacatactctaggtccattgagtctgcttccttgcacgtgatctcgaataacatagttgataagtctgaatatcatgatgctgttatagaatgtgatcttcgtgagatcggggagcgcatcgtgaataccaaggcactcgagaatatatgctgataatgttgaggaggacaagacccaaaatgtgcacactaacgctgctgatcagaatgggtccctaggccccaagttgttcggcgactgtgtcaaactctgaacatgaacgaagtgtcattccgagacctcctcatagccaccgtttgcatacctatggataattgtgtattttctttcagacttactcgagactcttgagatagcatcctgatata

SEQ ID NO: 111616 - DNA, 293 bp, Zea mays
  Clone ID: MRT4577_33281C.1
gacggaggcaggttggagccgctgccgtcgccatgacccgcggtaaccagcgtgagtacgcccgccagaagaatatgaaaaagcagagcgactcggttaagggaaagcgccgagatgacgggctttctgctgccgcccgcaagcagagggactcggagatcatgcagcagaagcagaaaaaggcaaacgagaagaaggaggaacccaagtagctttgtggcttcgtgtccaaccctcttgcccttcgcctgtgtgcctggagccagtcccaccacgctcgcgtttcctcctgt

SEQ ID NO: 111617 - DNA, 444 bp, Zea mays
  unsure (1)..(444): unsure at all n locations
  Clone ID: MRT4577_33282C.1
acaaaaactatccaagaagggcacgtaacgggctttggacacatttaatgctggaccctaccacggtgagaaattgtgaaacttcaaaacaaaatccgtctttctttaagcggagtccccccaaaagaaaacagacaaggggttttttttcacccggagatatggatggccgaacaaaaagccgcggccccgcgaccgaagcaaggggcccnaacaggtccctaggccttgacgttgacggggtactggacaacgggggacccggagggggcgccggagtcgaaggggagggcctgcacgtacccgccccccatgcggaacttgccgttgccgccgacgatgctcatatggggaacggccctgagcacctggccgcggccaaggagggagagcgggctgcctttgtgcccgccggccgggaacacgaagattatgaccaggagg

SEQ ID NO: 111618 - DNA, 283 bp, Zea mays
  unsure (1)..(283): unsure at all n locations
  Clone ID: MRT4577_33283C.1
aatgatacgcacccgcggacacgggggcaagaggggggggtaaaaacagaaggaggagcggacccacaaacgccnggggaaggggacggaacnggcacacggggcggcagacgcccgcgacggggaaccacccaccgaggaccccgacggcccaagngaacaccacccaccgcccgcggcacgacacccgcgcgagaagcaacaaggagcagggaccccaccgccaggacaagaaccagcaaaggacggggcagagggaacacnaacagacagcgcgcagaca

SEQ ID NO: 111619 - DNA, 329 bp, Zea mays
  Clone ID: MRT4577_33284C.1
aaaaaaaaataaaatccatagcaaacaatataaaaaaaaacaagcaaaaaaacacgggggggcaacgtcatggggttgtggatatccaaacttacttccacgtcaatgccaggttttaaacaacgtatagggtgacctaacccaaatgtaccgcactttaatttacaacgcatcacattgggatatccctggcttgcccaaaattaaacaggttgcaaccgatccccctttctaacagtggcgcaatttgaaagaggtccggaactcgccccgtttctaaaaattacccaccctgaatggggaagggaatcccccctgtaccggttcat

SEQ ID NO: 111620 - DNA, 484 bp, Zea mays
  Clone ID: MRT4577_33285C.1
ctcttaacggccgccatgtgctggcaatcgccctatagcaatctcgagaacgcggccttagcttattcctgggcagcgccaaacatcatgcaaaaactttatcattgcactataactcatatgcaaatctaacagagggcaccaccattgatgggccgtacggtttcaatgctgctgggtttgtcaaagcaagaccctgagtggaagccttcggtgcccatgtgagagggtgccagcgtttggcgcaatgagctggttgaacggtaacaaactgcggttgcgttaagaaagcagtagggctcacatccattagctggctgaaaggtagtagttgttgctgctctaaataagcaggctagctcaatgctgctagttcgttgaatggaataaattgctgggggtcggcagcatctatctggctgaatggtagttgttgttgcaaataagcagcacatttcaatgcactcagttgggtgaatggaag

SEQ ID NO: 111621 - DNA, 272 bp, Zea mays
  Clone ID: MRT4577_33286C.1
acattatgcttgtgactccagcgtctagtggaagcgtcactgattaaaaggatgtgttacatattgtaaggttgagcacatgatgcgtttgttcattaaaagctgttgcctggaactaatgccctgctagagtgtattattgaatggaggatttgattgtggctggttagactatcaattttttttttctaggagcttaggaatgctgcaaaaactgcttaataatccattgtaatactgctccttgagcaattccattttagtgagttgat

SEQ ID NO: 111622 - DNA, 1222 bp, Zea mays
  Clone ID: MRT4577_33287C.1
cattgggtacctcgacccacgcgtccgcggacgcgtgggcaccgatacaaatacaacgcaccgtccatctctccctccctccctccctccccctcgcaccgccgcgggacacgaacacgcgagccacccaaccggcccgaacccgatcgcaccgacgaggtggatcccaggggaaggctcctctttaccgccgccgatggacgtgggcctcggcggcgcgggtagttccggcagaggagggggagggggccggagcgggagcgggggcggtcgggacagcccgttcgctctcggcgggggcggcgcgtcggcggctgcgtggacccggctcgtcagctccggcgtggaggacgagctggtggctgcgtcgggaggaagaggaggaggtggaggacgcgcgggggcgagagcgggaggcctgccgcagggccactttttggacgcctgcttcctctgccggaagcccctccccagcaaccgcgacatcttcatgtacaggggtgacatcccgttctgtaccgaggagtgcaggacggagcagatcgaaatggacgaggagatggagcggaaggagagcacccagaagaagaagttggcgccgagagctccctctcccaaggacgtggagtccgcgccgaggcctcccaaggcccgggccgggtcaatccttgccggctaacaccgtgaagacgaaaagctcacaaacgagctagagctcgcgtgtgtgctcctccccctccccgaaaccaagagagatcagaacccccttgataccaccacctggaactaccgctacagttgcgtatatgggtttgtgtttttttgtttacagcccttgcgccattggtggcgccgtgaactcagtgtcagtgcctgcccgcttacctgtattgctgctgatgatgtatagagacgggcggagaggagaggagagcgctggtgtttaggaccgcatgcattcagaagctctctgtgctgctggccagatgtgtcgttcgttgtatcatgtatgggtgtttctggctttcgttctgggagatttttgtgagaatcttctgtgtgttacgtagtactcatagacaaatagctggtgttggtgttagggttaatgtttttcttaatgctcatgagagaaaattgaaaacgtatgcctacagtagaaataggcatgtgaagtgaatggacccttgtgctcataagtcatgacataacttgctcctgt

SEQ ID NO: 111623 - DNA, 433 bp, Zea mays
  Clone ID: MRT4577_33288C.1
ggaaaccctggggttatgggaaaaaaaaaaagccagtgggccaagccgggtttgggttacagaacgcatccagttttaacaggcaaaacgggaaacgctggacagtaaaaacgttgaaaaaaaaaaaaagttacttgctacctttaaaccactaaggaaatttttttactgaaattgggagggtgaaataagggcaacacctatttttaaaccggaattggaacgcttggttttggaaaacttgactcctgaaccggaatttggatgcttgagggccaaaaagtcgtttttgtactgaaactggaaagttgaaataagggcaaaacctatttctgagccgtaatcggaatgcttgagggccaccgctttggacgccttgtttcctaacaactaacccagggggggctcaaagcaccggggaaatttgggggag

SEQ ID NO: 111624 - DNA, 284 bp, Zea mays
  Clone ID: MRT4577_33289C.1
atccacaatccatagattcttacctgaaacgcaccacatggcacgtattttgaacgaacgggggttcgatagcctttttaacctttttaaatacagcttcgcggcacacgacttcctaacaccggttccaagtacagcaagatcttgtacattgagaccaccaactcctgaaccctacgtgtaatcctcgtcattacagattagatattttgacccctgatttcatttatcacggtcaagaacatcaggacagaatcgcctttgtgaaggctatatctaagccg

SEQ ID NO: 111625 - DNA, 728 bp, Zea mays
  unsure (1)..(728): unsure at all n locations
  Clone ID: MRT4577_3328C.1
gccggccggttctcgaaccctgggngctctatcgagttaagacctgccggattgatcctactgctgatccctaccaatcctcgcctgttgcagctgtggcgacctccgcgcggctctccagcgccgctgatgccagccatctctaccgtgccggagcttctctgggagatgagttgaaggtacttgatctgaccatggtccgcgcagcgcgcccaccgcgagtattgagtgccaccgagaagaggagcatctccgccgaccgcgtccccgacatggataagggaatacctgatgaacctcctcctcctgcgtcgccatctcgttgcccaccgtcccgatggtcgtccccgtacggagtcttcttcgtccctgccggctcgctcgaacgacgaagtcgacaacaactcgaacgacaacctgggcatcaacatcacggagcatgggtgtgtcaaaacgcacagccccgaagaacgcatgctcgtgcagaggatcaagggtgaccccacgtacctggccgacggagcatgacaagacgctcgcccacctacaggatcaacacctcgagcactcacatcgcgtgtatcttgacgaggaacaccgctgagaacaagttcatctgcccctgtcacggatcccagtacaacaaccagagcaaggcgacccgtggatcggcgcctctgtcgctgtccctgattcacctccacgtagaccacacccaggtcctcttc

SEQ ID NO: 111626 - DNA, 289 bp, Zea mays
  Clone ID: MRT4577_33290C.1
gagctcactgtcggcggccgccctttggttttttttttgcataactttcacggtttgccccgccagctaccatacgactcaggctggcataggacgacactgtggtggacgagggaggctggctaacgggccacaataacgccttagccgactcggtgatatcgaatagcatgacggtgccgacgagcattgcgtcgacgcccacctgagtctgattccataggctgcttaccggctttatctagtacgattctaggcgtgtgtcaatgtccaacagctatggtggtta

SEQ ID NO: 111627 - DNA, 459 bp, Zea mays
  Clone ID: MRT4577_33291C.1
tcgagcggccgcccgggcaggtaccatgcttttttggtatcagagaccgtaatcaagcaaatggcctgtttccttgacatctgggcatacaaggcaggcgagttgctcactctggacactcaccaggaatgcctggtatccaacgagaatgagacaaaggctacaggcgagtctgaactgaagaaaggccttagcatgggtgacacggtccgtaacctgattatggaggagaagcagatccaacacaacatccagatgagcattaacttgctcgagtgtcttctgaataataactggcataatgtaagatgaatctacattaagagcaccatggggaaaccatacacgattctctaagtctgggtgacatgagaagtctgctctttatgatattgggttattgaaccgaggtggatttgaactaaaactgttgttataccatgtatgattggtaggata

SEQ ID NO: 111628 - DNA, 1095 bp, Zea mays
  Clone ID: MRT4577_33292C.1
gggcggcgcggcgttcgaccgttgcctgctggcgctgtacctcatcagcccggtcagggttctggcgctccgcttcatctccgcgccgtacggcaagctatcccggccgggctggggccccgtcctaccggccccactcgcgtggttcctcatggagagccccaccctctggctcccaccgctcgtcctcctccgctggccgccgccgccgctctccggcccactcgccgcactccccgccgcgctctacgcgttccactacgtccaccgcacgctggtccacccgctccgcctcgcccgcctgcgccgcgccccggcccccgtgccgctcctcatcgccgcctgcgccttgggattcaatatcctcaacgcctacctacaggcccgctccttcgccctccacgccggccgccaggcgtcccccttccgctgcctcgctgggctggccctcttcgcgtggggaatgcggacgaacatcgcggcggacaaggagctgctgcggctcaaggaggccggaggcgggtacaagatcccgaggggcgggtggttcgacctcgtcaccagccccaattacttcggcgagacggtggagtggctgggcttcgccgtggtggcgtggacgcccgcggcctgggcgttcttcctctacacctgcgccaacctcgggccgagggccagggaccaccgccgctggtacgtgcagaagttccgcggcgagtacccggcgtcgcgcaaggcgttcatcccctacatctactaggtgatggccgtggtttcggttcgttcttcttggccgccttatcttccttcgcggcggagcagaagcaggagagcaggctgagtttgcccatgtttcgactcgacgagaaggcgagtagacgacagagaacctgcgatgcgattagctgcgcgagactgcaacctgttgaatctaatgttcttactattgctgctgtcgatgattttatagatgtacaggcagagttgaatataaagccggctgaggcataacctggttactctcgtgtttgtactatgttccgactcgaacaggattgactcaagtctaatgtattgggcatggacagaatctct

SEQ ID NO: 111629 - DNA, 381 bp, Zea mays
  Clone ID: MRT4577_33293C.1
ttcgtcaccatggttcgcgtcagtgctcttaatgatgctttaaatgctctcaccaatgctgaacgcagaggaaagcgccaagccttgatccgacccagttccaaggtaatcgtaaagttcttgaccgtcatgcaacgacatggttacattggtgaatttgagatcgttgatgaccacagatccggaaagatcgttgttaatctccttggacgcttgaacaagactggctgcatcagtcctcgttttgatgtgagtgttgatggaatcgaacagtggtgcaacaacctcttgccttctcgtcaatttggttacttagtcttgaccacttctctcggtattatggatcacgaagaggcaagaaagaagggaactggaggcaaa

SEQ ID NO: 111630 - DNA, 416 bp, Zea mays
  Clone ID: MRT4577_33294C.1
aagagagtaccgcagggagcacgtttggatatagaagccaccgttttcctttctggttgtgtttgaggccactgttgggcgtccatgccctggactggactggactggagcgtggcttggctgttggctcggcccggggcctctggccctcggctcacacttgctgctcaggcaggcagaggatcttcagctggagcacacgacgacgacgacgacgatggcgacgtggttgttctctggctgtcaaccgtcgctgtcaatctggggtcgtgttagcgtcctatctctgcccaagctgctgggagcaaggactgccgccatggcagcagcgtcaccgtgttattaatatattctgacgagaggaagggactggacgaaactggacagtggtccacgatcgcagctgtagcttgaac

SEQ ID NO: 111631 - DNA, 354 bp, Zea mays
  unsure (1)..(354): unsure at all n locations
  Clone ID: MRT4577_33295C.1
ggccgggcgggggtggtttttttttttttttttttttggggggaggacacataccattgtcaatttattggtgctgttgttatcaggtaaagggaagcctgcagaaggatggattccatcctagtcccttgattgggacttgctctgctagggacggggggggggggggaaatttccaagggctattgctcccttgggataccaaagaagctaacccttagcttggggccatcgcggctttgtcctgctggctaagcctctcgccttcgcggcgcaggtgaccgttgaatttctccttgccgccccagaggaagatgccggggaggccggcngaggcaactctgtcccaaatga

SEQ ID NO: 111632 - DNA, 1791 bp, Zea mays
  Clone ID: MRT4577_33296C.1
ttggggtaccgccggccggtcggccgggaaacccatcgtcaccccctccgatctccttatcccttcccgtcgcataaacccccgccgccgtgacctcgcagcgaccctgccctcgttctaggctttcattgcaggcctcgcgtctccagtggcagggcaagagaaaggagaggatggcgtcgccgataccgcgcgagtgggtcgggctgcagcagtttccggcggctacacagaccaagctgcacgaactcctcggcaaactcaaggaggaggatgtgagcacattaacaattctggtgatggggaaaggtggagtgggaaagtcatccactgttaactccatcgttggggagagggttgcctctgtcagcgctttccagtctgagggtctgagaccaatgatgtgctcgcgcacaagggcagggttcactttgaacattatcgacactcctgggcttattgaaggtggatacattaatgagcaggccgttgacatcattaagagatttcttctaggcaagactatcgatgttctcctgtacgtggatcgtttggatgcgtatagaatggatacactggatgaacaggttataagagccatcaccaattcatttggaaaagatatttggcgaagatcattggttgtgttgacccatgcccaactctcaccacctgatggaatcgactataatgatttctttacaagaagatcagaggcacttttgcgatacatccactcaggagcaggaatcaacaaacgagaatatggggatttccccttgccaatagcattggtggagaacagtggaaggtgcaagactaatgagcatggggagaagatacttccggacggaactctgtgggttccaaacctgatgaaagaaattactgttgtcatctcaaacgggagcagtcccattcatgttgatcagaagttaattgatggtccaaaccctaacaatcgccgaaagttgttcataccacttatccttgctgtggagtacttcttggtggtaaaaggaatccggagggcgatccatgcagatatcgcaaacgggaaggtagatgactgggagcagcgttaccgggacttggtgggaagcagggacctcgtagagcagaaaggttctacctcccggaaccgcaaagcctaagttggtgtaccagaaaggattctattcgtgttgagacccacccactcgatctgcttgctgctccttttcctaaatctgtgttgagggctttatagagttcgctggttctacttgaaaaataattgctcgtgttgtagttgataagattatctttcccattttatgatgcttggccctcttcgcaattttgaatattgttatcgaatctctgctattttgttgtttgtacctttattatatggcatggaaacattgggggaggggggttgctccgaacggcactcaagcgtcagttgacgacctattatatgaagtgtgactgtatgaggccttggttatctaacgtgcataatttcaactccaatagttatttaaaaaaagtctaaacttatgtttagcaagttgttaaatagctattggagtaaaaattcgcatatttaggagtagtttagttttgaatctagttttggtatgcttgctcctgtcagaaaaggttggcaatggagtcaagagaagagggcgtcgagggcatagaaggttggtcggaacgacctatagtgtagcggtggttcaatggtgtaggaatggagtcaagagaagagggcgtcgagggcatagaagggttggtcggaacgac

SEQ ID NO: 111633 - DNA, 1701 bp, Zea mays
  Clone ID: MRT4577_33297C.1
aggacacgcgtctcttcggtcaactatccttgtacctgcatctcgacctccccggcgtccggtggtgttatcacgatggtgtgcgtatgctgcagtcggaggatcagaaagaagtacccacgcgtccgcgcacgcgtccgggcccgtcttcggtcttcccaaacccccaacatccatgatccatctcatcgacaccccctccgctctccttatcccttccattcgcccaaacccccgccgccgtgacccctgccagcccgcggccttcccctcgttctaggcttcaactgccggcctcgtgtcttctgggcaagtgaagagagagatggcgtcgccaataccgcgcgagtgggtcgggctgcagcagtttcctccggccacccagaccgagctgcacgagctcctcggcaagctcaaggaggaggatgtgagcacattgacaattctggtgatggggaaaggcggagtggggaagtcatctactgttaactccatcgtcggggagaggatcgccactgtcagcgctttccagtctgagggtctgagaccgatgatgtggtcgcgcacaagggcagggttcaccttgaacattatcgacactcctgggcttattgaaggtggatacattaatgagcaggctgttgacatcattaagagatttcttctgggcaagactattgatgttctcctgtatgtggatcgtttggatgcgtacagaatggatacacttgatggacaggttataagagccatcaccaattcatttggaaaagatatttggcgaagatcattggttgtgttgacccatgctcaactctcaccacctgatggaatcgagtataatgatttctttacaagaaggtcagaggcacttttgcgatacatccactcgggagcaggaatcaagaaacgagaatatggggatttccctttgccaatagcattggtagagaacagtggaaggtgcaagactaacgagcatggggagaagatacttccggatggaactccgtgggttccaaaactgatgaaagaaattactgttgttatctcaaacgggagcaagcccattcatgttgatcagaagttaattgatggtccaaaccctaacaatcgctggaagatgttcataccaattatacttgctgtggagtacttcttggtagtaaaaggaatccggagggcgatccatgcagatatcgcaaatgggaaggtggatgactgggagcagcgttaccgggacttggttggaagcagggaccctgtggagcagaaaggttctaccacccggaaccgcaaagcctaagttggtgtagcagaaatgattttattcgtgttgtgacccactcgatctgcttgctgttccttttcctaattatgtgttgagggctttatagagttcgctggttctacttgaaaaataattgctcgtgttgtagttgataagaatatcttttccattttatgatgcttggccctcttcgcaattttgaatattgttatcaaacccctgctattatgtttagcaagttgttaaatagctattggagtaaaaataagcgaaaaaaaaaaaaaaaaaagcggtacctttattgcgaaggagcttgacttgaagaaagagccatatgctggggagcttgatcactgaaaggatggctcatatttttttttttccccaccccccccaccgtggaggggtac

SEQ ID NO: 111634 - DNA, 420 bp, Zea mays
  Clone ID: MRT4577_33298C.1
aagccctgccaaacaggcgggaaccacattttttaaaactacaggtttttttaacacaaattgccgggacaggaaagcactttcagttcagattttgatttcaaaaccagggggggaacaagggctgaaacctagggggggagcacgacgggcccccctgctgccttgattttttttttggggaccttggaaatgagcttggccttgaccacaatgggctttggggggagcacccccttcccgagcaccttgaagtagcccaactgcgtgacctcgatctggggggccttgtccccccccgcctccccccccttgtgggggggcaccatccaccaaaggccctcgatgttgaccccggggcaataaaacttgttgcggagcttatggaaataacccatgccaaccttgccgaaataaccc

SEQ ID NO: 111635 - DNA, 179 bp, Zea mays
  Clone ID: MRT4577_33299C.1
ttttgacgtacataaaggcctaggattggatgaaacgtattaggaagtggaggatgattactatataatgtatgtagtggaagagacaaactctgatgagatgactgcaaagtgatacaaaaccagttgatgattaatccgaaggcctgaacacgactgctattgaatgcacgtagctc

SEQ ID NO: 111636 - DNA, 1513 bp, Zea mays
  Clone ID: MRT4577_3329C.1
agcttcaaaatgtgccagtcaccaaggttccttgcagagagcgagataaaaaaaaaggtaatccgacggaaacgacaagggcgcggcgagggcggggacagggtcgggaaggccctgggcgcgggggcgccaagcgcatggcatcgtcgagggtgatgccgtcctcctcgccgtcgcacacggcctctgatctcgcgcgcctagcgcaggccgccagcaggcccggcggcgggggcagcgggctgggctccatgaacgtggaggagctcctccgcggcatctacagcgacatgcccaccccggcgccgcccgcgtcggagcccgaacgcccgaggtcgccggccccggcgccggaggtcgccacgcggaggacggcggaggaggtgtggaaggagatcactggcggaggtggcagtggggaagccgtggctcccgtggcggctcaggctgtcgctcccgatggtggcgccggcacaggcggcccggaggtgacgctggaggacttcctggccagggagagcgcggtgaaggaggatgaggttaagatttctgtcccccccgcgccggtcatggggttaccgggcggagcggagggcgtgagtgtgcctggcggcggaggcgggagggaacggaagcggcagctcatggatccagtggatcgcgccgcgatgcagcgacagaaacgaatgatcaaaaaccgcgagtctgctgcccggtcacgggagaggaagcaggcttatatcgccgagctagaatcgctggtaacgcacctcgaggaggagaatgccgagttgttgagagaacaggaagagcggcaccagaagcggcttaaagagctcttggaacgggtgacgccagtcattctgaggaaaaaaccatcaggagatcttagaagaacgaactcaatgcagtggtagattggagccaagctcagtcgccgtctctttacagttataacatagaatttgcccctgtatgtcatttttctatttatatatgcgccaactaagttgtagtatcttagctgaaatagcatgggcaattagccgacacaaaggttaaacgaaatcatattatgtaggagtgctcatgaccaagaaaggttgctgttcctgcctgctctcaactaaacatacaacttggatgatcatatccccagaaagatgatcccattcccatccaacctcgccttctaactaagcacactcttttatggctcttcagtttggctttggatttactgacttgagcaatgttaatttgcttttcttggggtagccgttttatatgtttctctaaagaatacatttggttgatgcagctcttggaacgggtgccccctgccgttctgagcatagaacctgcccctgttcgtcgttgttcgatctcaatgcaggcgccgactggggcctagctccgtcgccggctcttgcctgggctttcagccgactcgcccctgtatcgcattttcctattttgttgggcgccctcttggccgtagtaaaaaaaaaaa

SEQ ID NO: 111637 - DNA, 244 bp, Zea mays
  Clone ID: MRT4577_332C.1
aaaacggagaacagcaatgtataaaaagaaacacctgtgatgaaaaaaaagtacaccacaggaaacataaactgtgacacttggaagcaaaacacatacaaaaaaaaatgctattaatcaaacaaaataaaaaataaacaaaaagtaatgctctaacaattatgaaagacaaaaaagagaggtacagaaaaaaaaagatctaaatgaaaggggaaggacaaggacttagagacccgaatggggc

SEQ ID NO: 111638 - DNA, 166 bp, Zea mays
  Clone ID: MRT4577_33300C.1
ccacgcgttttcgttctcgtggacccacaccaccactgcaattgtatgaaagcctatgcttatggcattggccgaactgcaagcacggcacacccccatcggagtcatgtagacgatagacgataaactgaaggatagcgtgatacggtacggtcttgcaaaacaa

SEQ ID NO: 111639 - DNA, 589 bp, Zea mays
  Clone ID: MRT4577_33301C.1
aactccagacgactacttatacgagctactcatctcccgagtcgagacgagagacagagactgagaggagtgcaggcgacgactgcaggtgcctcctacttcatcaataactcatcggaacccttcgcgatccactggaccaggacctggtcacgacaacacttggatatcgcctcactcaagatcatcctgtagacaaccatcaagctattcggatcgaaggccgcgaacctcacaaattccgacagcatctcccgccagaagaccaaggtcaccgtaatctgcgacgcacaccttctccataacctatccgaagtacttgaccactaactacttctagagctcaaggagcaagattgcctccgtgcgattgcagacaagaacgacctcagagtctatgagctgcagtacttcatcgttgctgacaacgatgacgatgacaaggattacactgccttgtccattgctgatatcgagcggagaagaagaagattacactgacttgtcatcatatctgatttctgaactcattgcataccatacttgcacccgtacacttgagaatgaccccgtggtatgatctggtgaa

SEQ ID NO: 111640 - DNA, 669 bp, Zea mays
  unsure (1)..(669): unsure at all n locations
  Clone ID: MRT4577_33302C.1
ggtgggtgctttttttttttttttttttgtaaactagggctttgttacaaaatatcttttttttgacggaccctttccaacatatacttttaaaatcttaaggggcctgttgggccaaattccccaaatcaaaaaccttaacttgggaggggggggggggccccactattcccccaaaaccatttaaaccaaagagctttccggggcccccccggaaatggccggccaaaatcttgaccctggcgctctttttcggccggaggacctcgacctggttcgaaaggaccgccaccccgtccccggggcccgaggacccaagggcaacccgggaagacccatccccgagtccttccctaaccacgcgagggccgggatcccctccccttgnccctttgcccaaaacttgcggcaacaccccggccatcttgcgcggcccacctttttggggggggcggggggccgccccaccactggctgggggccggggggggccccccgggggcccggggccgcccccggtcgcctcggccctcttggggcccccacccggggggggagggcccccccgggcccccggggctttcggctcaccccccccgggggggcgggcgccgcccttcgcctccccccccccgggggggggggcccccccccgcccccggggggggg

SEQ ID NO: 111641 - DNA, 310 bp, Zea mays
  unsure (1)..(310): unsure at all n locations
  Clone ID: MRT4577_33303C.1
gcttatcantctggaggctattgnagantaatcggccacttcagaanctcgtgttncagtaggaaagttnnaggaggtgtanttcaatgcaagtggtnntgcgagctctnnangctgncanaaacagtgagaagcagtttgccaattccgtcaagcaganagatgcngtgcnccattctctgataanacgcctgcttgatgttgtcaatctgtgagncttaggattntgtatctctttnctgtgtcacacaagcgtgaattcattttgaatccagccttgaagccatcgaatcagaacataccactaaaa

SEQ ID NO: 111642 - DNA, 330 bp, Zea mays
  Clone ID: MRT4577_33304C.1
aacgggcccgaaattcccgggcggaccacacccttccaaaaccaaaaggcaaaaatggagttgtaccattattgccggaggatgaacggatcagggttgagggttttaataatggtgccggttccttgaaccacctaaattttttgtttgttttaaggcctaagggggcatccggcccatttgtgaacttaagtgacggcctactatttgttgccgccggtttggttggccattattaaatcaaccagggccgttttgtaaccatggaaaaggtctaaggttttgagcctggtattatttaaggcatcctaatttactgtaaaacctttt

SEQ ID NO: 111643 - DNA, 412 bp, Zea mays
  Clone ID: MRT4577_33305C.1
gctctttttctcctttgccagcttaatggtggacgacatgcccatgagggactttcgcaaactggatagtaagggggtggcgtcacccaaaagccaaccgatgcggctctactccagcctgtgtaacgcggacgactgggcgacgcaagacctgcccgttaagacggactgatcacacgcccccttatccgactcctaccgagatttcaaggccgaagcttgcctcgatgctgcaggtggacggacccgttgcagacccaccgtcggcaacgagggcaccggtgcccccgactccggacacggcgccagggactggctcaaccacgagctggacataaccctgcacgacgggatgcgctgggcgcaactcgatgacatgatctacaattactgaaccgacgccaagcgctac

SEQ ID NO: 111644 - DNA, 252 bp, Zea mays
  Clone ID: MRT4577_33306C.1
tattcgggtgtttattaagaacggggggggcccttttaaattttcattttacagttttcttttacagtttacacctttcttggggggaaagcccaaaaccaatattggagcggattccaatttaaagcaaaaactactaattttgccccgaccgaaaaaaactaaacccccggccctttatattaaaaacacaaaatttgcgtaatatttctcccccccaaaaccacagtggataaaatatgttctgcccaa

SEQ ID NO: 111645 - DNA, 382 bp, Zea mays
  unsure (1)..(382): unsure at all n locations
  Clone ID: MRT4577_33307C.1
agggacgggagaggaacccgaggaaggggaaaaggaaccaccgcaacgggccgcagcccacgcgccacagccgccancgggggcggagacgccaccgccggccncaccgggagcncccgcacgggcggcaaggagaagagcaaggggcaaccgaggcgcgaaggcgagaggcnaaggcagcaggacagagccacgaggggccgaagccaagcgngagcngcggaggaaacacaagggagcaacagcccacggaaaacncacaagaccccggcgaccccaccagaacaagnccccagcaaggaaggaaaccaaccnncggcaggcaggcaccnaccggacaanaacagaaacaacaaacggacaacggggcgcgccccacagc

SEQ ID NO: 111646 - DNA, 311 bp, Zea mays
  Clone ID: MRT4577_33308C.1
gtatatatgcggtaccctaagacaaagggaactacgtatgttaatggagcgggggttaagccatatttttctcagcatgacaatgaaatctaccgatatctttattgagctcatatctcgatccacctttattgttgtcctttactttcataatgctgtttctgatgggtaaaatactttatttgacgttttaaaatatgtttctgcccactcccctattctgaaatcaaagctgcaccttcatcacgaaccacatcaccatctaccacaatttcattttgagctgtatacatcaaccacaatatgcattt

SEQ ID NO: 111647 - DNA, 353 bp, Zea mays
  Clone ID: MRT4577_33309C.1
ccgacccgagcgacgcgtccgctcatctaacgactcaactaaaccttaattatatgatgtcaatatcatatcacgactcgggactcaatgccaaagagtaggggaccttgatcgaaagaacgttacctgtgcctgcatcactagctcaaattaaaatggacgcagatagcttggctagagagtatggataccacatagtactactatctcctgcaaacaattctagtttccatcgtcccatgtctcctatgtatactgtttctgattactcaatcgagaacatacaatacatgcatagagagaatgagttacttactgctctattattaacaatggaacaagaaaccaatatt

SEQ ID NO: 111648 - DNA, 456 bp, Zea mays
  Clone ID: MRT4577_3330C.1
gggccaacccccgcgtccgctccgaacaaaaaagaaaaaaaaaaaaaaaaaaatttaaaattttaaaaaaaaaaaaaaaaaaaagggcccgggaggaacttaacaactaagggccccacccccccctccccgtccttaccacgcggtacttcttcgacaaggccgccttaatcaaatttcctggcgccggccttcccacttgccgactggaaaaaccctttgcgcacccaaccttactagcactgccgagcatcccctctttgccccctggctcctgtcctaaggcgtccccttcgacaaggcctcccaccaaattgtccacccccaatggcactggcgccaccccccttatgggtggattaacccctccaggtggggcggctccacccagttttaacgaacattttcgcaacctcctacaccccggaggttatcactctcacctttgctttcaac

SEQ ID NO: 111649 - DNA, 1768 bp, Zea mays
  Clone ID: MRT4577_33310C.1
cttccctcgcggcggtggcagcggccttcccggcccatccccgtggcggccccaaccgtgcaacgggcgcggcctcctcctccggccgggcgccggcggcgtgaccggcgcggcggcccccgcggcgaccgcggggaacagagcgggatgcgagccggtgcggaagggggggcccatgaccatggagcgctggtagcgctccatgagacggacgctgagcgggaagcgcggatccgagacatgtttggcttcttcgacaccgcggggagggggcagctcgactacgcgcagatcgaggctggcctcccgcgtctgttggggcccctccagtacaagcacggaagggaacttgatcgcgccctctaccgcgatcccggccatcgacgtcgagcacaacggatgtatcctgcccgaggagctctggcacgcgctcgtcaaggctggtatagaaattgatgatgaagagcttgcaagatttgttgagcatgtggataaggacaatgatggtattattacttttgaggagtggagagattttcttttgctttatcctcatgaagcaaccatggaaaacatatatcatcactgggaaagagtctgccttgtagatatcggtgagcaggctgctataccagaagggataaacaaacatgtaagtgcgagcaaatatctgattgcaggaggcatcgctggtgcagcatctcgcactgcaactgcacctcttgatcgcctcaaagtaaatatgcaagtgcaaacgaactgtattgcagttgtagatgtagttaagggtatatggagagaaggtggtctactgggattttttagagggaatggactgaatgtggtaaaagttgctccagaaagtgctataaggttctatacctatgaaatgcttaaagaatacataatgaaaagtaaaggagaaaataagggtgacattggtacttctggacgtctcatggctgggggtttggctggtgctatcgcacagacagtgatttatcccatggatttggtgaagactcgtctgcagacttatgagggaggcagaattcctagccttggcgcactatcaagggatatatggacacatgaaggtcctcgagcattctacagaggccttgttccatcattgcttggcatggtcccttatgctggaattgatcttactgtttatgaaacactgaaagaaatgtccaggacatatgccctcgtggacaaagatcctggccctttagtacagctgggctgcggaacagtctctggagcgctaggagcgacatgcgtttatcctttacaagtcatcagaacaagaatgcaagctcagccagccaattcagaggatccatatagggggatgaccgattgtttccggataactctgcgtcgtgaaggagtttctggattttacaaaggccttgtaccaaatcttcttaaagtggtgccagctgcaagcattacctatcttgtttatgagacaatgaagaaaagtctctccctagattaagtgactttgtagattctggatatcagcgactgactctatagatagtgtcgaggcatgatcttccttgctgagtaggttctaacttaatgggcctgaggtgtaagatagtagtatttttggcctcaggatacagataatgcagggcattttcattattattggtagaaataaaacgcgatacctgtcagatctcgaaggcgcatattggaatgctagtagaaaaaaaaaaaaaaaaaaaaaaaaaaaaaaaaaaaaaaaaaa

SEQ ID NO: 111650 - DNA, 453 bp, Zea mays
  Clone ID: MRT4577_33311C.1
ggggttgcaacagcaaaacttaaattcctttttcaccaggatcgagcaggtccttgaatacaagccgggcccaaaaaaactgaggtcgatttggtttttacccgcaaatcctttttacaaaacagctgagccccacccttggggggggggggccccttaattttttttccagggggaagggctcactcataatcagcccccctttttcttttttttcttctttttttaaccggattcttcgggtggcattggaacatcctaaccataaggggaaaactttttttttttttttttaacttcggaagcagaagccacaacaggcttttcctggacctccttaaactttttttttttttttttttcaccatcaccttcaccagaaggagccccctggctttcctgggtctttttcttcttcttcttccgatcctcctgggcaccatcctcctggat

SEQ ID NO: 111651 - DNA, 593 bp, Zea mays
  Clone ID: MRT4577_33312C.1
gttctgacaggtatcgcgttttatttctaccaataataatgaaaatgccctgcatcatctgtatcctgaggccaaaaatactactatcttacacctcaggcccattaagttagaacctactcatcaaggaagatcatgcctcgacactatctatagagtcaggcgctgatatccagaatctacaaagtcacttaatctagggagagacttttcttcattgtctcataaacaagataggtaatgcttgcagctggcaccactttaagaagatttggtacaaggcctttgtaaaatccagaaactccttcacgacgcagagttatccggaaacaatcggtcatccccctatatggatcctctgaattggctggctgagcttgcattctgcaaacaacattaatagaaaggagcttgcattctgcagagcttcatggctgtacaagcctacattgctatcaatgaaatactatcgtttaccttgttctgatgacttgtaaaggataaacgcatgtcgctcctagcgctccagagactgttccgcagcccagctgtacttaagggccaggatctttgtccacgagggcatatgtcct

SEQ ID NO: 111652 - DNA, 245 bp, Zea mays
  Clone ID: MRT4577_33313C.1
gcgcgcacgcatccgcccactcttccgaacacttgcaataccacgacttagacggatcacaaagaacacagggcacaccacaaatgaaagcattgacacacatgactacaaaccatgtctctacccttaacttccttgacccttcttcttctccactgtatccatgctacacctgtttttcactcataaactaccttaatcctcttaactctcgatatataacctttactgtttcacctaaattc

SEQ ID NO: 111653 - DNA, 913 bp, Zea mays
  Clone ID: MRT4577_33314C.1
agagagagagagagagagagagagagagagagagagagagagaagagagacgcattgtgtgagagctctgcctgttcttcctctgccattgtttctcttccctttcagaagggtgttcaggagctcttctttcagttgtcggtcggtcgccacctttgggagagagcctgcattgacagaggcagcaatgctacagttcaagagaaaaagactgctgctcgcatctgcaggctgtgtggctctcatgcttctcatcacaccaacccatggtgactccgattcggagcagagctacaagatggctcggccattggagctcacgcccaagctctcgctgcagctcaagctccacgccatccttctctggtcctcggtcgccttcctgatgcccgtcggggtcctgctcatcagagtctccgccaacgtcaagagcgccagcaccgtcaggctcctcttctactgccacgtcgcttcccaggtcgtcgccgtcgtgctagccaccgccggcgcggtgctgtcgataagcaacttcgagaacgccttcgacaacacgcaccagagggtcgggctggcgctgtacgccttcatctggctccagccgctcgtcggcttcctccggccggacaggggggccagggcgcggggcgcgtggtacctggcgcactggctgctgggcgtcggcgtctgcgtcgtcggcgtcgccaacgtctacgtcggcctgcacacgtaccaggagcggcctggccgcagcgcgcggccctgggcgctgctccttcaccgtcgaggtggcgcccttggcgttcgtgttcctcgtccaggatcgctggagctacgtgctgcggcagcgggagtaggcggccgccgacagcagagctcgcgacgggcggagccaagggtccaccatgtacccggg

SEQ ID NO: 111654 - DNA, 508 bp, Zea mays
  Clone ID: MRT4577_33315C.1
cgggctccgatatacgatcccttcgtctacccaagatgtagatcttcgcaccagaccctgactgtacatactatcaacctcacaagtgggagtcttctgacaccattgacaacgaccaggccaagatccaggacaaagacgccatcccccagcaccagtagcgcctcatcgttgctgaggagcgggcgcaggacggcggcagcacttgccgactactacatccaaaggtgagagtaccctccaccttgttctccatctcaggtgaggaatgcagcatctgcacaagaccctcagcggaaagactatctcccgtcagtgggaggcttctgacaccatcgacaaagtcaaggcctacatccaggatgaggagggcatccctccagaccggcagcggactcctttctgccggcaaacaacttgaggaagggcaaacgctggctgagcactaacttcagaaggagagcaccccccacttggcgctgcgactcaggcgcggtacgcaggacct

SEQ ID NO: 111655 - DNA, 279 bp, Zea mays
  unsure (1)..(279): unsure at all n locations
  Clone ID: MRT4577_33316C.1
ccggnctagaattacaacactagactcacatttatctgtgttgcactcactacaatctttcaacttgtaaaacatcactttacagataaatgaataaggcgtccttctcacagggagaggcgcattgaacatttgccacaaacattttttttcttttaaccaacaaaacaaccaacagctaataaccctatacctcctgcacctaaaaaaccagcagatatctgtctaccctgttttgacacagaagtcgacaatcctgaatgatggcatacaacttca

SEQ ID NO: 111656 - DNA, 446 bp, Zea mays
  unsure (1)..(446): unsure at all n locations
  Clone ID: MRT4577_33317C.1
ttttttttttttttnnnnnnnnnnnnnnnnnnnnnnnnnnnnnnnnnnnnnnnnnnnnnnnnnnnnnnnnnnnnnnnnnnnnnnnnnnccgtttacaatggagttcatatctaaatttacctgtgatattggtcattctgccgggaacaccccattatttctggcatgttgatactattatgtacattctttttactgatcgagtcatcgagtaaataaatatatatgccgaccacgaccagcggaactctgaatgggagccccttggctaattaccaaatccctcgcgtatttacaccgctgcgtgaatcgaaaaaccttaaccgcctattcacgtacccgctctagcgccacaggcaacctgaagctcccatccattcgatcattggctttaaaaaccgccccacgccggccccaaaagctcccgaaccaaaagaacccttcct

SEQ ID NO: 111657 - DNA, 400 bp, Zea mays
  Clone ID: MRT4577_33318C.1
gtccctacccgcgccgatctttttggtttcatagtccccgtcgtcgccttgacccgaagatggaggtcgtgagtctgcacgatacagaatgcgaagaaaccatacacctcttctactgttcatagtgctaggagctcgccctctagatcgccgccagctccgacgccatctatctgcagttcatcatatggtggagcttcgactacagcttcccgaacctgttcataaacaatgcgcactacatacgtggacagcacgtgacgttgctaggctccttcagctcgccgtcgttcatattatactagatctctgtcatattcgcgctgcccaagctattcatcggctgattcacgctagtgctgacattcttacccacgtgctcattcgagcgcgttgagga

SEQ ID NO: 111658 - DNA, 366 bp, Zea mays
  Clone ID: MRT4577_33319C.1
cgagtacaagctttttttttttttttttttttttttttttttttttttttttttttttttttttttttttttttttttttttttttttttttttttttttttttttttttttttttcacccccccgggggggccccccaaggggggagtcccaaccaagggggggccgtttctaggggaacccgcccgggacccaagtttgggggtttcccgggcaaaattggttcccgggggaaaatgtgctccctttaaaaagccaccaacacaacaccccggctccagaaaggggaaacccgggggggccaaaaaagggggcgaacgaacaaaaaggggggtggccaaaatgcaccttttccaagggaaaaac

SEQ ID NO: 111659 - DNA, 249 bp, Zea mays
  Clone ID: MRT4577_3331C.1
gatctgcgctagatgctagtgttgtaacgcttttgattgttgatggatttcatatatgtactgtatttgtacatgaacagagcgtagtgtccattttcatagtgttcaaaaaaaaaaaaaaaaaaaaaaaaaaaaaaaaaaataaaaaatattataaataaaaaaaaaaataaaaaaaaaggggggccgataaaaaaaaactaactttactaacccgtgcatgcaactatataattatattatagagaa

SEQ ID NO: 111660 - DNA, 243 bp, Zea mays
  Clone ID: MRT4577_33320C.1
aaaaaaaaacaagtggtggcaagatgaacaaaaccttcagggttcaaaaattcccgggggttggcccaatcttgggaagtgggacaataataagccggttgaaaaaaacgggggtggccaaccacccctttgttgttcccaccgtataaagggggaaacccctggaagggggggaggctaacttaataaaggccaaagccagcattggccccttaatttgcaaggttgggcggcccccccccg

SEQ ID NO: 111661 - DNA, 382 bp, Zea mays
  Clone ID: MRT4577_33321C.1
ccacgcgtccgacacaaccaacaggtggtccaacgtcaagcttttttggtttggttcttttttaacgcaggtggaaaagcaaagcgtccccaaccttggtttcaacgacaccaccggattcaaccaccttgccggccgttggcttcggcagcttttcgtcgggcttgatgggacgtggcaagccggtggccgtggcccgcacccacggggctcggcgaggacgacgacccgcggctgccgtgccagcaacaacagaggccgtggcgaggcgacgacaggagcagcagcaacaacaaggcgttgcgaggagccgcggcggccgggacggacaggcgggagggggacgtctcgaggtgcggcggcgccatgttcgacaccacgc

SEQ ID NO: 111662 - DNA, 115 bp, Zea mays
  Clone ID: MRT4577_33322C.1
agcgtgtttgcccctgcagaacccgcccagcctgcatttttcgccagcccggatgtccgtgctcggcttgctggtccggcgccgcggttttctggtcggttggccggccatggtg

SEQ ID NO: 111663 - DNA, 337 bp, Zea mays
  Clone ID: MRT4577_33323C.1
ggaaaaaaaagggacttattgatctccacggggggataccagcagggcttttttttattacagggggccgctgacagatttttaaaagctactcatacagtaccccaggtccccaacaggggttttttcctcgcagcttttcaccaaaaaagcctacacagcacagcaccattttgcgcggtcactggtactgactggcaagctggccttccttgacaatgtatttctgccccgggaagtcctcccccttgaaatacctatccagaatgtccctaacaccatccggataccggagttgggcataaattgtagtcccaaaaatgtgaggggtcatggc

SEQ ID NO: 111664 - DNA, 589 bp, Zea mays
  unsure (1)..(589): unsure at all n locations
  Clone ID: MRT4577_33324C.1
tcgaggccggccgggccgggacttagaaacacaaacacaaagcacaattgcacaaacgcaagaagctcaacaagacaagaaactgaggcaagaccaagaagaagaggaggaagaagaaaaaggcctagaacaagatgggaggcgaaggcagcccccggaacggcagctcgtcggcgagcttcaccaccagcggcgacagcggcgcggagggcagcagcctgtttgacttcgacctgctgtctggcgtggacctcgcggcctgtgtcacggacggcgtggcgcccctccaccacgacgacgctgcaccgctgtgggcgcagcttggcctgggccgtcgcgtgggcgaccgcgtggtctccggcggactccgccgccgccgtagtcgccgcggcggcggagcgggaggcgagggtgcagaggtaccgcgagaagcgcaagaaccgcaggttccacaagaccatccgctacgcgtcccgcaaggcctacgccgaggcgcggccgaggatcaagggccgcttcgtcaagcgcgccgccggnacctcctcctcctcctcctcgggngncggnacaccccgacgacggcaacgac

SEQ ID NO: 111665 - DNA, 351 bp, Zea mays
  unsure (1)..(351): unsure at all n locations
  Clone ID: MRT4577_33325C.1
cccccccccttccgctcgggncngctctttggtttttgccaagccgccgggggcggcgctctgccctcgtntcccctcccacggcgccgngacaccaagatgacggcgcagaccgcggnggagctcgccacccagatcgagcagcagaagctcgnggagcagaagaccgaggcagaggaagttgcggtggcggatgaggnggaggaaggggagggggatgacgatgttgttctggntgatgctgaactcgntggggatgcccgtggcccgtcccgcntagccggcgcgcgacgaagagccggaaggccctgctggngcttggcctgaagcccctccctggngnccgccgcg

SEQ ID NO: 111666 - DNA, 1260 bp, Zea mays
  unsure (1)..(1260): unsure at all n locations
  Clone ID: MRT4577_33326C.1
cattgggtacctcgaggccggccgggacttagggaaaaaacacaaagcacaattgcacaaacgcaagaagctcaacaagacaagaaactgaggcaagaccaagaagaagaggaggaagaagaaaaaggcctagaacaagatgggaggcgaaggcagcacaagcccagcgcctgggggagccgcctgcgcggtctgcggcggcgccgcggtggtgtactgcgtggcggacgctgcggcgctctgcagcccctgcgatgccgctgtccacgccgcaaacctgctggcgtcgcgccatgagcgcgtgcctctttccatggccgccgtgccgtccgcatcaggcgcgtacgacgacctgttcgcgcccgacgacgtcgacgcggcggcgcccgcgcaggcgcaggggctgggcagcccccggaacggcagctcgtcggcgagcttcaccaccagcggcgacagcggcgcggagggcagcagcctgtttgacttcgacctgctgtctggcgtggacctcgcggcctgtgtcacggacggcgtggcgcccctccaccacgacgacgctgcaccgctgtgggcgcagcctggcctggccgtcgcgtgggcgaccgcgtggtctccggcggactccgccgccgccgtagtcgccgcggcggcggagcgggaggcgagggtgcagaggtaccgcgagaagcgcaagaaccgcaggttccacaagaccatccgctacgcgtcccgcaaggcctacgccgaggcgcggccgaggatcaagggccgcttcgtcaagcgcgccgccggnacctcctcctccctctcctcggccgccggaacaccccgacgacggcaacgacgccacgggcgccgctgccaagttctggctctccttctctgacgacgccagggacggcttctacgtggacgccggggcctacggggtcgtgccaagcttctagagagttcgttccgaacaactcacaagaaatccttggaaatggtcaccgcaggctcacatcgcttctggcggtggcgttcgcgcagcttgaaacaagctaagaaatgggcgcgcgccaatggcgccatcgttcttgttttgtgtcgtgccgtcagcccgtcattcatgcgggtagcattcgtggtgaaattcggccatcgctatttttttaatgatggctcggaatttcgaccccattttaatgtctatatatgtagctgtgttcatccattgtttgagtttttaatttctactccaagatcaattccatg

SEQ ID NO: 111667 - DNA, 1521 bp, Zea mays
  Clone ID: MRT4577_33327C.1
cattgggtacctcgaggccggccgggactcaaaaacacacgcaagcacgaacaaaacacaaagaagctcaagaaagctgaggcaagtccagaagaaggaaaaaaaagcctagaaggagagatgggaagaagcgaaggcagcacaagcccagcggctgggggagccgcctgcgcgtgcgcggtctgcggcggcgccgcggtggtgtactgcgcggcggacgctgcggcgctctgcagcccctgcgacaccgctgtgcacgctgcgaacctgctggcgtcgcgccacgagcgcgtgcccctttccatggtgactgctgcatccggcgtgtacgacgacgacctcttcgcgcccgacgacatcgacgcggcgtcgtcgtgggcgtcggcgcctgcgcagggtcagaggcaagggcagggaagctcccagaacgggagctcgtcggcgagcttcaccaccggcgacagcggcgcggagggcaggggcctgttcgacctgctgtccgacgtcgacctcgcggcctgtgtcacgggcggcggcggctacctgccggacggcgtggcgcccgtcgtccatcacggcgctgcacctctgtgggcgcagcccggtctgcccgccgccgcatggacggccacgtggtcgcccactgtcgtcgtccagggcgccgccgtggtcgccgcgcgcggcggcggagcgggaggcgagggtgcagaggtaccgcgagaagcgcgagaggcgcaagttccagaagaccatccgctacgcgtcccgcaaggcctatgccgaggcgcggcccaggatcaagggccgctttgtcaagcgcgccgccggcacctcctcctcctcctcctcgggtgccggcacatcggacagcatcgacgctgctgccaagttctggctctccttctccgacgacgccagggacggcttcttcgtggacgccggggcctacggggtcgtgccaagcttctagaaagtttgtgccttgaaaatttaggggtcacactcgcatcacagcgggcagcgcttctgggcttctggcggtggcgttcgcccagtttgaagcaagttaagcaaccgcccttctcgtttgtgtcgtgtcgtctcgtcattcatgtgagcagcatccgtggtgaaattccgccatcgctatttttaaatgatggcgcggaatttcgatgggtcatcaccagttggtgaacgaactaggggatttattgtgtcttgtaagatacaactttactgggttgtctatcaaattctgcgttggctcatcgtcatcgctttactggggctaacaatatagttgtggtggaaatctgccatccatgcttccatagcaagctcttagatgatcggaataaaaggggattttgatgggccaatcaggaagtgggtttggttaatctatatatatggagcatatagcttatgcagctgttcatccacatggtttcagtgttttgactttctatccaagttgattaattccatatatggtggtcccaataatcttatgccact

SEQ ID NO: 111668 - DNA, 397 bp, Zea mays
  Clone ID: MRT4577_33328C.1
tgcaatagctgaggtttgggtgaaagttaataaaggtaatgatttggtacatgcagaagcttccaagagcctagaagcaaagtagatgtggcctgagcaacactgtattccatatatttgccggatgtactaccttcacgcagtaggtttgtagtaaccttgttgtacatgggagagaataggggtctattgttatttgtagcacagtgaatcttgtaaggaatctcagttaccatttcaccaatgagaaatactccatttttaacgcatgcatggggagatgatgatgattgatgatcaattttaccagttaatatgtccggggcaatcctccatttttttctccaagacagggacgttccaacaggttaaccgccaggtgttttgtgcctttggg

SEQ ID NO: 111669 - DNA, 355 bp, Zea mays
  Clone ID: MRT4577_33329C.1
attcggctcgagagcgttgggtaaaatttgttacccggatgctgtttatcctccattttcttgggtccttcttgtttatgagtcacactttgcggattcaaataataaataaagtcttgaatagctgctgtgcgttgatcaataaagaaaaaggtgctggcaactggcagctggggcagaaggacccgaccgacgaggacaagctgatgaccgcgcaagcagcgagcaaacaatactgccgggcgtctcgtgctctgaggatctgtcgaccaaggactaaattgcgaggcagccacagggggaggaaggtttacggaaagggaaaggacttgaagaacgggagaaagaaatggat

SEQ ID NO: 111670 - DNA, 206 bp, Zea mays
  unsure (1)..(206): unsure at all n locations
  Clone ID: MRT4577_3332C.1
tgttanaatgtccacctcaagttctacatcgtcttcttcaaggcatagggacgagagggattcgagtaggacggagagagatagggacagagacaaggacagggacagggacagagacagggcgaggtcttcgaggaggagtcggagtcggagtcggagcagggagagagagagggacagggacaaagataggaggaggaattatc

SEQ ID NO: 111671 - DNA, 511 bp, Zea mays
  Clone ID: MRT4577_33330C.1
gcccgcggcgggccccacggcgcggccgcgactgggggcgctcggcggttcctgtacgagctcctgcacgggcgcaccccgttcgcgggcgccgacaacgaggccacgctccgcaacatcgcgcgccgcccgctgtccttccccgctgccggtgacgccgacgcgcgcgacctcatcgcccgcctcctcgccaaggacccccgccagcggttggggtcccggcgcggcgccgccgacgtgaaggcgcacccgttcttccgcgggctcaacttcgcgctgctccggtcctcccgcccgcccgtcgtccccgccgcgtcgcgctccccgctgcagcgctcgcagtcctgcagcgcggcgcgcacgaagccgaagccgccgccggacgcccggttcgacctgttctgacacgaccgttgccggcgtcacgcacgtgcgtgttgacctagttgcatcactcgccattgtacagagggtttaacgagctgctagtagcagcagtacgtcattaact

SEQ ID NO: 111672 - DNA, 469 bp, Zea mays
  Clone ID: MRT4577_33331C.1
cgttttttttttttttttttttttattttttttttttttttttttttttttttttttttttttttttttttttttttttttttttttttttttttttttatatttttttttttttttttttttttatttgttttttttttttttatatttttttgagggggaggagactaatccaataaacagtttttggataaaaaaaaaatgcgtggtttcctacttatcaaattccccagttatattaaaaaacatttgaaagagggttttcgggccatgccttattattggaaaaaaggtttttccatttatacagcccgcctcaaaaaggcttttttttaaaaaaaaaaaaaaggggggccctaatttttttgggggtaaaacaaaaaaaaaccttcttaatcaaagggcttgggtggtttccaccatgaaatggagggccaaaaggggagactatttttttttacaatttaac

SEQ ID NO: 111673 - DNA, 1196 bp, Zea mays
  Clone ID: MRT4577_33332C.1
ggtacccccgagttcggccgggcgaggaggtggaggagcgagcgtgacctcgcttaggagacggcgacggaacggagcgggcgcaggtggatggctgcggcagcggcatggtcatcgaaggctccaaggttaacaacgttaacgccatgtccggcggctgtggctctggttgtggtggtggttgcggcagtggcatggtcatcgaaggctccaaggccaacaacgccatgtccggtggctgtggctctggttgcggtggtggatgcggcagcggcatgctcatcgaaggctccaaggccaacaaagccatgtccggcggctgtggctctggttgtggtggtggttgcggcagcggcatggtcatcgaatgctccaaggccaacaacaccatgtccggcggctgtggctctggttgcggtggtggttgcggcagtggcatggtcatcgaaggctccaaggccaacaacgccatgtccggcggctgtggctctggttgtggtggtggttgcggcagtggcatggtcaacgaaggctccaaggccgccaacaccatgtccggcggctgtggctccggttgcggtggtggttgcggtgccctgttcaacgctagcactgctgccggagagggcctgcacaataagtcggctgggtgcggcggcggcgggtgcggctccgggtgcggcggtggcggcggctgtggtagcggcatggctatcgaaggcttcaaggccaaccacgccaagtctggtggctgcggctctggctgcggtggtggtggctgcggcaccctgttcagctccagcgctgcggccagccaaggccagtccagatccggcggctgcggctctggctgcggtggtggaggctgtggcactggcagcatggtcgctgaaggctccaacggcgggaacgccaagtccggcggctgtggcggcggttgcggtggcggaggtggctgcggcggcggaggctgtggcgggggttgcggcgccgtgttcaacgcatgatctcggtggagtggaggcatttgtgcagacatgcagtcgtcgtcgtctactgctagataccacatgctacagcatactgtgtattgctgtgcataatctactaaataaaaggaatgaataaacaatggatggatcggctgcctccgtggcgtttctgcaaacgaaaaaatctcccccgttgttgggtgc

SEQ ID NO: 111674 - DNA, 163 bp, Zea mays
  Clone ID: MRT4577_33333C.1
tttgcacgtatttttttacagtctaaattttgactgctgagaagtttctattgtacaaaacttcatttaaaaggtttttctactgaatccagggtattctgcagatcgaagcctgtgtactcggctaccaaatggcaaaaagcaacaataaacagtttgattt

SEQ ID NO: 111675 - DNA, 870 bp, Zea mays
  Clone ID: MRT4577_33334C.1
cgaaggccaatctcatttccggaggcgttggcaccctgttgagctccaacgccatgggtggtgagggccagcaggcccattcagctggctgtggctctggctgtggtggtggctgcggcagcggcatgctcatcaaaggctccaaggttaacaacgttaacgccatgtccggcggctgctgctctggttgtggcgccggtctcggcagcctcctggtcatcgaaggctacaaggacatctacatcgacgtccggcggctgtggctctggttgtggcgtgttcaacggtagcactgcggtcatcgagggcctgcacaataagtcggctggctgcggcggcggcgggtgcggctccgggtgtggcggcggcggcggctgtggtagcggcatggctatcgaaggctccaaggccaaccacgccaagtctggtggctgcggctctggctgcggtggtggctgcggcaccctgttcagctccagcgctgcggccggccaaggccagtccagatccggcggctgcggctctggctgcggtggaggctgtggcactggcagcatggtcgctgaaggctccaacggcgggcacgccaagtccggcggctgtggcggcggctgcggtggcggaggtggatgcggcggcggaggctgtggcgggggttgcggcaccgtgttcaacgcatgatctcggtggagtggaggcatttgtgcagacatgcagtcgtcgtcgtctactgctagataccacatgctacagcatactgtgtattgctgtgcataatctactaaataaaaggaatgaataaacaatggatggatcggctgcctccgtggcgtttctgccaacgaaaaattcccggtgttgttgggggcc

SEQ ID NO: 111676 - DNA, 493 bp, Zea mays
  Clone ID: MRT4577_33335C.1
gggggggggaattttcttacccaaatttaccggggaacaaatttttttttttttttttgggggggggtgccaaaaggtaaattttaaaaaaattcctggccaaggggcccccccctattaaaaagaagagaggggttccttaaacttaaaaaaaggcccccccccccggcctttaaaccccttttagggccaacaaaattttgacccaaaaaaaaaagggaaaaaaaccccgggggtgggaaatccccacaaggccccccccccaaaaaaaaaaaacctccaagggggggggggaaaaaaaaaaaaaaggggggggtttaaaaaaaaaaaaacttaaatcctttgggaaaaaaacttatcaaaagggaacccctccttccaagggccaaccccaaaaaaaaaaaaaaaaaaacccggttggcgttgggttaaatttccccctttaaaaaaacaaattttttttttttttggggggccccacccccccttaggg

SEQ ID NO: 111677 - DNA, 3663 bp, Zea mays
  unsure (1)..(3663): unsure at all n locations
  Clone ID: MRT4577_33336C.1
aattcggcacgaggagaaactcgatgttggatttaccgagactactgaacagttcgagagtacctttggtgtaagatactggaaggctggatgtatgtaccgtggcaacgtgccatctcctgtgacatccactcctcagacattcagtgctgaggttggtactgggtctgacatctgcaaagctcagaaagatcttaatgcccttgatataacagttgtagagttatatttacaaattgtagacatcaagaatttaccatctgctgttcaaaaagaaaatgtgtatgtacggttcaccaagaatcaatcagatatgttcatcagtgacggcggcaggttggatatctcaacagttacaggggaagaacaccggagtttgtttacagtgtgaacctaccggagaactcattcttgcagtaatggttgatcaattatcaaagaaaccagaaccgatagggaaggtttctttcccactgcacgatttgacagggcctgattctaagctctccttcgagaagtggtttgaactgaaagctcatggtgggcatgccgcttcacctcctgttagtcttcgtgttgcagcttctgctactgtcccaagcagcgctcagaaggtgttcaccatggtcaggatggagccattctctctcaagtcatgtcttttgccacattccatcaaggatcagaacacgggcagctggactcgtttcgtaaatgattgtggtaccgagcttatccgtctccagataagagagcacaaggcgaagaatagcatggtggtcgttcgagaattggttggagtattgaagtcaacaaaaaagcaaattcagcttgcagaattcaaggaaaacaagtggaccctaaaagactccaacttgccaataagtcatggcactgatggcagtctactcgatctcaaaggtgacaaccatctgatcaagctttatcggggaaggaaactggaatacgagcgcaaatgttgcagtgctcactctgaggacgtatcagctgttactgctgtaaagttctgtgctgaacatccatatggcaaagccgttgccttgctagacactgaagctcagcttatcatggtgaacgaggattggctcctacttccatggatctccatatcagtcctgtttatggacggcgatggcagtatgaaacttagcggcggtgccatggttcagaaaggtacagtgtttggatccgacactagcatggtgctagacacacagaccgtcggagcagggagcgtggcaaccaatctagcacaatgtggcacttgcagcgccgtgttcggtggtgatgataaagaaatggcaaactgcaaggttgagcatgtgagctctggcgcttctcgcacagtcgttgcaagtggtgagaatgggcacactgagactgctggctgtggaggcggctgtggtagcaattgtggacccatgatggctgaagaccccaaggccggcaatgccaagtctggaggctgtggttcggggtgtggtggtggctgcggtggcgcgggaggttgtcggaccatggccaacgaaggccaatccaggtccggaggcgttggcaccttgttgagctccaacgccatgggtggtgagggccagcaggcccattcagctggctgtggctccggctgtggtggtggctgcggcagcggcatgctcatcgaaggctccaaggccaacaacgccatgtccggtggctgtggctctggttgcggtggtggatgcggcagcgagcttcttgacgcccaccgcatcctcgccgccgtccagaacgcgcagcgcagcgccaagcgccgcggcgcggggcccgcgaggcccgtcattgccgtcaccccgaccaccacctccgcgctccaggtgccatccctgacgtctctggcgcacaccctccgcctcgtcgacgcccagctcgtgtggatcgtcgtcgagccggggcaccgcaccgacgccgtcgccgcggtgctctcccgctccaacctcgacttcctccacatcaccggccctggagactccaccgcaaacctgcgaatgcacgccctcagggagattcgggcgaagcggatggacggcatcgtggtgttcgccgacgagaacagcatcctccgtacggagctgttcgacgaggcgcagaaggtgaccaccgtgggcgccgtgcccgtcggcatcctcggcgaggacgacggcaccagcgagtcctccctccaggcgccgtcgtgcgacgcggaggggaagctggtgggctaccacgtctcggaggagaccgtgctgccggcgaaccggagcgacatgctgatggccagcaggctggagtgggccggcttcgtggtgaacgcgcgggcgctgtgggaggacaccaaggagcggccgctgtgggtgcgcgatctcagcgccatcgacgatgcagacgctcgcgccgccagccctctcgcgctcgtcaccgacgccggccgcgtcgagccgctcgccagctgcacccaggcggcttctcgcgtggtcgctgcgttccgacagtctccacgaggtcaaattcccacacgagtggaaaatcgatccggcactgctgaataccggtgcccgtcagcaaactgttcaaccagagacacaacccatgcaaactactctagcgagcactgaagaccagcactagaggacattttttttttgtggacagtagaagtcagagcaaatcaggcagctgttgctccccaagatttgtcaaaagtgtttcctcaagattttttttgacgaaagtccccagttcccactgatgcaccgtcggtgccacctctgcaaagtacagaagcctcagctcagctcatttctttggatccaaaagagctactagagcacatcagttcatgggtcacttcgtcgttgcttcaccttgcaatcgatgtggaccccgcacggatggttncgtcagaagcaggcgtccaggaggcagcagcagcagagggcagccaagcatccttccatgaaggaaggcccgctgctctgctgctgctgtgaaggcggctgcgcgtactgcggcgggtagccctgctgtgggtaaccctgctgcgggtagccctgcgccggcggggggtagccggccggcgggtaccccgctggcgggtagccgtccttccccgggtagccttgctgcggcgggacgccgacggggggctgctggccgtagtagctcatcttccttttccttgatcggaggcggagcaaggtcaggggagctcctgctgcttcgggtttggggggctctggttgcggtggtggatgcggcagcggcatgctcatcgaagtctccaaggccaacaacgccatgtccggcggctgtggctctggttgcggtggtggttgcggcagcggcatggttaacgaaggctccaaggccaacaacgccatgtccggcggctgtggctccggttgcggcggtggttgcggcgccctgttcaacgctagcactgctgccggagagggcctgcacaataagtcggctggctgcggcggcggcgggtgcggctccgggtgtggcggcggcggcggctgggtagcggcatggctatcgaaggcttcaaggccaaccacgccaagtctggtggctgcggctctggctgcggtggtggctgcggcacccgttcagctccagcgc

SEQ ID NO: 111678 - DNA, 113 bp, Zea mays
  Clone ID: MRT4577_33337C.1
cagcaggatgatccgtagagttctacgcgatgagcgagcgattgattagctcgtgcgtgctgtgcaaggagagtaacccagcagatcgatgcgtctatgcgggtagtacagga

SEQ ID NO: 111679 - DNA, 266 bp, Zea mays
  Clone ID: MRT4577_33338C.1
tgtccgccgggctgtcgacggagctccgccacaagtacaacgtgcgctccatctcgatctgcaaggatgacgaggtgcttctcgtgcgcggcatctacaaggtccgcgaggggaaggttgtgcaggtctaacgccgccgctgggttatccacgtcgagcggatcacccgcgagaaggtgaacggtctccaccgtgaacgtgggcatccatccctccaaggtgatcgtcactatgctgatgctcgacaatgaccgcaatgcgctcct

SEQ ID NO: 111680 - DNA, 810 bp, Zea mays
  Clone ID: MRT4577_33339C.1
gtcggccgggattctccactccggtatccgaccagccttccccaccagaccctgagcgccgccgctgccactccccttggccacagttcgtcggcgacacaccctttccctagctaagccccccatcttcaacatccccagcgatgatctggttgtaatcctcgacagcatcgtcatccccaagctagtggaggacctcctcgatagcgtcgtcgtcgttgtcccacccctaccgaaccccccatggccgactcccctctaagggcgtcaccccctctcctactcgagggtctggctccgctcgaggtcctccatgatacctcggcggatcctctctccttttgtccagcgccgaccccaaattcaaatccactcatctccaccaatgtataaaatgttggcgtgcacgttagtgtaaatccttcttttttatgtaatggtatttttttttgtttttaggagtttcagatagattgggatacaatagaaatttagcctagatgggatgaagaaggtcgacaagaagttcctttagaagaagggatgtatgacacattaggattgagggaggaggatgaaagggaaggtagagaaaggcaagaagcatgcatgggaaggtcctccggtgttgatggttatgaatacattgatgttgtagctgcgtttcctgtgaagaacacctaccagatgagtgttttactatgtgatagaacaaatcctataatgaagatagggagcttgtatgaaggaatttatacttgctatgaggcatcatgaaataaacaatgaattcgagttaggcattgaatc

SEQ ID NO: 111681 - DNA, 805 bp, Zea mays
  Clone ID: MRT4577_3333C.1
ccactcttccgcaccagcgctttccgtcccgtactcccgtgtaccctgtcccgtcctcctagctcgcattccgatttccgagttccagccagcgagcgagccaacccactgatccggcaccaaccaccgctccttcttccttccttccttccccagttcccctcgtctcaccagtcaccaaggttccgagagcagagcgagataaaaaaaaaggtaatccgacggaaacgacaagggcgcggcgagggcggggacagggtcgggaaggccctgggcgcgggggcgccaagcgcatggcatcgtcgagggtgatgccgtcctcctcgccgtcgcacacggcctctgatctcgcgcgcctagcgcaggccgccagcaggcccggcggcgggggcagcgggctgggctccatgaacgtggaggagctcctccgcggcatctacagcgacatgcccaccccggcgccgcccgcgtcggagcccgaacgcccgaggtcgccggccccggcgccggaggtcgccacgcggaggacggcggaggaggtgtggaaggagatcaccggcggaggtggcagtggggaacccgtgccccccgtggcggctcaggctgccgtccccgctggtggtggtggcgccggcggcccggagatgacgctggaggacttcctggccagggaggagggcgcggtgaaggaggatggggttagggtttcgggcccctctgcgccggccatggggttcctgggcggagcggagggcgtgggtgtgcctggcggcgggagcgggaggggaaggaagcggcagctcat

SEQ ID NO: 111682 - DNA, 343 bp, Zea mays
  Clone ID: MRT4577_33340C.1
agaaagggttccgcgcccgcggcgagagcctgggaggctgggaggaggaagaaccctatcgactcgattcttcgcccatcgccttggcgccccgatccagttggtggcctatggcgggcgtgggcgaggacgtggcggcggccatcgagcggctgctggagcagcagctgctggagcagcggccctccctcggcgtgggcgacgagggccttggcgtcgaccctctcaacgccgaccttctcgaggtttatgaggagctttttgctgcgactaagagatgccggggagggtttcctccatttgaaacgctctagggcactgattcgaggggtcatgagctttc

SEQ ID NO: 111683 - DNA, 441 bp, Zea mays
  Clone ID: MRT4577_33341C.1
gccgtagcggggcgtccttggcgcccagcagagcgtagggctgctcatcccgcgcttcttagtgttatactttcggcgatcgagccgtataggcgcgggtttcgtcgcgtgctgcgcgccgtcgccactagaagggtggagcgggctgctcttcgcaagagcctacctgtatactaaggaagatcagcagatcggcgcgggctgtttgccgagagttcctggctgctccgggggcggaatgggacaggctgaaagctcgtgctgcgctggaggccgcttgtgacgcaattccaatttccataaaccgaaggctagataaatatactctcggagttgtttttggatctaaaaaactgaaaaattaagaataatgtatggtgggataggaaaaacaatggatttttatgcaaaagttttgttcctttaggatttcaggataag

SEQ ID NO: 111684 - DNA, 283 bp, Zea mays
  Clone ID: MRT4577_33342C.1
cagacgctggcgggacgcgtgggcgggacgcgtgggcgagcaagaaggggaagccaggttgtggttcgacaggcgtgagccctagcgaacttcccggcaacggcgatggagatgggagccgaggtgatcgaggtgtcgagcgacgaagacgaggagcctgtacccagcagtaccggtgtcgtgcggggctccgggtcgtggggtcccgacgtcaagccgcaggtggtgcggcgacgtcgatgtgaagccggtggttgttgtggcggcggcggtccaccccccg

SEQ ID NO: 111685 - DNA, 453 bp, Zea mays
  Clone ID: MRT4577_33343C.1
aaccgccccaacctaaattcccctttgggggcgggaaaacccggggggggggggcccagcctggccccccaagggggcccgggcaaggggtttacctgggacccaccccaattcccagacacaaacccccccgggtttggtttccaaggccaccccccccccgggggagggttggggaattcgcccccccggggccctcctggggggggggggccccttttcaagccccctgggggggatcgaaccctaaatgccccccccccgggaccaccaggggaggcccccttccccccctcgaaaggggggggggcccaaatttcaaaaaaacgttgccggccccaaagcccggcaaacccccaagctttcaaaaatcaccgggtcggcgggcagagccccggaaaaccttttttcgaaaaaaagcccccctccccgaagttggggtttggtgccccc

SEQ ID NO: 111686 - DNA, 394 bp, Zea mays
  unsure (1)..(394): unsure at all n locations
  Clone ID: MRT4577_33344C.1
agacctcctgagatcctttgcaccanccattcggcaaagcttgatattatctgggatgggtgcnagtgtttccatagccaccatgccactagaatcaccaaggaattgaagcccttttggtgagttttgggcacttgtaattctgatgccctccaccagttctgaaacacttcatctgtactatctggagccagaggcagtaaaccaaacctgatcaggacctttgtccaagtttctctagcaaaaacgcaagacacaaggacatggtggattgtttcatcctgctggtcacagagaggacatttataaggataatctagccccctccgggccaaacggtctgctgtccagcatttgttcaaaggtgccaaccaaataaaaaatttgcatttct

SEQ ID NO: 111687 - DNA, 439 bp, Zea mays
  unsure (1)..(439): unsure at all n locations
  Clone ID: MRT4577_33345C.1
caggnaccgaaccggaggggcggggtagacccacgcgtacggcgcggagctggagctggagacgctgctgaaggcctcgacctacggcgcttggcgccgcttttgggggcatcgaaaacaaggccgatctggccgacggcgcggcgctggcggtgcgccggatcgacagcgagtgttcgggggtcctgcacttcaacgagctggacacgcacatgcgccccgtgctgaacctgctgcacaacaacatcctacctctgcgcagcttgtactggggccctgaccaaatgctcataattcacaacttctccatcaacggcaatctcgccaaccactacgttaaaaggaagcaggggtcgtacgcgatcaacctccggtggagcgcacgggtccacataacgcgctgcgtgtccagaagcccagcgtaccttcacaacaagaa

SEQ ID NO: 111688 - DNA, 173 bp, Zea mays
  Clone ID: MRT4577_33346C.1
acagaaggactgttttatacgcagcccgagcaacatattccggctaacactatgtatagacagcaaatacaagtaacaaagcaggttcccacttgtataagacatagcccaccaaccatagctaatagacgaaaccgtgagatgatgactcaagtagaacacagggtacaggt

SEQ ID NO: 111689 - DNA, 259 bp, Zea mays
  Clone ID: MRT4577_33347C.1
ttttttttttttttttttttttatattttttttaagggaggataaaaatgctatgacaatcaatcaatgcattataaaaacaaacacttaaaccacttatcttcccattttacttgttctcaaaataagcaataccccttaggaaaattgcccgggttcaacgcaaggattactaacacacccttttgccatgtttttagtccccaggccaccacctattttgatcttttctagtgtttccaaatcaatttcgttaacc

SEQ ID NO: 111690 - DNA, 301 bp, Zea mays
  Clone ID: MRT4577_33349C.1
cccacgcgtccgcggacgcgtgcgtggagatcaggaccaccaagatccaaaccgcctggggagagatctcgtacgcatggcccacaatgtggtgcacacggctgcagctatagcgcatggctcgatcgacacagatgtgctgagcagattatagcttacctgatgccactgtgccatatccatgcatgctaggatcccaattccgctcctcgacagcaggtctcccatgtggtggttgctgcctacgatgggcgaggtagaagacgtactagctgaggacgactacgactacgacgaggac

SEQ ID NO: 111691 - DNA, 248 bp, Zea mays
  Clone ID: MRT4577_3334C.1
aataaccaaaaatgcacacccaggtacgggtcgggctgaacaactagatatatagagtgagtgatccaacttaaatccaactgccggttggtgcaaaggtactgcatctgtcctgatttagaattctatgaaacactcgccaaaaataggcatgtttaaatcgatgacgatgataatattcacatcaaccaaacacatatcatgacagttcttatgaacagagtaaaatgacaaacaagatctacatt

SEQ ID NO: 111692 - DNA, 1583 bp, Zea mays
  Clone ID: MRT4577_33350C.1
gggaccctcgggctgccggattccgtcctgggtccgtcggttaagcttccaacaatctctgcggagtaggtcgcctgacgaactaccgagacgtgcgtctcgcttctcccttcctcagctgctggcccgctgcctgcagccattgccccgctcctcgaggtcaaatggcccctgcccccgctctcaccgccacatccgtcctgaagcgatcccacctacccggcgtccactcgttggccggtcgccggcagccggggcgggaccgcgtctcggtgctttctccagcgatcccgccgccccgcgtttcatggcagcaaggatctggagtggttgctaagaggctcctctgggcgagtgcgagtggttccttcgagaaagataacatcggggaggacgtggtgttgccttctcagatagaggtggagaataaagtagatttgttgaagattttgaagagtgccaactcaattattccccatatagtgctggggagtacaattctcgcgctggtgtacccgccttcgttcacatggttcactaccaggtactatgcaccagctttggggttcttgatgtttgctgttggtgtaaactcaagcgccaatgatttcattgaagcaataaaaaggccagatgctattgctgcgggctatatcggacagtttgtcatcaagcctttgtttggattcctttttggcactcttgcggttgcagttcttaacctcccagctgctctaggtgctggcataatgttggtttcatgcgtgagcggagcacaactttcaaactacgcaactttcttgacggatccacatatggctcctctcagcattgttatgacgtcattgtcaacagctactgcagtttttgtcaccccaacattatcttactttcttattggccagaaattacctgtagatgtcaaagggatgatgtccagcatcgttcaaatagttgttgctccaattgctgccggattgcttctgaatagattcctaccaaggctctgtgcagctattcagccatttctcccttcgatgtcggtgtttgtcactgccctgtgtgttggctcaccattggcaataaatatcaaggctgttttgtcgccatttggattaaccatagtgctgctcctttttgcattccacacctcatcttttgtagctggttatcatcttgctggtacttggtttcgcaagtcagacgacgtaaaggcactacaaaggacaatatcttttgagacaggaatgcaaagcagccttcttgctcttgctttagcaaataagttcttcccagatccactagtgggtgtgcctccagccatatcggttgtgttgatgtccttaatgggatttgctcttgtcatggtatggtccaagaaaagagaagcctaatttccttaatcaattatgcgctgcgctgttgttttctgctcttatttatgtagagtaggtagaatttttcatgcttcaaatttgaaactcttgtagcgttccttctctccatctgagtgagcttgcaagtgctttctttctctctcactcactcactaaattattttccagatttacattttttttgtg

SEQ ID NO: 111693 - DNA, 257 bp, Zea mays
  Clone ID: MRT4577_33351C.1
atggccgcacccttgcggattacaacatggggaatgtgagcaccctccaggtggtgctccgcctcaagggtggcatgcacatcttcgtgaagacactcactggcatgacaatcacccacatggacaagtctacagatgccattgacaatgtcaaggacaagatccaggacacggagggcatcctactcggaccagtaacgcctcatcattacctgctagcatctagaagatggcctcaccatggcggactacaacat

SEQ ID NO: 111694 - DNA, 451 bp, Zea mays
  Clone ID: MRT4577_33352C.1
ccttttcgtccgatgtttttttttgttccttttataggtcaccccaaatctttatggcaatctggtggctaatgtagctgcaggtattgctggaggcactggtgtcatgcctggaggtagagttttaatatgagttgagtgaatcctacacgtccaaatagcatgcatagttttatgttttagttgtatttgcatctgctgctgtgtgatgttttttttttgctcgtatactgcatctgttaacgagtttattttcatacagctggtaatctttttcatgagttctgtacagcaagcttgggcaagttttctacttgtatttgagcactagcagatgcaatatacatatttggaaggcatgtggatctttacgtgctgaatctttcaggtaatgtggggcaggaccatgctatcttcgagcaaggtgcttctgtaggaaatgttggaaatg

SEQ ID NO: 111695 - DNA, 284 bp, Zea mays
  Clone ID: MRT4577_33353C.1
gggaaggaaaaaagcatttttttttaccagggggagttttaaacttcccatttgtaattaaaaacaaaaagacacccttttaatttttttcaaacaaaaaccggtacccgggggacccgggggggggcaaaaaaaacccgtgaaaaacacaaacggggggtgggaaattttgccgcaaaaaaaacatttgaagggggggattttcgccctcaaacgggggatgaaacccttttccctctttgggacccggtaataattgttttttaccccaacccatatttttt

SEQ ID NO: 111696 - DNA, 536 bp, Zea mays
  Clone ID: MRT4577_33354C.1
tttttttttttttttaaccaaagagaataatatataatgtgagagggtggcagaggccgctctatgaaatttgcatggagttaattaacctcttagttaattaatacaaataattccgaacacctagctagctgctcttgcttagtacaaaaaaaactacgagtatccatatactatatatgcacaggttaattgtttattcgccggctagctagattatcaggggcaggatccgttgggagcttggcagttgtggttgttggagcccggcccttgtagcacctgcatgatcatctccagccagccgccgtctgctgtcgctaccgccggcgactgcatcagcagcagcggcctcgccgcgacgaccacgttgcagcactgcatcagcagcacgacggccaccagcactgcccagctcatcgagtcatcgtcgatgatgctgccatacgtactatatatataccctgatcaagttcctgcgctagctaggccgggctagcacagagaagtgtagtgattgccttgtgccgaattct

SEQ ID NO: 111697 - DNA, 400 bp, Zea mays
  Clone ID: MRT4577_33355C.1
cgaaactctagctctgcttgcggcgggcggtagcgactgcgcgcgacgtggaggaggcacccccacccgcccactcatccgccccccgccgtcctcctcccgcggttccacggtgcacggtgcaggatccactcttctcgtcccctccgcccgcccgtcgtcgccctcctccatggatccactgcgctcggcgcaggagctcttcacgcgtgtcgccctcctccatggatccactgcgctcgacgcaggagcaacaaggggcgcgcgcgatggcaggcggcggtctccaaggagcgaagaagcgcaagcgcgagcacgcaagtcctcgaaaagaagtcccgtccttggcgcgcccccgtcaggtgccgccggctgcgtgcgttaacacccagccaagaac

SEQ ID NO: 111698 - DNA, 266 bp, Zea mays
  Clone ID: MRT4577_33356C.1
cccacgcgtacgcggacgcgtgggcggatcctccgcgtattccggcttggtggggctggacggacccactctgccggccgctcgttgttctccccgtcatcacccctgccttgttctctcggattccagcagcacgtaaagctcgtcaacagcgtctcccacccggacgccatgcactcccgacgtcacaaccgatgctacgaggcatgcggtgcccctcgaggtggtggccatcgaggaggaagaggagggggaggaggaggagg

SEQ ID NO: 111699 - DNA, 563 bp, Zea mays
  Clone ID: MRT4577_33357C.1
gccccttctcgagttttttttttttttttttttttttttttttttttttttttttttttttttttttggaacccaaagaaggctaattttttgtggaccggccttgagccttataacattgggcccaacctctaatccttttgaaaggagttcttgttttttccaacaccacctcccaattttgatctttttgtccggatcgaaaagggcaatctcaaacaacttgggctaccacctcccattgtttcctcacttggaaaaatctaaagtggtgatggtgatcaaaacgccctgaaaggggatgccgacgtgtgaatcccttatgcttaaaggagtttggacccacatgaccgaaaggaacccccgccctcccggttaggatttagagggggggtccctttgacatggcaaccaagattttttagggccagggcacccggtcgcgaacccttttgaatccttcctgagacttggggacccatttccaatccttttttaagttttggcggaagaacacctctagggaagaggggggggaaaagaaattcattttttaaaacaaa

SEQ ID NO: 111700 - DNA, 428 bp, Zea mays
  Clone ID: MRT4577_33358C.1
aagctcggaattcggctcagcgcgatgtctcccccgtttcttgtgcacacctagcccaaccaacaaggggggttcttttttcataatgctggctttctctcacggcacactaggtgtaactcatgacgaagctcaagatgtccaccagaagcctgcagtgccagctgtggtgcatccggcggacacaatttgtgctgatcggaactgcacagaagctaaagctgaccatctagataagatccacaagcccttcggcttgcctagctgaacatgcacagtgaatcagtacaggtcatacaactacgaagtaaccgaatgcacccgaagcctatgtcgctcgatggcagatccgtgtacagcgggtccgaggattgaaggaggcacactaccaactagatagcttgattgcggagccgcctacagaaagc

SEQ ID NO: 111701 - DNA, 573 bp, Zea mays
  Clone ID: MRT4577_33359C.1
ggccggggcttcatgtagcgctgaccggagaggcttgctaacctgcgtaagacagagaaagccgagcattagcggcgctgataatggctctcccgtggcttagctgctgtctctaccgttaagtatacccccgcaggcgttcgcaggccactgacatagttgtctgtgcctcctgtggagtattcgcgggcaccgcagacctctagctcatccaccatagggctgcataagaagattatgttcgataactggagccaaaggacctgagtgctacagcgctagaaggatgcctagcacatacttgcatcgttgtgggtacatccagctcaaagccacgggactgactaccatgatgcataagcgtcagcaacataagtatgagtacccttacggactctccttgtgacgattgtattcacatgcacgcattgctcttgcatgtaagctatacgaggggagtgtgatcagatgacttgcacctcattacacacagaaactgtgtgggaagccgtgtcttatgagcttcaggcgtttcaatatatgggtacacaaaaatacagaacaaagcgggcc

SEQ ID NO: 111702 - DNA, 1223 bp, Zea mays
  Clone ID: MRT4577_3335C.1
tttgattcgaattcgcatctgggttgctcgccaaaccccagctttttttttttttttttttcttactgacatctactagttataggtagaccgcatcaccaaatccacatgtgacagtgacatatcgaaccagagagtggaagctagaaaacctcagatgaagagcgctacaacactcagaaccggcgaaccgaagacctggggttgaccctcctcaccttggtggccatggaaacggcgccggacgcggcggaagccttcggcgccgcctcgcggcgcctggccgtcgtcctcgcccccaagcccccgcgcgaggacctcggccccaagtctccaccgcggcatgccgcgaagtcgacggctggcatagacctcctcacggactccgcgccgctggcggcgtaggccttcttggctacgcggcgtttggacagctcgacggcgacacaggggttctcggccatcgtctcggggtccactgccgcggacgcgaactcctcggaatagaaggggcaagccctgcttgcgcttgagccgctcgttgcggcgcgccgagtagaggtcgtagagcctgccccgcacgaagagcgggccaccagacgggcgtgcccgctgtcctggcaatcgcggcgaggttgagcgccacaagctcgtcgtgggcgtccgcgccggccgggaggaggttctccttgtcgaaccccaccctcgccgagggggacgacggagccgcggcgaggaggaagttctccttgtcggccgccgcccttgccggaggaggcgacgacgcagccaggtcgagcttgacgcgacttggtggctggagcgcggcggtcacgcgcgcgcgcatagggctcggttcggcgcggatcggcgacgggagagcggagatggaggcgcgcatcgggctgggctcgaagcggaccggcgacgggatcgcgcagacggacgcgcgcatcggagccgccgccttcttcatcgatcctggaggcgtttgcacggaggaggctggcacgaggggcgggcggggcacccggggcgggcgcgggcggaggcggcgcggagagacggcgagagcaggacggcggtccatgggtcggtcggtcggtcggtcggtcggctggccggggggaggagagattgcttctcggtctccggcgtcctcctcgtcggggacgcggggggaagacgaggcgaggaggctcttaagcggaggtgaagaggcg

SEQ ID NO: 111703 - DNA, 402 bp, Zea mays
  unsure (1)..(402): unsure at all n locations
  Clone ID: MRT4577_33360C.1
actaacagtttgctgaaggcaaangcaatttttttgactgaattggcacgccctttcctgcaatcttgatcactgaacagtatggtcgtttactcttttgtagtaattttagaggtgcgtacaattgccagggtaactgccatgacaaatcattgtttattaaatcaccatcagattgatctaccagtctgtatttttgttgatacctctcgagcaattcctcgctgcttcttatttggtattccttttccagtactattcgacattgaggattgttattttcacatgtaaaaacaaagcgccaatgatatttggtacttcttttgcagaactatacagacagactccttccacgagagccatttccaatccttcgacaggtcactagccaccttgagaagc

SEQ ID NO: 111704 - DNA, 224 bp, Zea mays
  Clone ID: MRT4577_33361C.1
tgtgtttttatttgttctttttttttttttgggcgtttcattcatgggttttattactgtacctttgtactataacttatatgcacccttagagagggtaacaccaaggccggattgtttttataacaccagggggtgagacaatttacgctccctgaaaagccgtgattgatggggctaaaaaacacttgtacaacatggtcgttgagtccacgcggaaatgt

SEQ ID NO: 111705 - DNA, 2152 bp, Zea mays
  Clone ID: MRT4577_33362C.1
gccggccgggccgggctctttgcttgcgtgtatcccccgtcctttttagcggcttctccgactccttccgatcctctcgcctcgtctccgtcgtcagtcgcctagctagcttccctcacaagcagcaaggcgggagcgaacacgccggcgaccgttagcgccgaccgacctccgcgccggcgctccgcccttgcaaagccgcagccgcgcgcttttatgctcgcggcagctcggttcgtggtctctactagcggtatcctctcgccctcggacctttctgagaaagcgaagattccggtatggaggtggaggcgacgcccacgacggccgtgtcatcttccggcgtggccgcgcagctgccgccgcccggcccgcccgccaagaaaaagcgtgccctccccggcatgccagatcctgacgcggaggtgatcgcgctgtcgcccaagacgctgctggcgacgaaccggttcgtgtgcgagatctgcaacaaggggttccagcgggaccagaacctgcagctccaccggcggggccacaacctgccgtggaagctgcggcagcggagcggcaaggaggtccggaagcgggtgtacgtgtgcccggagcccagctgcgtgcaccacgacccgtcgcgcgcgctcggcgacctcaccgggatcaagaagcacttctgccgcaagcacggcgagaagaagtggaagtgcgacaagtgctccaagaagtacgccgtgcagtcggactggaaggcgcacgtcaagacctgcggctcccgcgagtaccgctgcgattgcggcaccctcttctcccggagggacagcttcatcacccaccgcgccttctgtgacgcgcttgccgaagagagcgccaaggcgcgggcggaggcgccttccgcggaggatgggagctcggcagccgccgtggttccgccaccggcacccccgcctgcgccggcgccactgcgacagcaaccgcccccgcctgcgccgcatcatgcggagccacgtaatgagactgacacgaatgcgactgaggccgtccagttcgcgccgccgcctccgccaccgccgccgcctccgccaccgccgccgccgcagttacaggtaccggtgctttcgcaagcttcggtgagcgctgctgccaacgttggcgccagcagcagcagcagcagcgtcgcggggacgtcgcagagcctgctcggcggtatgttcgcgccgtcgtcgatggcgtcagcgccgcagtacgcggacctcggcggccggccggagcgcgcccatcccgccaagcccccgccgctgtgcctcgccacggacgcatcgtcgtcgatcttctcggcggcgccggcggtgaccgccgagcgccagcagttcgcgccgccgcctccgtccccgtccccgtccgcacacatgtcggccaccgcgctgctgcagaaggccgcgcagatgggcgccacctcgtcgagctcctcgttcctgcgcgggctgggcctggacgtctcctcgtcgtcgccgggcgcctcgtcgtcaggccagcagcaccagcaccaggaggccatgcgggtgtcactcccggacgcctcgctgcagcaatggccgccgcggctggagctggagccggcgccaatgctgtcggccgggctcggccttgggctgccgtacgactccaccggggctcaggtgagcctgccggagctcatgatgggccagtcgtctctgttcagcgggaagccggcgacgctggacttcctggggctcgggatgagcccgtcgggcgcgtcggcaggacgaggcctccccgcgttcgtccagcccatcggcggcatggccgggaccggggccggcgcagccgagacgttcggcgccgggcgtggcgcgcaggcaacgccgtgggagaggaatccgagtagctcgccgatcctgtaactaaaaacttggatagcaatgcaagtagtttggattgaaccccaggcgctgtgattttgggcaaaaggaagaggaaacagtagacgccaggttcgattagcagctacgtagtcttatgttgcactgccggttcttgctgttcttttgtttctcttagctcggtacgaagaaactcactcactctcctacaagaatgctgctttgcacttgcttcaaaaccccccccccccccc

SEQ ID NO: 111706 - DNA, 895 bp, Zea mays
  Clone ID: MRT4577_33363C.1
gtaccctcgggctcggccgggctctctcgctgctttgcttgcttcccccacccccagccccatcagctgagcctccgccgacctcgacgaagtggcggcagaacacgcgcagttgctgagttacggcacacaccgcagcagtgcacaccacatccacacacgcgcctggcggtggagtgacaactgacaggcatcgggttgcttccggcggtggccattgccaaccccgccccatctccttcgtcatgcgtacaagacatccccacatcgccgctcctccacctcctcctcgcatgacgtcatccccgcaccggcactgcaccacaaatccatcccccctcccctcccggcccctgcattgcatccattcttcttgcttccccgaaacctcgcgcttggtctgacctgacgcaacgcgtcctcgatccctgagataaagctcgcggcattcgcttgttccgccaaattcagtcccttgaatttcctgagctgtcgaagtttttcttctggttcgattcttcggagaccccctggcatttgtgggttccgccattgctcgctggtttgatccgtcctagttgccgaagcgcctgttgatttggttctaaaatacatcgttcgtccttccaagttcaaaaggggggaaaaggctcttctttttttggatcctgatttgagtgtgtcacctttgcttccggcaatggggaacaacagcagcagcggcggcggcaacaggcgtccggagcactcggagtcggcgctgccgcccgaggcgtcgccggcggaagagctgagctcttatgaggcagcgtgccggtcggacccggagctgcgcacgttcgacacgacgctgcagcggcgcaccagccgcgccatctcgacgctggcggagggc

SEQ ID NO: 111707 - DNA, 318 bp, Zea mays
  Clone ID: MRT4577_33364C.1
ggttgggccggaggaaacgaggcaaagggcccacccgggttttacgaaacaaggccccgggcaacttcctcagaaacccccaaacaggggggggtaaaaccgggcccgggggggggggggatcaaaaaaatactaacctaaccacaggcggggtccaacagaagggggggcacagccctgttaattggaaacaaaagggcattgaccacccccccctcggaaacgaaaaaggcaaaaaaaaggggctaatttggcgctggggagccgggggcggaagaccttagcggcggaaaccctgttggacagggggggcttgac

SEQ ID NO: 111708 - DNA, 158 bp, Zea mays
  Clone ID: MRT4577_33365C.1
aaagcaatgagcatcctcgttgatagacaacaacagccgacaggtcaaccgaggcagaattaaaaacaacaacttgatatagggaaacatgaaaggatgattggaaagatatgccactatcactaaaattacaagttccttttgaatgccaggaccag

SEQ ID NO: 111709 - DNA, 346 bp, Zea mays
  Clone ID: MRT4577_33366C.1
attaacaacctggcaatcggacaaaccgtgatgggggagcacaactatgggtgattttatctggacacattcaccatttcattctagagcgggcaaagagaatggtcacaaacagatgtagaacaagggtgtttacagggccgtttgtcagagtcggcaaaattttaaaccagcgacaccacttcataaccagcaggcagcagcacactacttcagatcggtgggatgtttgaaaaagagaagcccttgctaccttaggacgtatagtatgtgatccttgggcagcagaacccaggggtgaacattacagtgcccaacatcatgaagaaaatatggtgcgcgcggt

SEQ ID NO: 111710 - DNA, 856 bp, Zea mays
  Clone ID: MRT4577_33367C.1
aaaaaacctcgcctcgtcgtccgcccacggtctaatccgattcaaacgcaccgcttcctcgtgtccgaactaagccccaatcccgtcaccaccgccgctggtgctcggcgcgatggcgcagaaggacgccgccaatggcaacggcgccaccacgcgcccgccgcccactccctcccccatccgcttctccaagttcttccaggccaacatgcggatcctggtcaccggcggagctggcttcatcggctcgcacctcgtcgacaagctcatggagaacgagaagaacgaggtcattgttgctgacaactttttcactgggtcaaaagacaacctgaagaagtggatcggacaccctagatttgaactcatccgtcacgatgtcaccgaaccactgctcgtggaggttgaccaaatctaccaccttgcttgtcctgcctcaccaatcttctacaagcacaaccctgtcaagaccatcaagacgaatgtcattggaaccttgaacatgcttggacttgcaaagagagttggagctagaatattgttgacttcgacctctgaagtttatggtgatccccttgagcatcctcagacggaggcgtactggggcaatgttaacccaattggagtcaggagctgctacgatgagggtaagcgtgtagctgagacactgatgttcgactaccacaggcagcacggcattgagatccgtattgccaggattttcaacacctatggacctaggatgaacatcgatgatggccgtgttgttagtaacttcattgctcagggcattcgtggtgaagcactgactgtccagaagcctggacacagaccaggagcttctgctacgtcgctg

SEQ ID NO: 111711 - DNA, 418 bp, Zea mays
  Clone ID: MRT4577_33368C.1
aaaacaagagggaacggtgcggcgcctgcagacacctccccaaaattcccgattcgacccttgcttttgattcaactctactccttatttgcggctgaaacaactactaccgtgcagccaactaactcatttgagccctgctacctttttgatacaaccacagttgttgccgatctaccaccacgctacgcctaatactgacatcctattacaactgcaacaattgctgccattcaaccaacttgatttcacaaacccatcagttttctaccaacaacccattatttgtggtgccctctattagatatcttatgagttataattcaataataaagttttttgtctgatatttgtggcttcccataaataattaaatgtcatttttaaattaataaacattattattattaaattggtt

SEQ ID NO: 111712 - DNA, 541 bp, Zea mays
  Clone ID: MRT4577_33369C.1
acgcaccttccctgccgcaccctgctccctggatgaagagtagatctctggctgtcgtctcggtcactaaacgccaaggcggctgcctgtacacacagtgatgacggacccaaagaagactactagccctgctcttaggttgcgccgagcatgctagtagcagaccagaggagcgtgcgaactgccgggcacatgtggagccgcgggacgggagtagtacctgatggctctggaggagtgcttaacgcgacttcttgccgtaggcgagacctggactaggaggaggacgacttaccaaggtatattcactaccgcagtccaatgctggcgggattacttgaccgacttaccgaccccgaggcgcaaacgctgcagcacatggaggagcgcctgggacagtgcccagaggagttcctgccgctggcgaaaagcaatcgtcggactgccttggccttacatgggcggagacagcacttggagccgctccagctaaaggcgtggagccgtgattggggttctacagaccgaaagcgagcacaaa

SEQ ID NO: 111713 - DNA, 685 bp, Zea mays
  Clone ID: MRT4577_3336C.1
gcgatctagaactagtctagttgattcgcaattcgcatctgggttgctcgccaaaccaattccgagcacaaaaaactggcaatgtttcttactgacatctactagttataggtagaccgcatcaccaaatccacatgtgacagtgacatatcgaaccagagagtggaagctagaaaacctcagatgaagagcgctacaacactcagaaccggcgaaccgaagacctggggttgaccctcctcaccttggtggccatggaaacggcgccggacgcggcggaagccttcttcatctccttactgctcctgagcgaggacctcggccccaagtctccaccgcggcatgctgcgaagtcgacggctggcatagacctcctcacggactccgcgccgctggcggcgtaggccttcttggctacgcggcgtttggacagctcgacggcgacacaggggttctcggccatcgtctcggggtccactgccgcggacgcgaactcctcggaatagaaggggaagccctgcttgcgcttgagccgctcgttgcggcgcgccgagtagaggtcgtagagtctgccccgcacgaagagcgggccaccagacggcgtgcccgctgtcctggcaatcgcggcgaggttgaacgccactagctcgtcgtgggcgtccgcgccggccgggagcccggccgg

SEQ ID NO: 111714 - DNA, 385 bp, Zea mays
  unsure (1)..(385): unsure at all n locations
  Clone ID: MRT4577_33370C.1
caaccaaggaacgaggacagaaaaaggtgggaagnanaaagngnacggcaaagagcancatccggagcgacncancacccaccgagccacccagngggcacgacggggagagacggacgccacgaccaccgggagccaaagggacgaccgagcccaagccggagccaggacaggaccacaacgaaaaacagaaaagagcaccgcgcgagccacaacaggcaaccccgcagagacaccaacccganggacgccagccaccagcagcaccaggaagggagaaggaagggaagacgggcaaggcaaacaagaacgaaacgcgacgcaggaaacgcgagacgagccagggcaaagcaggcggggcaagacgagcgacacgcgaacgcca

SEQ ID NO: 111715 - DNA, 694 bp, Zea mays
  Clone ID: MRT4577_33371C.1
ggaccctcgaggctgccggaccgcgtccacacctcagactctcaagctcatacaagcctacaagcaatacatcccacagtggagtagggtattacgctccggcggcccgaactactctaaatccttgtgtgttcttgcgttcttcccgttcattccaacgatcaagcaaaacgcctaagcccctcctcatctcaggatttagggcgggtgcactccgccacccggccggagatttactctccgacagtatacaacacaaacggtggccgacatcgaagataaaagtcatgcaagtttatgtcgatggactaggattggtgaaggatgaatgtcgagcttaaacagggtgattggagaaactgaaggacaaaccattggtgactgatacctggggtcattgccaagtgtaatagtaaatgtaggagtacagcgtgctgacaaaatcaaagcgagaggttggtcaagtcaagcgaaggcgttagaagacttgacgattcagtattaagaggcgatatatgtcaagatcaatagatcatggagagagcatagagagtatactactctagagtagtttgggtggtttagaaacttgacgtgtcatatgtgaagatccaacgagcctcttctctctagcacatcgctttatcttatcattgtaagttttcccttcctcttgtttctattgagattcaca

SEQ ID NO: 111716 - DNA, 489 bp, Zea mays
  Clone ID: MRT4577_33372C.1
ccacaaaaggatcccctaaaataaacaaaaaggggtttatttttattaggggaggggaatcacctttcgaggggaaacacacccccccccccacacaaacggacaaacaggtttgggtttccccttcctttaaggcaacggtttgaatgaaacggggatcctgtcgaaaccgaatttattgtcctcccaaagaaaaaaaaacagggccggaataagtttcccaaccttcccgtttccgaggggttggccgccccactcaacaacgggaaaaagggggaggccgtttccaaaaaaccccatttgggggctgcgttgggggtcctcggccggaaggcccctggggctaacccccgaaagcaggccggggtccacaaggggagggcccagcgcaagcatccttttggccggcccccgctgaggattttgtaaaaggccggaaacacaacctcccgctggggggtaaaaaaccccacgttaaccagggggccc

SEQ ID NO: 111717 - DNA, 274 bp, Zea mays
  Clone ID: MRT4577_33373C.1
gggaaaaaaaggaaaaaatttttgaacgttttgggggctaaggcaaaatgtttaaatttttccccacttaaaaaatggggccagttggggccccaaaaccatgggggggggcaaaacttccccccccccaaaaaaacaacagggggtggcaaaattttagtcccatttagggggtggattttttttgaaacaccaaccttataaccggagcttaaatgttgattggccggaccccttccccttttttggttgccacggggggtttttaaaaccc

SEQ ID NO: 111718 - DNA, 401 bp, Zea mays
  unsure (1)..(401): unsure at all n locations
  Clone ID: MRT4577_33374C.1
ccgcggggcttggcgctggtcctttggttgtttctgacgatgggtcagcccttgttcgcttcggtccccggtcttccttctggcgtgttgttctagttttgggttgggttgttggtttaggctggggtttaggggccttggtttcttctcggcgcccggggccgcccgttgtggctgggtcccgtgtctcgccgggggcnnnnnggggttggggggggggggnnngntgtgggtgggggnnggcgcccgggtggggggtgggnggggggggggggcnnggtgcggtcggcgggtgggggggggcggcggcgggggncgggcgggggggggggggggcgcgcgccggggggggggggcnggggggnggggggggggggggtcggggggggggggggggcggg
